United States Patent Application Publication US 2007/0054278 A1 - sequence listing, part 45

SEQ ID NO: 94673 - DNA, 211148 bp, Homo sapiens
  misc_feature (1)...(211148): n = A,T,C or G
gaggtcaagagatctacctcatcctggccaacatggtgaaatctcttctctactaaaaatacaaaaactagctaggtgtggtggtgtgcgcctgtagtcacagctacttgggaggctgaggcaggagaattgcttgaacccgggagacagaggttgcagtgagtgaactccagcctgagtgagactccatctcaaaaataaaaaaaagaagaagtttcgaatacgtctcccacttgggtttgggagcttctagtttcattccaaccacttactgtgtgtccactatgtgccaagaattatgcaagataagtttatgcatcttcgtatctttggaggtagatgaataacgaatatacacatgaatgcatgagaccgggaggtataggtaagaactagccagacccaaaattccatacaaaatattaacaatttccacttagcccttgatttttccccaacgtgctgacaataggggacccctccaggatctctgttaaatacacatgttctggtgagggtagaattaagtatgagacaggagggcacattcaatgatttctaaatagtgtggggtcaaaggccccacgttggacaaagcccagaggcaacctcccccaatcttaagatcatggtttgggatacccactgcacacaggaatttgtcactctgttcttccatgcctttattggtracagcaatggacaagaacaataccaggcatagcagacaccctagcccagtacctgaggtgccaggcaggccctgaagggccattggcacatccagtyccagcccaagatccagtctacccaggccatgtccccgaatgggcaggaggccgtctgtccagtttgtatgtgtggatcagtctctctgagtgtctgagccgctgcctgcagggcccccccattctccgcacatggtaggggctgttaggaacatagcgtggcatcccccggtggaccactgggccccagtgctgaccatggggattagggccagggattggaggtggcagagggccrggcacaaagttcactccagggccacatcctacaaaagaaccagtcattrtaagagcaggcttctggccagagtgagtgcagctctgccttgaagcaactcttgtcctccaggtgagcttctctgtttccctatctacaaaaaagggatagtccttcccctaccttcagacggtgaaacagtgacaaccagtgagctgattaatgaacctacagatgatgtttcagactcagggactgctgtgaccaaacccagtgctaggggcacaaggagctacccaactcctctcagctcacctaggcataggaggctgggtaaggggaggtacaagagggtgggggagctgcagaagcacctacctaagtggggtggcatcgagaagtcctccactggattatagttgaagaattcatggggtgggaagggctggcctgggaaaaaaggggtatcctggggcaggggtgggaagaggggaggtggcgagggctgaggaagygggtagggaaaaggcatgggaggaggcaaagaagaaggtgggggtgggagcaaggccaggtgctccccgaagtctggggtctgcctatggcttccctggaatggatgattcatctctgcccagtcctcaatccacgggtctaggaatgggatggttgttttaggtaggcttgggagccaggctgccctgaactctggccatccacacttctaaagctctattccttcctcttggagagcagagccaccaggctggagcatccttgccctctacccagttttcctcattccctctcatttcaggccaagcccaaagtgtgttccttctctcttacctctcagacttacctttgttctaacctacacttccctccagagccttctttgtttgcccaggtcttgtatctagctttttcctcgcccacctcctccccatagaccagtaaataagccaaacataaagatcctgttattcccttccccaacaacttccttttaccatccaaacttccaaaaggaatgttttgcccaatttccacttcctcctcaattgctcactccctcctttaatccaaacccatgccctcaacacttttcctactaaatgtaaccacttgctaacaaattcccttcttctcaacagtcatgtgacactgccagcagcctcagtccttcctaaaagtgcccctgccctcatctccttttgtttccgccatagcccctctttcctgccaatccaaagcatgagcatcgttctgtctccctcacagctgccactgtgccctcagttttaatctctctgctgggtaccaatgactgcaaatctactctgtatttccaaagaacctcaaatcaatctgctgtgaccaaactcaccaactcatccttccaccccaaatcaactctcccttttcatggccctaacttctgtagctccaaattggatttcaaaggcctaagccatcaaaactagccttacaaccttcagggcatcccatcatttgctggggatcaattattacatctaaacaagaaaatggggatgtttaaccaaaatctgtattcacctccctgatgctccaactcctggctaccaagtgttacaggtctgtctctatgatattcctggactctctgtgcccccacatcctcttgtgctgccataatcggccttctaacatgactcgtgcctcccattcaacaaatacaattctgttgatactgtgtacagggaaattgtgctagacactggggctgaaaggggtgagtcgtcaacaagtgcagcaggaaacttgccctttaaggacacgatgcaggggagaagcagccatggagacaatcagccatggtgccctctttgtgtgcatgcagggactagggtgttgacatggaaacagaggttctgcagcagagtgttacagttgagatgtgatggggagcagtgcctcaaaacaagggggagtggggccctcagaagcctccaccaaaggcccagagatggggcccgaggagagctacaccaagctgcaccagtcacagtgggactctgaggctgaactaagaagcctatggaacactgtccattgagcccaagtccataaggctggccttcccgatgcaacatccctgttccacaccctgccagttgactgtacccccrccccccagctgtgggcttctttgcttctgccacactgcctggatggcccttcctccctgtctttccactcctcacacccatgccccatttctttcctgttaatctgttgggtaggacccttgcaacatgctgccttatgtggtcaatacttgtacaagctccttcaagcacacagaaatgactacacagccagactgtagaaaactggaacttggacaagaatattgctccgatgatctaaccctcctcaggggttgaggaaggtgcatgcagaagccacaggagtccttcaagggacctctacttcccttgagtggctgtgtcccattctgtttctgagccctgtcctctgagggccccagtgcatcactacccccccacttatggtagggctcaccagggggatagccacgcttgggcagctccacgccccaggcgtcagccacatgggtcagaagcaggtgtgagaggtggcggtgtgcatgctggtcccagtggacaccatcccgatgacggtgctgtactgcatgccggaagtgaaagtggaggtctaggacatcaaagcagtggtccccggccagcgtagcactgtagaagttcccttcaaccacatcccgccgcagggagcctgccaggggctggagctaagtgagaaagtgcagcctctaagagccacagaacgcagcagggtctgaaagcagggtgtcctatctaccagtctgctatcccatctcttgtcctgatgggcctcagtcacttgcctctggcaggaggaaacccccagtgatacgttccccgaggggcatcgccatgttccacaccagcaggcaggagtctggcaatacttggtccatgcgcacaaacacccgctccaggttctcccggtagctctccattgagcagcgaccatatctgttggataacacacagggtgggcaagagcacaagggtggactgcctcagccgtacttccagccccaaccagtattcccctttccctcgccccaacctggagagatcccagaggcaggarttgatgatcaccaggtccggggcaggtccatatgtcagctcttccagaacatcctcaaggtactcggagtaaacacgagtgaggaagtagaagcgcacaaggtggtggccagagcccgagcagaactggcggacctcacgatactgtgtcccgttgtgcagctcgcccagctggcccccagccaccagctggtcctgttcaaagctcagctccccctacccaccccccccaccctactggtcagacccatgccagggaggagaaccctgccaggccagggtctgtgcccacccaccactgacatggccaccaagcttccctcaccttggctttcagctgggcagctgtgagcagtgagtctttctggagcaagagcaccaggtccttgtacacagccctctgaactgggaggagacagagatcccaaggctgaggcagacctcagcctgccccagctccttccaagtccaggaccccattttcccagggctgaggtgcccgacaccagctctgtggttgacttagacgcaggagaaaagatgaggttaaaaagtcctggcattgcctctgttctgtgtgcctcctggccagcagtatacagtgacccaagatcacctggcagaaattaagtcggccaagtcacccaggagacacactacacaatgcaacgctttcgtgatggaaattatggggagctgtcagggcgagaaatgctgagcaaggatgggctaaaaagtgcacaggttattacacctgtcaggactcctgtggaagatgtgtgggacataaaaagagaaaacctactggacggaacagaccagaagacagacaagagatgtgagatggaaacaaatggtccagacacactgaacgggctgcaaggtgtgggactggaagcgtcaccctagaagaggcactcactggagtcccccaagatgaccacgaacttgttgtgtagcagctgctggacttccgaggcmtggaagtggaccatgtcgcttcgcagcgggcggcgcggctcctcgctcgacagacagaagaccatgccgccaccagcaacgacaggctgcagggagaggccactaagcagcgcgatggtggggactctgggcaggtcagcctcagggctagcccctccggggctgctcaatgctaaagggaggaggtgacggcagcagagccatggtggcgccagccttggtcacacttggtaccagaggcagggggtcgtccagccagcaggcctccagggcactggggagcttcccgcgcggcgccgccctgcgcctcgccacgtgcccgccgccgtcccgcgcatgcgcgcacccgctcgcgccaattaccaagtcccggggctccgcggtgttcacccgcgacccgggtatgcctgcgcaccgcgcgcctggcccgcagcgggctcctagccaagcctcatgttcccgcgccccagtcggccagtcggttctgcaaagctcccgccccgcagagaccgtgggtccaggttagccgtcggtgcacagcccagcgcccagcgctctccatgcgagcgtcgckgtggccccgacggcgcctcaggcctcggcgcctcgggctgcgacgctcacagcttccacttccgttcacccatgtcycgccctgagcgacccccagtgcccgaagggaaagcaaggcgatggaggtggccgccacagggcgcaggagccagggctgggcccacttggcgggcgcgaagcccaggtacgggctggggtctcggggcggcagccaagtgaggctgcccacagtggtgatggccgcggcggcggcctcgccacgtgacccggacgggcggaagcggaagtgccggcctggagcccgctctaggtgggtgtcccctcggtgcttccyagctgccgtctgcaccagccatggactgctacacggcgaactggaacccactcggggactctgccttttaccggtgagctgccccgccctcccgcccacggcctggcttaccctgctcgcccgccggctggagtctcccggcggcgttcgcccctgtcactactggcgctggggtccgccccgcgccggctctccccgagygtctgccacttagcgcacagccgcctttgggcagggagccgggccttcccctgctccagaaaaggaaactgaggcaagcacagtggtcaccccgaagcccaggtctgttagcctccggaaagatgctcagatctcgctgagggaggcagctcgcgggtgacagcgagtgcccagtctcctgccggaaagtgctgctgaagtcagaccacaggggygctccgaggggggcgggatcgcacggcgggcggggtaacagtgctgaccaaggctgggaaaagggggcgagtcgtccgtgaatcccggaacagcggaagtgggaacccctgggttagggcagcccgcccatgggagttgtagagtcctaaaccacggatttttctaaagtgtaaacccgttacatcgttacccagattaggattttcccatagcttccctaataggaaaaactacgaacttctcgtggaacgtctatctgtaaggcagcccgtttgtctctccaacctcatctaccgctctcctacccaaatcttgcgttccagctgcgcagaattacaaggccctaaccagtctgcagtttctgtggatactgccatttctctctttatctcactgaagaattttgcgcatccttcaggacttagtagttcaagggttctttctggaactgtgcctgattctcccccaatagaatcctgtgggcctcactgggcccagtgctagggtcttttaggtatggtctatttgtatatttaggcgacatttgtataggtttcttctgctaaaccaggctccttcagggctgaaagcattttttttttttttgacagagtcttcctctgttgcccaggctggagtgcaggggcactcggctcactgcaacctccgcctcccgggttcaagggattctcctgcctcagcctcccgagtggctgagactgcaggcccctgtcaccacgcccggctaatttttgtattttttgctagaggtgaggtttcaccatggtggccaggctggtcttgaacttctgaccttaagcaatctatccaccttggcctcccaaagtactgggattacaggcgtgaaccactgagcccggccaaaagcatgtttcttgcttctctttatcaccagtgcatatttagaacagtgcttgctatgtaataattgcccattaaagttttttaaaaatattttactgggccgagctttgtggcatgttcctatagtcccaggtactggagaggctgagttaggaggatcactggagcccagaagtttgagggtgtagggaccgatgttagaacctgtgaataaccactgcactccagcctgggcaacatagcatactccctctgaaaaattaaaaatattattttaggccaggcgcagtggctcatgcctgtaatcccagcactttgggaggccaaggtgggtgaatcacctgaggccaggagtttgagaccagcctaaccaacatggtcaaaccctgtctctacaaaaattagccaggcataatggcaggtgcttgtaatcccagctacttgggaggctgaggcaggagaatcgcttgaacctgggaggcggaggttgcagtgagccaagatagcgtcattgcattctagtccaggcaacagagtgagactctgtctatatatagatatatctatctatatctatctatagatagatagatatagatagatatatagatgtatctatatatatatagatacatctagatgtatctatatatatatagatacatctagatgtatctatatatagatagacatatggatgtatctatatatagatacatatagatgtatctatctatagatagacatatagatgtatctatctatagatagacatatagatgtatctatctatagatagacatatagatgtatctatctatagatagacatatagatgtatctatctatagatagacatatagatgtatctatctatagatagacatatagatgtatctatctatagatagacatatagatgtatctatcgatagacagatagatgtatctatcgatagacagatagatgtatctatcgatagacagatagatgtatctatcgatagacagatagatgtatctatcgatagacagatagatgtatctatcgatagacagatagatgtatctatcgatagacagatagatgtatctatcgatagatagatagatgtatctatcgatagatagatgtatctatcgatagatagatagatgtatctatcnnnnnnnnnnnnnnnnnnnntttttaaaaatattttactgggccgagctttgtggcatgttcctatagtcccaggtactggagaggctgagttaggaggatcactggagcccagaagtttgagggtgtagggaccgatgttagaacctgtgaataaccactgcactccagcctgggcaacatagcatactccctctgaaaaattaaaaatattattttaggccaggcgcagtggctcatgcctgtaatcccagcactttgggaggccaaggtgggtgaatcacctgaggccaggagtttgagaccagcctaaccaacatggtcaaaccctgtctctacaaaaattagccaggcataatggcaggtgcttgtaatcccagctacttgggaggctgaggcaggagaatcgcttgaacctgggaggcggaggttgcagtgagccaagatagcgtcattgcattctagtccaggcaacagagtgagactccgtctatatatagatatatctatctatatctatctatagatagatagatatagatagatatatagatgtatctatatatatatagatacatctagatgtatctatatatagatagacatatggatgtatctatctatagatacatatagatgtatctatctatagatagacatatagatgtatctatctatagatagacatatagatgtatctatctatagatagacatatagatgtatctatcgatagatagatgtatctatcgatagatagatagatgtatctatcgatagatagatagatatatgttatggattgcaagtaaagatcacaaagacattgcatgggggtcttacttaaatagaagacatttgtttgtgctaatgaaactgtataccattctcactgacatattaaaacttttaaatgtaatttttggtacctaatgtgatatacttcctagatggacaagtgccctgtggcagtttttagagacctgttgcatttgttgtttatttataattctctcttagaaatatgcctgtgcaattggccgagcgtggtggctcacgcctgtaatcccagcactttgggaggctgaggcaggcagatcacgaggtcaagagttcgagatcagcctggccaacatgatgaaaccccgtctctactagaaatacaaaaatttgccgggcgtggtggcacacacctataatcccagctactcgggaagctgaggcaggagaattgcttgaacctgggaggcggaggttgcggtgagccaagatcgcaccactgtactccagcctgggcaacagagcaagactccatcttggggaaaaaaaaaaaagaaaagaaatatgcctgtgcagtatgaaaaaattgcaaaaacttcattaaaaatccataaatgcagtaggaaatgatttcaacttgtttctgtggagaaggaatttcagctgaccaaggtagccatgtcatttagtatttacacaccagctagttgatacaacattcacttttaaaatatcaactttacttgtattattttgaagatacctgttgcctacccaggcttattaaatcaaagagtactgcagacattgacctcattaccacagagctcttatttgtcagatgtagtctttgctttgttgacatgttaataaggttttaaaagaatgtatgtgttgggtgcatgccacagacacaatctgaatgattaatctactcttacctgtgctgtactgccagaaaggattaggggtctaaggcttgctggggaggatatttatgttttaagttgctaacagctattgagcctttcttatgtactaaacatgctaagtactttatgtgttttaacttgcttaagccttacaatcccatgaggtaggtaccatcttactgatgaggaagccgaggcacagagaggccaggttatacaactagtgaccaggttacacagctattgagtagtggagtcaggctttgaacccaaacaggttctagacctctgttaaaaaatagggttttgggggcgggcaggttaacaggaaaatataagagcatgtttcaccttttccaccagaatggaaatgctttaagagcaagtacttagttttgttcatatgtgtgcatagctttatgcataggcaggacttgatacatgtctgagtcagtgaatgaatgataaaacaggtggcagacattacatttcaagtcctatctgcctgacaggattcttttgtattgggagtagtattctggagaacccactcaatttgggaaggcaaggaggagaaacggtgaccagttcttatgggactccagaagttaagctatttttttaatcctaaaaatgcaacttgggctaatctaattaattaatttgtcccatccctttggcaggctgagccagtatgataaaacagatgtggaagagttctgcctgccatcatagagcttacagccagcaggcgagacagttgataatcactcagtatttgtttgatcataatcactataaagagaggtatagtagcaaataacctaagagaacatgttacagactccaggagtcaaaggtagagaagacactctgaaagaagtaataataccctatccaggggatgagtagatgtaggtgcatgaagtgggatggaggtggagaagagcatatacacaaaagtcttgaggcaggaaggactgaggcatgcacagtgacctaaagagagccagtgtggctggagtgctgtaggcaacaagaacaggacatggatgaagttgatgcccttcgtgtaggggtcacacgctgcagggacgtgtagatcaccgttatctgaagaacgatgggaagcctcaattaaaggatcttaacaaaaggttgatgtaattggatttgcaaggggtgtgtgtgtgtgtgtgtgtgtgtgtgtgtgtgtkttttaagttccttttgtaggcaatgctggggaaaagttggaaggaacaagcaaaatggaagcaagggagatggttaggagcctgatggaacagaacaggaaaaagttgaggatggccagtactggggtggtgatggtggaggtggagagaaggggccagtctcagagatttagaagtaaagtggaagaaattcgtaatgactgcacttggtggggaggaaggagagcaaggaatcaaggatgacttggatttggggcttaaataaaatcatgagaaaggaagcgtgagtttggcagggaaggaggtgagcttggttctagatacattgagtttcaggtactaagaagcatcttatggtaaaagaaaggagagttaagatacattatatactcctgaaattatttttagaagggagggcaactatttaagtagttatatttttgtttcattttgtttttttgatacataaacatgaacttttttttcaaaaaagtcagctgtgtgtagtggcacgcacatgtaatcccagcaacttgggaggctgaaaaaaaaaaagaacattttaaaaaattgtggttaaatatacatgayataaaatttactctcttaaccatttttgagtgtaccctttaatagtgttaagtatattcacgttgttgtgcaaccagtctccaggactttttcatcttgcaaaactgaaattctgtaccctcaaacaactccccatttcctcctccccccagcccatggcaaccaccattctgttttctgtctcagaatttgactacyctagactccttatgtaagtggagtcatatagcacttacttcctgtgactggcttatttcacttagcataatatcttcaagatttatccatgttatagcatgtgtcagaattttcttccttttcgaggctgaataatatgccattgtatgcatctaccacattttgcttatccatttcatctttccatggacacttgggttgctggtagcccttggctattgtgaataatctgctgtgaatgtgggtctacaaatatctattcaatattttctgtactccgctytttttttttttttttttttgagatggagtctcgctctgtcgcccaggctggagtgcagtggcgcgatctcagctcactgcaacatctgcctcccgggttcaagtgattctcctgcctcagcctcctaagtagctgggattacaggcacccaccactgtgcctggctaatttttgtatttttagtagaaatggggtttcaccatgttggccaggctgctttcgaactcctgacctcaggtgatctgcctgcctcggcctcccaaagtgctgggattacaggcataagccattgcacccrgcctctgtactccgcttttaattattttgggtatatatccagaagtggaattgctagatcatatggtaattctatgtttacttttttccatagcagctgatgtaccattttacattcccagcaacaatgcccaggagttctttagtagtatatgtttttgagacaggctggaaacaagggatttcaggagtgacagtgaactctctttagggcctgggatttgggaattactggattataccccaaggcaaccagattatacctaacatgcatcttcctccctagtggtctgatatcttagcttggacaggctggagatcatctattttcactcaagggtcttctcacaccccagtagaccatgcttctccagcagttcagctgccctgccacagaaatttcttcactrtttccagcaggggactgcaattgaggctaccggtacctcactacatccttaggtttaacgatttcctggtattcgattcgattccaaggtccatttactgctgctgagatttccacttctgggacgtaggagtggagcagaaagatggggctggccttcctcactaagtgtgtggcctctcttcacagagtcctcacccttaggcttttctgagaagctgctcttcactctgcccatccataccctgtgctaccctccaggcacagtttgagtcacctcactgtcctctagaagcccactttacctctaaggcttcaggaggtggtccatacgttattgctcttcactccctgacctttacttttgtacccctttagggggtccattgtgtctccttcccacctggtctttgtcgctgcagacatccttgaccaactgcactgctccctgattgttgttttagcccacggcctcctaggcatcccagctcttgccaccttctagggagacttaagtggccacctggcttcatggttctatgacctctactcaagtgattttatccatctcacccaccccctccctggatcccatcccacccttgtgctcatccagaactgctctacctctgaaatgctaaaatcaaaccgccccctctattttttttttttttttaagacggactcttgctctgtcgccaggctggagtgcaatggcatgatctcggctcactgcaacctctgccttccgggttcaagcaaatctcctgcctcagcctcccgagtagctgggattacaggcatgcgccaccacacccagctaatttttgtatttttagtagagacgaggtttcaccatgttggtaaggatggtcttgatctcctgacctcatgatccgcctgtctcggcctccggaagtgctaggattacaggcgtgagccaccgcacccagccccgccccctctcttaccataagctcttgtctgcaccgatactctaatacctccccatgttatacccatccttcagcctcctcaggatcctcattcatggagccctctgttctcttggtgtctacatgcagaacccccttttgtagatgtttccctctctgcccaccttagagtgcagccacagtcagctgcttcggtttttttcttgccctttccctagcaaccttgatcctttgtcctttggttacccctgcacggtgcagaaccaccttccagtgcaccagcctctcaccacctctgtacatgtacccagtctgatgagcactgccatgaggttcacgtagcaggcagattgggactgctacacatccacaggcaccaaacccaactggggtcccacagtcctattatatggagtcagcctgcattcactcaccacaagggctctacttctatttattttttatttttaattttaattttttagagacaaagtctcactctgtcactcaggctggagtgcagtggtgcagtcttggttcactgcagcctcgacctcttgggctcaggtgatccacccacctcagcctctcaaagtgctgggattacaagtgtgagccaccatgcctgtctgaagcaacatttttgtaaggttgttatcaggtgtaatagtgagcggagccactcccacttccacctcttgaatctaggccccaaatggaggagataacaccatrtaatcatctctgattaaaagcctaggctgcatcttataagaaagaaccccacccttttgaggacattgtcttgcaattggtgctataaccaagttgtcagtaaatttaggtcagctgcttgtgagtgatggggtatagggtaaggccagttgatcccatggctgtgagcccactgctacctttctttgctatgaaatgaggtccttgattagctgcagtgctttgcagaatgccacaatgctggatagagcattctgtaaatccacagatggtgggtgctggaaaacacattgcagacaggaaaggcaaatccacattcagaatatgtatctgttccagtggggataagtcattgccctctctgaaatggaagagacctaatataatcaacttgtaggctggttcctctgggaatggtgccatattggggtcacgtattgtctttgctattggcagcattacgtggattgggaggcttctaagacagctaccccaagttaggttagcagggctttcaaggaaaagctagtctccttggagacaggaaggcttccctctggtaagggaagctcagaatgacctgggagttcaagattgtcagtttcatgtggatctaaccagatatccctcttccaagtttcaggatctcattgtttcctatcagtaccctaattttcacatgagaaatggtgtgttgggggaattcarctgttgtaattcaacaactcacacaaatttgtgtttgattttcagcartagcagctatgtggctacaaggaataagattctttttttttttttttttgaggcggagttttgctcttattgtccagactgtagtgcaatggcacgattttggctcactgcaacctctgcctcctgggttcaagcgattcttttgtgtcagcctccyragtagctgggattacaggcatgcrccaccacgcccagctaattttgtatttttagtaaagacaggtttctccatgttggccaggctggtcttgaactcctgacctcaggtgatctgcccgcctctgcctcccaaaacgctgagattacagatgtgagctactgcacccggttgaaataagattttttttggggggggtgggtgctgttagagaagacttctgcttctcagaacatgactcaagctgagtgttaacagacctgagatcactttctctttgtaaatgttcaagtgcactcaaaacaatccatcccatgccaccatctataaagtcatcattactgccacactggcaaatatagaagtcactcctacagcacatgtttcagttaccatttcaccacagtaaactgcaggcttgatgaattgtgatgcaagtgcatacagtgggttatagcatcagttttccattgacagagctcaacaccaagccagttccgaaatcccatctttagggggtctatcttctgggactattccttctataccaagtctgtaccagtctgggtccagtcagaagacttaacatggaaagtttaatataaagaattattggcctggtgtgggggctcatgcctgtaatcccaacacttggggataccaatgctggtgggtcagctggggtcaggagttcgagaccagcctggccaacatggcaaaaccccatctctaataaaaatacaaaaaattagccaggcgtggtggcrggcgcctgtaatccccagctacttgggaggatgaggcaggagaactccttgaaccttggaggcagaggttgcagtgagcccagatcgtgccactgcactccagcctgggcaacaagagcgaaactctgtctcaaaaaacaaaacaaaacaaaaaggccggatgcagtggctcatgcctgtaatcccagcactttgagaggccgaggygagcagatcatgaggtcaagaaatygagactatctggccaacgtggtgaaaccccatctctgataaaaatacaaaaattatctgggtgtggtggtgtgcacctgtagttccagctacttgggaggctgaggcaggagaatcgcttgaacctgggaggtggaggttgcagttagccgagattttgccactgcactccagcctggcaacagagtgagacgccatctccaaagaaaagaaaaagaaaaagaaaaaaattatttaactgtgataaaggagtatatgatatggttggacatggtrgctcacgcctgtaatcccaatactttgggaggccgtggcaggcagatcacacaagcccaggagtttgagaccagcctgggcaacatggtgaaaccccatctctacaaaaaaaaaacaaaaaaaacagctgggcatggtggtgcacacttgtagtcccagctactcaggaggctgaggtgggagagtcacctgagccctgggaggtcatggctacagtgagccaatcacaccactgcactgtagctgggcgatagagtaagactgtcwmaaaaaaaaaaaaaaaagaaaaagaatatgagatataagaaaattttatgatagcctggggccaaggaagagtacccaaggaatgacaaacttggaagagggagcctgtcttcaggctagggttcagacctcgttggaaaaatacagttgcagcccactggatggcagagaagttggtttgcccaggttggagctggtctataatatcagacaagcaagaagcaaccctctgaggccacaagggatgtaaagacgtaggcaagctgcaactctcagcctggggtgttaggtggacggtgtgaatgggagtgctggtgcaggcaggaggcctgcaacacacagtgtcaatatggcaaggtaggccgggcatggtggctyacgcctgtaatcctaacactttgggaggccgaggtgggcagatcacctgaggttgggggttcgagatcagcctgaccaacgtggagaaaccccgtctctrctaacgataccagtttgagaccagcctggccaacatggtgaaaccccatctctactaaaactacaaaattagctgggcatggtggtgcgtgcctgtaatcccagctacttgggaggctgaggcaggagaattgctggaacctgggaggcagaggttgcagtgagccggtattgctccattgcactccagcctgggcaacaagagcaaaactccgtctcaaaaaaaaaaaacaaaaaacacacaggctgggcgaggtggctcacacctgtaatcccaacactttgggaagccgaggcaggcagatcacaaggtcaggagatcgagaccatcctggctaacacggtgaaaccccgtctctactaaaaatacaaaaaaaattagctgggcgtgatggcaggctcctgtagtctcagctactcrggaggctgaggtaggaggatggcgtgaagtcgggaggcggagcttgcaggagccragatcgtgccactgtactccagcctgggcgacagagcgagacgctgtctcaaaaaacctgtggctgggcatacaggtgtgcagaggacattggtggaaacactagtgcacaggcaggatgcagccagtggccaggcatcttggtatagagaggaagtggggacctggtgtgggcaggaagcctggagtgcagcgtctgtccagacagcttgagaaggtgatccggaaagtgctgcgatgttgctgagggaccatgctttgcggatgtgtggctggggcggagcagtactagatattctcacaccctgactgctggctgaccaccaaccctggaagcacaggagggccccttcctagtgcagtgtccttccagcgccctctgctgagaaagcttaacatgctcactataaaggagaaatgtttaaaggaatgctgaccattaccacagaacatgggttaaagggtgaatttggagctgagaggcaatgcgttgataactggcatgctagatttgtatgaatatctattttcctatcagatgttttttcacccaatgattttagttatagaatgtcaaaagaaatgcatatgggttgtaaattcaaataatgccaaagtatatacagacatgctttggagatattatgggttcagttccagactacaacaatataatgaatattgcaaaacacgtcacatgaatttttttggtttcccagtccatataaaagttttatgtttacagtatactgtagtatattaggtgtgcaatagcattatgtctaaacaaaagtacgtaacttaaaaatactttattgctaaaatatgctagtgattatcagagtcttaagcaacgtgtagtatttgtgctggtggagggtcttgcctcagtgrtgatgactactaattaatctgagttgtggttgctgaaggttagggtggctatcataatttcttaaaacaacaatgaagttgccacaacagtgggctcttcctttcatgaaagatttctyrgtagcatgcaatgctgtctgatagcattttatccaaaatagaactttcaaaattggagttaatcctttcaaaccacgccgctgctttattaactaagtatatgtaatactccgaatcctttgttgtcatttcaacagtgttcacaatagtagatgccatctcaagaaaccactttcagccgggcatggtggctcacacttrtagtcccagcactttaggaggccaaggtgggcagagcacttgaggccaggagttcaaaaccagcctggccaacatggtgaaaccgtgtctctactaaaaatacaaaaattagctgggtgtggtgctgggtgcctgtaatcccagctacaggaagcctagacaggagaattgcttgaacctgggaggcagacgttgcagtgagccgagatcatgccactgcactccagcctgggtgacagagcaagactctgtctcaaaacaaacaaacaacaacaacaaaaaaacccactttctttgctcatccataagaagcaaatccttatttgttcaagtgctgagattgaagcaattcagtcacatcttcaggcctcacttctaattctgattctcttgctatttccactgcatctgcagagactcctactgaagtcttgaacccctcaaagtcatccatgaggattggaatcaacttcttccaaactcctgttaattttgatattttgacctcctctcatgaatcataagagtattttatttttattttttttattttttgggacgaagtctcattctgtcacccaggctggagtgcagtggcatgatctcggctcactgcaacctccgtctcccgggttcaagcgattctcctgcctcagcttactgattagctgggattacaggcacccgccaccacacctggctaatttttatatttttagtagagacagggtttcaccgtgttggccaggctggtcttgaactcctgacctcagkcgatctgcctgcctcagcctcccaaaatgcagggattacaggtgtgagccaccgtgcccagccatgaatcataagtgttcttaatggcatctacaatggtgactcctttccagctgagattgcaccactgaaaacctttccaggctttcagttttgtccagatccatcagagaaattactagctatggcagctatagccttataaaatgtatttctaggccaagcatggtcgtgcacacctgtaakmccagcactttgggaggccaaggtataagaatcacttgaggccaggatttcaagaccagcctggcaacagagaccccgtctctacacacacacacacacacacacacacaaattttttagccaagtgcactagcatgcgccagtagtcccagctactcaggaggctgaggttgsagcatcacttgagtccaggagtttgaggcttcaaggctrcagtgagccatgatcacatcactgcactccatcctgggcaacagagcaagacaatgtctttctaaaaacaaaacaaaacaaaacaaaaaaaacgagagagagaaagaaaaaaatgtatttcttatataagacttgaaaattgaggccgggcgtggtggctcacatctgtaatcccaacactttgggaggctgaggcaggcgaatcacttgaggtcaggagttcgagaccagcctggccaacacggtgaaaccctgtctctactaaagaaatagaaaaattagctgggcatggtggtgcatgcctgtagtcccagctactcaggaggccgaggcaggataattgcttgaacccgggaggtggaggttgcgttgagctgagattgcaccattgcactccagcctgggcaacagagtgagactccatctcaaaaaaaaaaaagaaagaaagaaaaagaaaattgaaatcactctttccttgatccatgagctgcacaatggatgttgtgttagaaggcataaagacaacattaatctccttgtacatctccatcagagtttttgggggaccagatacgttgtcaatgagcagtaattttttttttttttttttgagatggaatctcgctgtgtcacccaggctggagtgcagtggtgcaatctcggctcaccgcaacctccgcctcctgggttcaagtgactcctctgcctcaatctccygagtagctgggaccacaggcgcackccaccatscccggctaatttttgtatttttagtagaggcggggtttcaccatattggccaggctggtctcaactcctgaccttgtgaactgcctgcctcggccttccaaagtgctgggattacaggcatgaaccaccgcgcctggccaatgagcagtaatgtttttaaaggaatcttgttttttttttttgagcagtgggtctcagcagtgggcttaaaacgtttagtaaaccatgctgtaaacaatgtgctgtcatctaggctttgttatcccgtttctagagcacagatagagtagatttagcataattcttaagggtcctaggattttcagaatggtaaatgagcactgttctcaacttaaagtcactagctgcattaggccccaacaagtgtcagccctgtccttacacgctttgaagccaggtgttgacttctttctagctatgaaaggtctagatggcatcttcttccaatataagactgttttgtctacattgaaaacctgttgtttagccaaccacctttgtcaatgatcttcgctagatcttctggataacttgctgcagcttctttgtcagcacttgctgctttaccttgtgcttttacattacagagatggctttttcccttaaacctcatgaacaaacctctgctaatttcaaacttctgcagcttcctcacctgtctcagcctttatagaatttaaagagttagggccttgctctgaattaggctttggcctaagggaatgttgtgatcttatacatagttcactaaaactttctccttacccgcaaaaaggctactttgctttcttatcattcctgtattcactggagtagcacttttaatttccttcaagaacttttcctttgcattcacaagttggctaacwggcacacgaggcctagcttttgtcctgtcttggctttcaacgtgccttcctcactaaggttagtcgtttctagcttttgatttaaagtgagagatttgccactcttctttcacttgaacagttagagggtttttaattagcctaatttctacactgtgtgtctcagggaataggaaggcctgaagagagagagagagagagacgatcggggaacrgctcgttggtggagcagtcagaacacatacaacatttatccgttaarctcaccatcatgtatgggtgcagtttgtggcaccccaaaacaattatagtagtaacatcactgatcacagatcaccatatcagatataataataatgaaaaagtttggaatattgcgagaattaccaaattgtgacacagagacatgaagtgagcacatgcagttggaaaaatgacgctgatagatttgcttgactcagtgttgccacaaaccttcaatttgtaaaaagtacagtaaagcaaagtgcaacaaaatgatgtatgcttgtagtataaaagtggacagctccgcaggtgtctaccccatctaccaccctccccaaaggtaatcactgtgtctggtttagtatggaagtctcttgagcatttttctgtatattaacacagaagtaaaataatgaaatagcatttattgtggttcttcctatatggcccatagtctcgtttcaagtatcaatttscaccaatttgaaatgctagctttattatttgctcaattctgagatcttttcctagackccatcctcttccattgatctatttgcacattcctgtgccaaaataatagttttaattaattttatatagtgtgtgtatctggtatacatctgttctcatattttcaaaatgttcttaaatattttgtggtatttcctctttcagatgatcttttycccctatatgaacttttttttctttttctttttctttttttttgagacagagtctccctcagtcgcccaagctggagtgcagtggcacaattttggctcactgcaacccctgcctcccaggttcaagcaattctcatgcctcagcctcctgactagctgggattacaggcatgtgccaccatgcccagctaattttgtatttttagtagagatggggtttcaccatgttggccatgctggtctcgaactcctgacctcaggtgatcttcccaccttggcctccgaaagtgctgggattataggcgtgagccactgcgcccagccccccatttgaacttcagaatcagtttgtgcattacccttccactggccagataattggcagaaggtgtttattggaattcctgtacatttatagatcattttggatattgctccatgttttctatatccttggaaaatatttaattttgtaaaattttcattagatgtatcatttgatatcttacagttttatcgycataattattaggatctcttaaaagttgtatttctttcttttttttttttttgagacggagtctcactctgtcgcccaggcagctggagtgcagtggcacaatcttggctcactgcaacctctgcctcctgggttcaagtgattctcctgccttagccttctgagtagctgggattacaggcacccacaaccacacctggctaatttttgcatttttattttaattttatttatttgtttatttatttatttgttgagatagagttttgctcttgctccccaggctggagtgcagtggcatgatcctggctcactgtaacttctgcctcctgggctcaagcaattctcctgcctcagcctcccgagtagctgggattacaggtgcccaccaccaygcctggctaatttttgtatttttagtagagacagggtttcaccgtgttggctagactggcctcatactcctgacttcaagtgatctgcccacctcacctcaaaaagttgtatttccaatcgattcttgctatggtatgaaaatttcttggtatagaaaatagattgatttttgttgatcaccctatgccctctgtgagagtctcgtattcattgttccctagactactttgggttttttttttttgagacagggtctcactttgtcacccaggctggagtgcagtgatgctgtcttggctcactgcagcctcaacctcccaggttcaagcgatcctcctgcctcagccccccaagtagctggcatgctacttgtaactacaggcatgtgccatcacatgcagctaatttttgtattttttgtaaagacagggtttctccatgttgcccaggccagtctcggtccactgagctcaagcagtctgcctgcttcggccccctaaagtgctcagattacaggcatgagccacctcactccttactttggattttctaagtagacaatcacattatttgcaaatagaaacaactctgctccttcatcaaaatataaacatctctttatttttttttcttaaattatgttggctagaaccacaacaaggatgtcaaatagtaggtaatgatgggcatattcctgatcattaatgagaaggtccctgaaatgataccggctgaaatgcccttcttaaacactgtcttctcttggtgtcctggaatagtgcccattccttcttagtcccttttgctaccccttttcccccactcttgaggtatgatgacatacctcaagctccctactccaacttcccatgcagcacacactcagtgatccatgagcatttcacattgcaatcatctcatgcctggttgtgatttgtgatttggttgcctgccataagccaagcattggcagattaacatgcccaatccaggacgactcccagcaccatctcactgaaaagctcctcttggatttctttcaggcactgctaactcagtacctctaaaactaagttcatcatcaataagcatagagctgaacccctgggtataaagcccacaccctgattcattaagaaccagaaataggccaggcactgcaggtcacatctgtaataccagcactttggaggccagggtaggaggattgcttgagcccaggagtttgagaccagcctgggcaacatggggagactccatctctacaaaaaatacagaaattagccaggtgtggtagtgcaccctggagttccagctacccaggaggctgagatgggaagatcacttgagcctgaagctgcaaagagccatgactgtgacactgcacctcagcctgggcaacacactgagaccctctctcaaaaaagaaggactagaaatagaagaaaggctttcttctctgagagaccttttctgagagtctcatttcctgctaaagctggcctgagccagccacttcactttagttctatctcagtttgtgccttggatgttggccacgcagcctgcctggctcaagagctcctgccatccttggacacttgccccaagaaccacatccttccctgccaacaccctctgctcccttgcctgctgtccctagacatgcatgtggtcagttcacccaactttctggtcatcaccctcctccctccctctgggggtagagagtggagacttcctctacagccttgtggaagacaaatggaggctttaggaattcctctggggttcactccatacggatgcagggtaatgaggctaatttctgctcatctctgtgtgggcaggaaatatgagctgtacagcatggactgggacctgaaggaggaactcagggattgcctggtggctgctgcaccctatgggggccccattggtatgttgcccctccaccaccacctgctctgggaccctgggatgaactcaaggtccttgattcctggggccctgctgtcaggttgttcttgttgccaccccccactcaccctgctgagatgcttttacttctggtttttataggcctgcttcacatggggtgggcctggggagccaggatgtgaggcctgcttcacatggggtgggcctagggagctaggacagaaggtctcttctcaaactgcagcactgctgaggaacccctggcggaaggagaaagctgctagtgtgaggccagtgctcgatatatactctgcttcyggcatgcctctggccagcctgctggtgagcacttctgatggtccctggggctcagggctggacagggtttcctcacctgaggacagccttaggaacctctctcccctgcagtggaagagtggacccgtggtgtccctgggctggtcagctgaggargagctgctctgtgtgcaggaagatggtgctgtactggtttatgggcttcatggtgacttccggagacacttcagcatgggcaatgtaggggtcacagagggctggggacgcggggtagagtttatgaccctgtggctcccttaacccatggccccctttcctcaggaagtgctccagaaccgggttctggatgcccggatctttcacactgagtttggttccggagtggccatcctcacaggggcccaccgcttcaccctcagtgccaatgtgggtgacctcaaactccgccggatgccagaggtgccaggtaagccctgacaccgctgagatagccaagcagtacccacagatgtgcctctagcctgtgagacccataaaaacagaagctgtggctagagacccatagaaacagaaacggtgggccttggtcatcctaacactgtccttttccytggccataggtctgcaaagtgcaccctcctgctggactgtgctgtgccaggaccgagtggcacacattcttctggctgtggggcctgacctttacctcttggaccatgcagcctgctccgcartggtaagggccctgagtgggaatgaagtggacgggctgggttaggcaatagggaggttctgaaaagtcagtatgtatctgtcccacccctaccctggctctgcctcagacgccccctggcctggccccaggagtaagcagcttcctacagatggctgtctccttcacctaccgacacctggcactcttcacagacacaggctacatctggatggggacagcatcactcaaggtatgatcctggggcaacacaggggtactgtgccttgtccagggtacaagatcttttggtgatgcgggagggcttttcgactagaatggtgactgctgggacagggccatgacattgcccacaccatttcaggagaagctatgtgagttcaactgcaacatccgggcacctccaaagcagatggtctggtaaggatgggggtgttattgctgggggtgtgggtgagacatagcttgcttcctgggacaatcagttccttgattcgtcatgtctactggccaagcctagtggagtttggatcttaccttctctgccattgcacacttgaaggaaaccattgtcctctgtgggccacagctgcctcgagctgagagctcagggataagagggaagtggagaggtcagtgtacagtcagtgatgcaagtgtatacaggctgtcccgagacaaaggattatgagcagccatgtgggagacatggccatgggacagtgtctagccagtgtgtatatgctgctcacaggtgcagccgtcctcgtagcaaggagagggccgtggtggtggcctgggaaaggcggctgatggtggtgggcgatgcacccgagagcatccagtatccttggagggctgcctgtgtgtggagagaggggagrggagggttcacctgccccgtcccatctgtaggtgctcttaggagccttaaccaagctcaggtttgtgctggatgaggactcctacctggtgcctgagctcgatggggtccgcatcttctcccgcagcacccacgagttcctgcatgaggttccaggtgaggccttcacaagggcaccacataacccaaggtggggactcctcggcaccccagctgccctgggccagtgccacagagcaggaatagggtgttgaggcagggctgagggtttccctgcctttctccctcactcaccmactcccttccccagcggccagcgaggaaatcttcaaaattgcctcaatggcccccggggcgctgctcctggaggctcagaaggagtatgaggtaaagccctgggcttctctcccagtcccagaatggttcctcctgcccctgcgtgggcatgtgtgagcatagccaggtgccacctgtcaagagaggggtccaggcaggacactggtctgggctggggagggctggctcatgtaaactgaagagacactatgtcctccatgtggtgtgatagggacgggcagagcatccccactatccccacccagtctgggttactattgggaggagttctcaaggcccccctaaaggcagctgtgggctgatacgrgatgatgtctgtgggcacctcaggtggattgagtgggctgagggagttggggctccagcctgtgcagctcctccaacccagcttatttgaaccacaacccagaatggttaggggccagatgtgggagtgttctctgtcatgatgccctggctctggactgctccccaccagaaagagagccagaaggcggacgagtacctgcgggagatccaggagctgggccagctgacccaggccgtgcagcagtgcattgaggctgcaggacatgagcaccagccagacatgcagaagagtctgctcagggttggcctggatggccgggccggggagggtggggctgggagggggtgggatgggcagcagggaagctctctcctatcgccctctggctcttctcaggccgcctccttcggaaagtgtttcctggacagatttccacccgacagcttcgtgcacatgtgtcaggacctgcgtgtgctcaatgctgttcgggactatcacatcgggatcccgctcacctatagccagtatccctgtgcacgccagaagggtaccctacagccaggggtggcaggggaaggggctggagatgcgtctgcaggtacctggcaagcggggcttattctccaactggatccttaaccgaggaaaatacagatataagcagctcaccatccaggtgctgctggacaggtagggtaagcccaagggtgcagtgagcgggctgtcagsggggtgggcattacagccttgggtggggtcttatggtcactgctcctgacctatctaggatgtgggaggcctgatgtgcaggctgaggccactctgctccctttctcctccacctcactccttgtatcctttacccaccgggtctaccaggctcgtgttgcggagactttaccccctggccatccagatatgcgagtacttgcgccttcctgaagtacagggcgtcagcaggatcctggcccactgggcctgctacaaggcaaggatgtgggatggggtccaagggcatttagaggattccaggccctggtgaggtggaggaaatagaaagtgtagaactgcgctgggcacggtggctcatgcctgtaatcccaacactttgggaggctgaggcgggcgaatcacctgaggtcaggtattcgagactagcctggctaacatggtgaaaccccgtctctactaaaaatacaaaattagccgggcayggtggcgcatgcctgtaatcccagctacccgggaggctgaggcaggagaattgctttcacctgggaggcagaggttgcagtgagctgagattgcactgctgcactccagcctgggcgacagagcaagactctgtctcaaaaaaaaagaaagaagtggcgggggcggaggaggagggaaagagagagaaagaagaaagagagaaagaaagaaagaaagaagaaggaagggagggaggaagggaactgaaggggtgggtcctaagggcttgcaggagtggagagtgaggaatggcatccagatgtttgtgacacccygcatcccttgcaggtgcaacagaaggatgtctcagatgaggatgtggctcgagccattaaccagaagctgggggacacgcctggtgtctcttactccracattgctgcacgagcctatggttgtggccgcacggagctggccatcaaggtgtgggtgcccagccctccacagacactctgatgtggttgttcagggcccccatgccagctccttctctctgtgccttccttctcacctcacagctgctggagtatgagccacgctcaggggagcaggtaccccttctcctaaagatgaagaggagcaaactggcactaagcaaggccatygagagcggggacactgacctgggtgagggcaaggctggggggcccctgggctaagtgggagcctggctggaattcccactccaccttactctcctgcagtgttcacggtgttgctgcacctgaagaaygagctgaaccgaggagattttttcatgacccttcggaatcagcccatggccctcagtttgtaccgacaggtgtgtgtagtgggcagggttrtggtgtagccttctgagcacttgagttggccttgctgactgattgcctgcctgtggccccagttctgtaagcatcaggagctaragacgctgaaggacctttacaatcaggatgacaatcaccaggaattgggcagcttccacatccgagccakctatgctgcagaagaggtctgagatccatggggcgtgtggggcgtgtggggcatgtgggctggggctgttggtccggttccttcaggaatctaggccttcgtgttgggtgcacactccatctggtcctcactgtgagggagactctgacgtgaggccaggatgggggttagtgtcagaggagctagccatccctctaggacatcagagtggtgcacctagcaggcaaggctgaccctggcgaccctgggcacagggatgggggagaagactgtakcctgggtgaggagggcgagggtcctgcatgctgtgagttcaggccttccttcttgtctttatagcgtattgaggggcgagtagcagctctgcagacagccgccgatgccttctacaaggccaagaatgagtttgcagccaaggtttggcccacctttttccaagagcctcctcgtctcctggtcttccctcctggtccctcatccccatcatgcctcattatccgggtccccaggctacagaggatcaaatgcggctcctacggctgcagcggcgcctagaagacgagctggggggccagttcctagacctgtctctacatgacacagttaccaccctcattcttggcggtcacaacaagcgtgcagagcagctggcacgtgacttccgcatccctgacaagaggtaggtgagggcccaggctgcatgtgggtcccaggaccacctgcctctcctgcaacacctccaagcccagctttcctgcaggctctggyggctgaagctgactgccctggcagatttggaagattgggaagagctagagaagttttccaagagcaagaaatcacccattggctacctggtgaggcagggtcctccctccagcccacttccagtgagggtagtcttcgggagagagggctaggcagggagacagataggatggcccgttcatgctcctgttcagctgccygcatagttagcgagtgcttcctgtatacacatttgtrggcaggcatcatctgctgtgttgggtgcactggaggatgggtccaagtttgcctgcagatgttacggggagagagaatgagctgctttccccagggagggccacaggrggcactatgtgctagagggaaagtcttgtytgaggagggtggagggggcacagggagggtgcatatgggaggcagtggagatactgagggctgttttctgtggtgggtagttcagaggtgtatagggcaggtttgagaatgtcaatcacaagagaacacaggaaatgtgagggctggtggcaggaacgcctgttgcaaggggtaatggtgggtggtagagcagaagcgtggaaataattggtctcaagtctctgacagagctttggtttaggtgatttctgccctaagaatgttgagatcacaactgtctgtgcatgggggttgggggattatatgtactgacgggtgtatacatatagaatatatatggacgatgtatgcattgcgcctctgctcgtaagagagaggacaggagggctgtgcattaccttctccctccacccgcttcctctcctccaagccttttgtggagatctgcatgaaacaacataacaaatacgaagccaagaagtatgcttcccgcgtgggtcccgagcagaaggtcaaggctttgcttcttgttgggtgcgtcaactgagggcctgtgggtgctgggtggctgagctgtgggctggtgagaggcagggtttgtgcccttgagcagccccaacaccacctcctctcttgctcaaaccacagcgatgtggctcaggctgcagatgtggccatcgaacaccggaatgaggctgagctgagcctcgtattgtcccactgcacgggagccacagatggggccacagctgacaagattcaacgggccagggcacaagcccagaaraagtgaggagtccatcctgtacatctcaagcaaggggttcctcccctagcacctgggcttggcagaagggccatagttcatccagctcctcccctagagcaatgctgaggagcgggggcatggtagcagggctgtctggttttaaataaagttggaacacttyacagtgyttgtcttacacagtccagcctaagcaaaggcaagctcaagacaggatcctccagacaccacagcaaaactccatgtgttccgttgtgttgggaccggaggtgggggcttctccagccatactcgcaagaaacgtgtcctctccacagttaccaaggaaagctttctctatctcacagctcctaggaagattatagggagagatggcacaaaacttaagcaccagctcaccaagaacatactgtaaagcattctgtgtgtgtgcgtgtaaacacgcaagaaccacgctaaacacttttgctgcctgtacttcctttattcctcgtgacagccctgtgaggtaacatcaccccactttacagaaaggagattgaggaccagggagttcgataataacaaatatgtggcaaaacagggatttgaaaccccgggccaagtgcaagctggaactggaatcgggccctctgtgagaagggagcctgaggcaaggccccaatttgcactgcagtggtgattggaggactaatgagaagtgtgtggcctgcgggccataggggtcagggggtggtggcctttggaactcttgcccactgaactgtggtgagcaattccaagttgtctctgggccaaatagagaaggaggatggaagatttcaattctgccaaaaagaaccatgaacaccagacccgcaatcagtaggagtacccgcggggccctctgctctctctatctagccttccgttggcactccagtgcaccccctctgctctccctgtctagccctccgttggcactccagtgcaccccctctgctctccctatctagccttcccttggcactccagtgcaccttggcttcatgcccagggccccacccaacactgagggcattgccttttcctttgtcgcccccactttgtctacaaggaggaaaccacagccagagggagtgcaggcctcactggagcttcaggcctctccctatttaacacccctagggccgaccatgcttttakaaagacagtgagagactcagggcctgagaaggtatttctttttttccttttcctacctgacttgtaaatgaaagtttgtgaaagtccttcaaggagatataagtcaaatggtaaaataactatcatgctcgccattcattatgtgggtcaagaatttggacaggttgtaacagggatggtttgtgtctgtttcatagtgtctgaggcatcagctggaagactaaaaggttgayagctaggggctgaaatcatgtgaaagcttgctaactcacacacttggtgagtgacgctggttcttcactgggaccttagctggggtggtctgccagaacacctgcaacatggtggctgggtcccaaggacaagcatcccaagagggygccaggtagaatctggactgccttcctaacctagatttggaagttacgtggtgtcacatctgctagagtatttgtcacagcagtaatacaggcccaccccaccaatttcaaggggaaatagactccacctcttttttttttttttttttttgcgtggtagagatggggtctcgggggtctccttatgttgcccaagctggttttaaactcctgagctcaagcagtcctccctcctcagcatctcaaagtgctggggttacagcatgaaccactgaacctggcctggactccacctcctgatagggagtagcaaagttctggaaatactgtggctaggttttggaatcacaatctggcacagcccatcagctttcccttttggaatcagcagacaagaggaaaggaartaatccccaatgctgggctcatcattctgggctttttttttttttttttttttttttttgtccccagtcttggccccacaattcctcactgccctggtagctctttgatgcctttaaaaaatgttttcccagcttttcgagttctcaatgaaaaaggattgctatcaaacaacccagttttcctctctggaaagggaggcttgaccagtgcttttagaatgtacacaatacaaaacccacatctccaaagtaacatacagtatatttactcataggctatgtaaacaaacactgtacatatgaagttttagaaatatgtgagaaataacttttaactgatgacaaatgtatatcaacagtgatttcaactttataaaaggtgtgtgtgcatgtagagaagcattggaattgtctatggggagagttgctttaaaaaggcagttttgtatacttttttgtaaagttaatcactgatttgccccccacctccacagtttattataaaaactttcaaacatacagccaggtagaaataattttacagtgaacatttgtgtaactaccactggattctaccattagcatcttactatatcacacatctgttcatctatccattcctctatgtcaatccatcgtatttttcatatatttcaaagtaagttgcagacatcagtacacctccccctaaatacttcagtatgcatttcaataactagagttcatttttggtttgcaattttttttttcttttcaggcaaaatctacatacattgcaatccacagatcttaaatgtaattttctaagttttgacagatgtataagcctatgaattgtgacatttaaaaaccagaactgggattttcttttttcaaatccttgcttactcaattgaaattagtgtgagatgccttctgccctgagcagtttgtacagcaggcctatgcctacatgggtgggcagggccaagtttcgtccaatgtatgacgctaggattggggctaggaactaggactgtgtagctggaggcaaagaatctgggaacatttcttcttgtatcagtggtagccagtgcagggagaatcagggcaaaggctgggcgcagtggctcatgcctgtaattccagcactttgggaggcttaggtgggtggatcacctggggtcaggagtttgagaccagcctggccaacatggtgaaaccctgtctctagtaaaaatacaaaaaaattagctgggggtggtggcgggtcctgtaatcccagctacttgggaggctgaggcaggagaatcgcttgattgcttgaacccaggaggtggaggttgcagtgagctgaaatggcgccattgcactccagcctgggcaatgagtgaaactctgtcttaaaaatatatatatatatatcgagcaaaggctcctacaactcaccttctcagggtaaggggctgtatgtccagtctcttagatacaaagttccagtgaaagactcttggggttggccaggcgcagtggttcacccctgtaatcccagcattttgggaggctgaggcaggcagatcgcctgaggtcaggagttcaagaccagcctggccaacatggtgaaaccctgtctctactaaaaatacaaaattagccaggcgtggtggcgcatgcctgtaatcccagctactcgggaggctgaggcaggagaatcgcttgaacccgggaggcagaggttgcagtgagccgagatcgtgccattgcactcaagcctgggcaacaagagcaaaaactccgtctcaaaaaaaagaaaaaaaaaactcgggtttgaacagtgtggcctgcaaagggacttggctctcatttacttcacctttctatcttattgccttgctttattttcatttcagcatttaggaaattttcttgttcttttgtttattgtctgtgttcctatccagaatgtaagctcctgagagcagaggcctcttctgtcctcttctgtcttattccctgctgtgtccagcacatggtctgcactcaataagtatttgttgcgagaatgactcattgttccatttactagaaggggaaaggaggccccgagaggggaaatgacttgcctaaagaaacaggagtcctttccccccatcctccagctctcctgatcctctcctttgctcataaaccctgtgactgttggggcacctgtggggtggctgcgaaatgcctacctgtaggtatgtgctcctgtgggttgggactaatgcaggactaggagtaggagggctctgcagtcccccatttgggtaggcttgggcacaggaaactgcctcctttcccttcctcagttctcttctcttccaggataaccctttactctgtgatgatgatgggcgagggagctcaggacactctgggagccaagtaggatggagggctgggcaggtctctacaggcaggcagctgaggagggggctctgtcttcttccaatggaaacagcatctgtgtggttgctgagctgaaccctccttcccagggtctccagggtctgtagttctccttggtctgtagttctgtcacccctgtgcacaccccacaaatgctttgaccatagtgcagctgtctcatggggagagaaagaactttcatttcctgagaatgggttacttgccaagctgaacatgcctaattctcaatacagccctgggaagttccaggaagagttgcagagggaggctcaggtcacccagcacatggtggggctggaaaccccgggctctttgactaccacgcccaacaacaatttttccaagtgtggtcatatccaaaaggggtccttcagataatctcaaagatgaacacttactgcaatcactatttcagttatattaaaaatataagtagcatgtcaaccccttctagggtaatacaaataaaaagtaaaaaaaaactaatcaacaaaaagaaacatattaagaaataatagtgtaaattagatataaggcaaaagtaagctggtggggtttggttctagagcatagggctgctatcccagctactgaggtacctcctgcgtttgcagtcattacttgttaggggttttcacactttgacttcctgcttttcacttttccattcggtgttgcgggatagattgagtttggacttaaggggatatgtgaatgttgggcgtggggaaggatccaccctcactggggtctgagcgttaggagagtaggcgtgtggactctgggcctttgggctggagtgtctattggtcagaggtgtcgggttcggccatttcaccctcacctctaggctggccctgctgagagggagagagagtcacaactcccactcaaggagagacttccctgctggggaggggacggcctgaggcccgccccacccatattcccaggccctggctctggttagcatggactaacttattccacaatacggaggagtggggcacagagtccctaactggcgccccaacagaaggcggtggtggggaccggagatggtaggactggagatggtaggggctgctgatgtgagcccacaatacggaggagtggggcacagagtccctaactggcgccccaacagaaggcggtggtggggaccggagatggtaggactggagatggtgggggctgctgggagccccttttgcgccgcagtgtttcctgccatgaagagttgccgccggtcacaacccttccccgggggcgccccgaatgtgggactccttccggcctggggtgcgtgagggggactcaggggttgcccggtctggaggagagactcgccgccacctaccccgggaaccgcagactctgggtctgggataaagcgtcccctacccgcaagctcggtttgtgcgctactgtgcaatctgtcttttgcctgcagacgcccagccgctcgccctgcgcgggtctcggaatgtccaggggtccctactggggatcacaacccggcgaaatgtcgcatttgccaccacctatctcgactgcgtaatcggctttcagccgcagacgctcaggtcctgcagcacccgcggggatccgtgtaggaacctgctgccgctggatggactgagcgattgcttcgcgggtgtcacgcaccagacgccgtgccgggagcgccgggaagggggtacgcgccccaaccccggccgggggagggcgcactctggctcctctctgcgttttgagcctcccctcccccgccaggcgtatcgcaaaaggcacctccatcgcagagcaccatgtgttgtgcttctactcagctcggtggcgagcggggccccagcatgcgcatctggaaagcgggggagattaccctggagctcgggtggggacggcgtgggctgacttgatataagacgacacccacggagccagatccgttctagggacttggcaggttcctctccctccccagtgagatccgtcgttctttgcagcaattaggggagggaaaaaaaagacccacagtatcacgtttggagagggttaggaagatggctctcgagttgcaggccgccctggtggctagacattggtgtagtttgtgcctggcctcggtttcctgatctgtaaactgggaagaaggcccaagtcatgaggcctgtgactgtagaatggctgaaggcactggtgcactcgcagccggtccttccggggtccagcttcccgaaggactgggcagccccggggcgaacccctctggagctaccaggagaacgtgcgaccgggttcggcgccccagccggcaagtgagcgcccagcggagcgcaagggcggggcccgcgcgggccggagacgcccgttcgctgtcggccaaccagcgcctgtctctgaacagccaatgaacacgcgycttacagccaargccgggtcgggagcgaggctgcggcgagtgcggcgctgacagagacgcgcgcgcgcgcgatcgcgctcggaccccggccgctgccgccatcactgtcgcccgcccagtcgcccctcagccgcttcccctcgccatggaggcgaggccgccgccgccgccgcggggctcggagccgcgggccgggcggcggccctgagggctagtggcggcccgaaacgccgccgcggagccgaggcggagccgctgtcctcgtccccagcggtcccgcccaacgcccgactctgtgagtgttcgcggccgctgcgcccgggtgggctccggaagggggagcggctcccgggggcggtgggaggggtcccgggccacagcccagagcccggagcccgaagccctaagccatcttttccgggtagaagcctgcgggcgcctgcaggttgattgtgcatccttgcgggtccgtcgcggggagggggtccccggaaacgtgccggcccgagtgccgacccctcgcgactgcccaggaactttgcatgcgtccttctgggaccaggccagggcactgccagagttgattctcagagaagaaacttagaacggcgagaacagaatttgctcaggtccatttaatgggaggaaagaggaaaactcttggcatgagaaaatttgcttttgcagtgaccaacttttctttcccttcaagtccacctccctcggtcccccggcccgtctcccaggcccctctccttgccgccctctcccaactgttgaggctgtttaagaagggaaataagggctgagagctgcccagaattcagaataggccaattgagaacgcaggtcccctccctttttactttcggtaaataaaaaattttttttgaaaaaattagttactaattatatctcctgaagattaaaaaaaaaaaatagcagagcagagtcctgtcttgagggtttcgtttttatttttgagatcactgatgatatttgtaagacaggaaaagaagaatgtgcaaatccaccctctgcagggtgaacgccatcagaagcctttgctcaggagagggattccggctctagaaccagtccacatcaccctggagatggcttcgtttgccacctgctagctgtgcaggcagcctgagaaacagaagatggtgggcgagaggaggactgactaggaaagggcgaacatcttcctgcctggccactcctttcagaaacagatctgatgctgtcacttgtttacttaaaaactccctcgcttttctttttcccatgggatgaatgaagcctaaaatgccttatcaggtcatacaaagcccttgacaatcttgcctcartttactcctttacttttagcctaatcggatcctccaattctccttcccctcatcccgcttgctggctagtattcagagctgcttgactgccccctcacatgttgggatgtttttgttttatgtgatcctctttcttccccacctttacctgccaagctccactttttcttttaaagttcttctcatttgagaagcttcttgcgggcaggagctgtgtcttgcccacctttctatctcccgtggtgggagaatcctccaagttgtcttgtagattctttccaatctcttctctcttatgcctaggctctgtttatttcccggtatccacttcccaagagattttttcgtgttttgaaggcctgcttggagtacatgcccaggacttttagtatttctgattcccggcttccccatgtccatcccacccagcccccataagcagtcagcaggtgggaactggtaggtcccatatcccactggcctccaaaaaactgtctctgaaagactaaaagcccttcagtctcttttcacctctgcctgctcaaagtgacctggctgataccgtgcattgtaaggcatggtgggatcccggggcctgttctctgtttagccacttaacatctgggtgaaatacagaaccagaaaaaccacccctctgacttcagtacattcatgtgtcttccctttgccaggtgaattgcttgggatacamaagtgaggaagtcagtccttaacctttgaggaactcagagtctaatgtaggacaggtggatataaatacatcacaggtgctataagattgtgataataataatagctattttttatttgccttgtgacaagctatgtaatgttttccatgaattccctcagtcttttcaacagtcataaaagggcttattcctactctacagggttggaaactgaggccaaacagtgggcaaatgagggaatagtcaagatttgaattttggccgtgtatttgcagagcctctgccaggctgtgtagggagcatcccctgcctgggtgatttgggaaagctttcctgggacgggggggccttcggatcatgaaggatgcataggagtttgcgcgtggtggactgcacacataggcaagagggagcagcacaagcaaacttggtggtggaaggaatccactgtccttggggaggagggaagaggttaatcatagctggatcaggtaaggacaatggagagctactagaggatttaaaggaggtcagggacttgggctgaaagaattttggaaagatcatttgggggcaatatagggccaaatgcagatgcccctgcaatataggaggcactggttgggtctgacagaggtagagtcacagcctcttagacccagaggaaggtgtagagagaatcctgctcaattttgggaaaagataattaatgcagatgagagaaaaattcaaaagttctagcaatacaaaagagtatatagagaaaaatgtccctcctaccctggccccaagtctcctgtctccctaacctcctccccagagatggctgaagttttcagtttatatggccttccatagacactgttgctttataaatatgtgcctgcttatccatactcctcccaccatgggacgtaccactcacaccttactgggtttttttacttaacatatttaggaaatcattctattatcaacatatatagagagttatttgttctttctgttgacatgcttttacttatttagttgtatggctgtactgtaacatctttgggttaaatatttgtttccaggttcttctcttacagcaatgaatgtccttgtacatactgtgttatgtgctcatttgcaaagttatctgaacaatatgcttttagaagtagaattactgggtcaagggatatgtctgcatttttgatttgcagacatggagccaaactgccacccgtttctggggggttgtaccaatttatcctctcccccaaagtgtatagctggatagatgatctttggagaattcaggaggatcaactacgatgctttttcagctattatatgcctacttttcctccacaaatcctcccccaccctatgcgattctagccagtttctttgaatttacagagggagatgttgaggctcagaaggataaaagtaacttgtgcaggatgatcagtgcgggtggtggtgggtgttttgttttgtatttttgcacccctcatgtttgtatttgccagcacctttcattggaggtgctcagtgtcagtttgtaaacattattgcattatttttctccattttcacatggaaaaaaatgagatgcaggggaagtttgagttatgagagggaaactggccaaatatagaatcttgtcattttacttccagtgcartaataaatgtttccaaatgacaaagctgaagagatgttttttgtttgtttgtttgtttgtttgttttttgagatggagttttgctcttgttgcccaggctggaatgcaatggcgctatcttggctcacgcaacttttgcctcctgggttcaagcgattctcctgcctcagcctcccragtagctgggattacaggcatgtgtcactgtacctggctaattttgtatttttagtaaagacggggtttctccatgttggtaaggctggtcttgaactcctgacctcaggtgatccgctggtcttggcctcccaaagtcctgggattacaagcatgagccaccgtgcccggtgaagaaatggttttttagtgagtctgagtacaacaaaaatagcaataatataacactaacttaataaaactgaacagcaggcccaaaaatagcccaacattaaaatttattttaatgtattctctatggaaaagagaatccattaaatgtaaaactatttattttactctaaattcacatccatttgtgtcagtgtacaagacataatttttatagtagcagtcagtacatatagaatatgatttttgaattcttcaatagcataaaatattttatatttactcatttaagtatttgttcatttaaaatcacaggctgggtgcggtggctcacgcctgtaatcccagcactttgggaggctgaggcaggtggatcatgaggtcaagagatcaagaccatcctggccaacatggtgaaaccccatctctactaaaaatacaaaaattagctgggtgtggtggcgcgtgcctgtaatcccagctactcgggaggctgaggcatgagaatcacttgaacccaggaggcggaagttgcagtgagccaagatcttgccactgtactccagcctggcgacagagcgagactccgtctcaaaaaaaagaaaaaaaaatcacagtatagtattccatgcatcgacagctgtagttttttttaaatttgtttttgtttttttgagacagggtctcactctgccaccctggctggagtgcagtggcatgatcacagctcactgcagccttgacctcctgggctaaatgatcttcccatctcagccacctgaatagctgggactgcacaggtctgtgccaccacgaccagctaatttttttattttttgtagagacatttttatgttgcccaggctagtcttgaactcctggactcaagtgatccacccgccttggcctcccaaagtgctgggattacaggtgtgagccaccactctcagccaacagctgtagttggtgcaatcctttttattcttttatttttttctacctttttgctattataaatggtacttttataccccttgttcaaatacttcttttggattatttccttggactcttactcccaacctgggctcaccaagtcagaggatacagtttcggtgcctaattgcaatctggaaaggttgaactagtttccagcactatcagcaatttatggggccatttcttgacaacccatctagtgctattacaaagaaatgtaatgataccttgaattaggtttaatttacattgctttggaaaaagagaccagtagctgatttagattttttgaaagaagtacagtgctgtgatatagattatctccaagatttatgtaactgaagccaacttgtggttgaagaaaatttggttgatgagattgaaatattgtggaagtttagaataggatcatagcagtataaaatataaggctagatgctgttcagttggaaataccaggcattgtgccggaagctggggacaccccagagtaacatagatgtgatgtctgtcctcatgacacttttaggttagtgcagtagacagacattaaaatcacctatggtaattatagatgtgatgaaaggggaagaatagggtgtcgggagtgtcagagaagttcagcagctaaacaacatttgcagttaaacatttgtgaaggccctgagctgagaagggatttggtagctcagggcagcgcttcgctaacttgaatgtgctcatgaaccatctgggaatcttgttaaaatgccaagtcctgaatcagtaggtttggggtgggacttgggattctgtgttactaaccagctcctgggtgaggcagatgctgctggtgggtggatcacacttggygtagcaaggcctaattgagagcttggtgagcacctaaaactggctgaccatggtgagcaggaaggggcaggtggcttgcagtgacagagtaattctctgcctaggctgcactttagattcacctggggaacttagaaaaatcagggttgcaaatgccccacccgcagccattttaatttaattggtctcagttggggcctgagaatgtgtatacagtcatgcacagtataacgatgtttccatcaaggagagactgcatatgccacagtggtcccataagattataatccataattttactataccttttctatttttagatatgtttaaatacacaaatactcactgtgttagttacttacagtattcagtacagtaacatgctgtacaggtttgtagcctaggagcagtaggctatacaatatagcctagatacgtagcaagctgtaccatctcattttgtgtaagtaccttttatgatgtttgcagaattatgaaatcacatcaggactcatcctcagaatgtgttccattgttaagtgatgcatacctgtatatatattttaactccccaggtgattctaatgtgtagccaggcttgagaactagagactaaggacagtgttgagactagagaatggcaaggagcagagttgagggtcctgtatggcatgcaaggattttggactctatcctgaaggcagagctaaatctttgaaggatttttaagcaggagagtgaactgatctgatttgcaattgttaaaaagttcactgtggctgtagtccagagcagtagttttcaaattgaggtagataagatgatccaggggaactggaagaaaatttagaactttttattgtttttatctaaaagataagataaaacatttaatttaggaattgtctctggcatcttcttgggtctataggtcaaacagttaatgtgttaactgtagaactttgggtgtcctgaaggaagagactgaattctgcagtgagcagagacatatttatacatttgttctccatgtattgcaacatgttgttaacagtttatattaaccagttctcattgaactagcctttacaaaatggacatgcagagaaaccagtgatcaaagaaaatactaataatacaagcacaagcaaacaagttgtcagagctgacacttgtccaactcctgtgatgaattcttggtgagctattcaaataagtcagctcttactaaattggaaagtatcaggaaatttataagaaacatgaactttcgtgctctgtcattaataggaatcttgctttaagattccttttaatcgtatgtagaacccagctgcayggtggctcacacccataatcccactgttttgggagcctgaggtgcaggaggccaggagctcaagacaaacctgggcaacatagcgagaccccatctctaccaaaaataaaaaattagccgtgtggtgtcacgtgcctgtagtcccacttacttgggaggctgaggcagaggattgcttgaacccaggagttcaaggctgcattgagccrtgattgcaccactgtactccagcctgggggacagagggagactctgtgtctcaaaaaaaaaaagaggaggaccgggcatagtgggtcacacctgtaatcccagcactttgggaggtcagggtgggtggatcacaaggtcaagagatcgagaccatcctggccaacacagtgaaaccccatctctactaaaaatacaagaattcgccgggcgtggtggcgtgtgcctctgggtaatttcagctactcgggaggctgaggcaggagaatcctctgagcccaggaggcggagtttgcagtgagccgagatctcgccactgcactcaagcctgggtgacagagcaagactctgtctccaaaaaaaaaaaagtatgtaaaaccttgagatattaaataataaaatatgaggctgtcaccagtatgaagacatttgaaaaccaaaaatttggaacataaaaagaacctctacattttttttgcagtgatgtttaaagataaaggatattccatcagatgctttacaaaattttgctaacttcaattattaaaatttatattttgagggttttttgcttttaagagacagggtctcactctgttgcccaggctggagtacagtggcacaatgatagctcactgcagcattgaactcctgggctcaagcgatcttcccaccttggccttccaaagctctgggactacacatgtgaaccaccatgcctggccagtttttaagtttattgttcttataaaagacaaaatggggccgggtgcagtggctcatgcatgtaatcccagcactttgggaggccgaagtggacggatcacttgaggtcaggagtttgaaaccagcctggccaacatggcaaaaccctgtctctactaaaaacacagaaattagccaggtatggtgggcacacctgtagtcccagctactcgggaggctgaggcaggagaatcgcttgaacctgggaggcggagattgcagtgagctgaggttgcgccgctgtactccagcctgggagacagagcgagactgtttcaggggaaaaaaagaaaaaagacaaaaaaacacatacccttggcagattcttcctgccccacccccaaaaggcccacttaaacaaaaaatggactgatgtactacatggaaaataattttgtcaggaaatcaaaatactgttggaagatgtatagaaaacattgctgaatatgtgaacaaacaatattagaacaaattttgcagtgtgggaagtttggtatacggttataaaagtacagaagcttctagcatgtctcagtatcgctagatactcttttttttyttttctttctttctttctttttttttttttgagacagttttgttctgtcacccaggctggagtgcagtggcaccatcatggttcactgcagcattgacctcccagtctcaagtgatcatcctacctcagcctctcaagtagccaggaccacaggcatgcaccaccatacctattttttttattttttatttttaggagagatgaggtctcactatgtttcccaggctggccttgaactcctggctcaagcaatccacctgccaaaagaccttccaaagtgctgggattacaggcatgagccaccgtgccaactgtgccaggcctagattaccttttaatagttacatccaagaataaggaccacttcttttgtgagctactggaagaaagttgtactggagaagacatatttttaatagtaaatgattgccttcataagaacattactatatggaataatagactgaatgtaaattaatggaacagctgctttgactgaacaaaagaatgaaattcattcattacttctctatgggcaggctgttgagtccacytatttgttaattatcttgtggtagagttgttgatgagttttgcatttttcttttttaaaaaaatgccaactttttgttatggtaagtggctacagtttgagtaatcctaatatgaaatccaaaaggcttccaaatccaacactttttttttttttttttttttttgagacaggttctcactctgtatgtagcccaggctggagcgcagtggcatgatcatggctcattgcagccttgacctcctgggctcgggtgatcctcccacctcagcctcctgagtagctgggactacaggcatgcaccaccatgcccagctaattttgcaaccagtaggaataatgcaaatagtacaaaatctgaaaaatacctaaatctgaaacacttctggtcccaagcatttcagataaggaatactcaacctgaacctagcaaatatcatttgaaaaaataatatcttaatctgtctcttcaagtaaaagtattatttaaatagtgagtgagaaaggaactacttcttttcttagaaagaaatgtgcaatggtagagcgttttcctcgttggaattttttttacatgtaatcattataagctataacttacatattataaaattctcctttttaaaatgtacagttctgtggttttttgtatatgcatagagttgtgcagcttttgccactgtctagtttaagaacatttcatcaccccaaaagagaccctgcacccattagcctcacttcccattctctcctccctccagtccctggcaactactaatcttcctgtttctttggatttgcctattctggacatttcatataaatgaaatcatacaatatgtgaccttttgtagctggcttcttttacttagcataatgtttctggggttcattcatgttgtatcatgtatcagtacttcattccttcttatggctgaataataatccattatattgatatacgacatttggctaactggttcatcaattgatgaacatttatttgtttctactttttggctttatgaataatgctgctgtgaacattcatgtataaatttttgtgtagtcataggttttaatttctcttgggtatatatatatacctaggagtaggattgctgggttaaacggtgactaactttgaggggctgtcaaactgttttgtaaagtgactacccattcccagtagcaactcacaaaggttccagcagcaatacaataggggtccagtttctcccagcaatgcttaggggtcccaatgtctcccatctttgccaacatttgttactctctttttgattatagccatcttagtgggtgtgaagttgtatctcattgtggtttttatttgcatttccatgatgatttatgatgtgcatcttttcatgtgctgttggccgtttatgtatgttctttggggaaatgtctgttcagatacttggctcattttaaaatttagttattgctctttttattattaagttacttatatatttttagatataagtcccatatcagatatacgatctgtaaatattttttcccatctgtgggttgtgtgttcagctgtttgcgtggacatatccttttgggtagatctaggagtggaactgctgagtcaaatggtaactctctggttttttttgttttttttgtttttttttttttgagacggagtctcgctctgtcgcccaggctggagtgcagtgacacgattttggctcactgcaagctctgcctcccaggttcatgccattctcctgcctcagcctcccgagtagctgggactacaggcgccccccaccacatccagctaattttttgtatttttagtagagaygggatttcacagtgttagccaggatggtctcgacctcgtgatccgcccgcctcggcctcccaaagtgctgggattacaggcacaagccactgcgccyggtttgaggaaccactgactttgttgaggaacaraaagaacgcctgcacctttttacaatcccagcagcagtgtatgagtgtatcagtttctccatatccttgtcaacacttgttgttttttttaactgtagccatcctagtaggtgtaaagtggtattgcattatgttttaatttgcatttccttaatgactcatgatctgactgtgattttgttgcatctataaaattctcataatttgacacatgaaaaccttagaaacaattttgtaacctaataaaaatctccaaatgtgtttctaaaaacatttccagatgatctaatgaagtaaagaatctaggcattggtcaccagtggctgttaaaaccattagggaactttataataaagggatcagtgtgacaatcttctgatcaatcataacatctctaaaattgggacaaccaaatcttatattctttctatgtgatactaggaagaacatatcattcatgaaatagtcttgcttgccccaacaaacagagtcaaaccttcctctgattagtgtagatctgattactggtttataggatataattggcaaatttagaatgtgaaaaatattataggacaaatgaacccatttacttcaaatgaatggcaagaaaaaaaaagtacacgaactgctacagattaaaaaagacttgaggctgggcgtggtggcccacgcctgtaatcccagcactttgggaggccaaggtgggtggatcatgaggtcaggagttcgagaacagcctgaccaacatggtgaaaccccgtctctactaaaaatacaaaaattagctgggcgtggtggcacgcacctataatcccagctactcgggaggctgaggcaggagaattgcttgaacccaggaggcggaggttgcagtgagatcatgccaccacactccagtgtgggcgacagagcaagactctgtcttggaaaaaataaaaaagacttgaatgaaacatattaattgaacataagtatagatcttgtttagatcctgtttcatgcaaaccaactgtaaaaagttatttatgagcccattgggagtaatttaaatttgaaaaccacttgtatattagatgatttttaaacaattttaattttttaaaggttattatagtagtatggttacattaaaaagaaagactcctttctcttacagataggtactgaagtattttggatgaaatgatgttgatatctggaatttgctttaaaataattcagcatgtttggaggattacagacgagacaagaattgccatacgttgataattattgaagctggataataggtatataagggtttattatagtattttctctactgttgtatatgtttgagaattcccatagtaaaaaattaaaagagaaaccactgtaagggaagagttttagtggatttcatgtccatttgttagaaatagaaaaatgtggccaggcacggtgactcacacctgtaatcccagcactttgggaggccgaggcgggcggatcacctgaggttgggagttcgagaccagcctgaccaacatggagaaacccccgtctctactaaaaaaaaaaaaaaaaatacaaaattagcctggcatggtggtgcatacctgtaatcccagctactcgggaggctgaggcaggagacttgctttaacctgggaggtggaggttgccctgagccgagatcgcaccattgtactccagcctgggcaacaagagtgaaactctgtctcaaaaaaaaaaaaggaaaagaaaaaaaagaaaaagaaataaaaaaagtagtatctttgattaattttcaaaagtatatcacagaagatagatatttgctagccatatttaaaaggaaatatttgtataatgggggtgaaaaaatgattatcacagtttagtaaacacagccatagtgcttcttcctttggattcatgtttctttttggttatgatagcattaaaacttggaatcaggcttttaaattgctctataatatattaaaatgagatttttcaaacataatgagaaatatttaatcatatggattgcactaaaatatttttaagatgggttttacattactattttaattgatggaagtaccattattgtgatcattatgtatttcatttgaaatgttttgtagtatttataggtattagtacctgtgttctgtttataaatgaacatgtgttggggatgtatactcttatttattggtggatgtgcagtaaaaggtttgtttgtggagaacggactgggcagggtatagagacttatttgatgtttattagagcaaatgtggccagtgatgatggtgttctggattggcttagggtgggaggagtggtgatagggatggagatacatggacaagtatgatttaagcagtagaggcattagggttctagatttctggctttttggaagagatgattgctagttaatgaactgagcttttgtgtgtgggaagaagttgaaacctggcccctgtgaattgtgcaagtagttcttaaatattgattgacaaatagcttaacgagcaactaattttcaaatattggttgacaagtggcttattacaatattgtaaatgcattgatactaccattagtaaagagaatgtcttcctttgataatgttagcagcactgttaccagagcagtgtgggatagttccaggactttcactgtctaaaaggaactggaggcccaagcttttacggggatacttctgctctcctggttcccatgtccccagtgatgtgaatgtccctgactcagtgcctctgctcacgctgtctgtgagatcactgccttccagtgcctcttacctcttgggcctgcccactttgttaacagggacagatttcacagtgatttccagccagtatttctctctccccagtttggggtgttagctagaatggtccctcaaagccctcaaacacggatgagaaatagaagaagctcagggaractatacctgggctaggttcttgctaccagctggtggaagacaaagaaaaccccttttcttcctgtatttcatgcccagtgagcagtagtgccatcagcagcagttgtgaacccctaaatcagtgattctcaatatgactgacatggtggggaagacgtaagtttgaaaatgcattttcaggctaggtgtggtggctcacacctgtaatcctagcactttcggaggccaacatgggaggatcacttgagcccaggagttcgagaccagcctgggcaacatagtgagaccctgcttctacagaaaaataaaagctagccaggtgtaatggcatgcacccatagtcctagctacttgggaggctgaggtgggaggattgcttaagcccaggagatcaaggctgcagtgaacataccacagcactccagcctgggcagcagagtgagacccctgtctcaaaaagaaaaagcatttaaaaaaaaaaaaggtttgttagtgtttgtctcaaaattttgcttaatttaaaattatgtatatatttgaataatatgtgtccatgttaatagttctaaaagtatatatagtatatatagtaaaaggtagttttctctccccctgcctttcagctttccctttccataggcatccacaagtactatgagcaatacttgtgaaaccatgctgaaatactacatgctcataaaatgtaagttacttaagtttggtatttcaagtaacaataagggaagataggagagttttatgtttatcaaaaggggtgaatgttatagcagattgagatgagatgttcttacctttgggtgggatcttaagtggagctcaattcggtttccccaatgttagtgggagagattacttaaaccatccatacttatccagttgtacttggtaagttttcaaaggttctactttgaagagggcttttgttgagcaagtagtggttaatagagcagctcagttacatgtgtaagttttttgatgtgggaaaagggcttttgtatacagaaggactattttaaaattatttgggctttaaattaacatgtattaaagtggtaaatttaaaacccagttttcttttagtcttgttattgtacttgtaagcataggcattttgtatagaaataagaatagtaattttcacctgcttgtcaattaagttaatataaatttaacagatttaattgctccaggccccttacttagtgaattraatttccttagatgtttaaaatacatttacacagtcagtctgtcaggcacagtcagtccttgacaggtcagagttaccaccttaaacagaaacttcttaagctcttgggcaatctgtgatactaagaaattaaatttgtaaatgtagtaaaacaggttttggttaagacttccagtgcttttcattagctgaatctgaattaccaacatttaaaaaacacataccctaaacttaacgcaaaagtactactagtaccatgagtttgatataccatacctcattttattgctcatgtcttttctttctgggrttgtgatgccacttacccaattaaggaggacagttttatcatctcagaaagccatggttatcagattaaaaatacagaatcatgatacagttattattggtcagagatttgagactgggaaagggaactaaggggtctgtgtttccaggataattctactcaagagatgctgtgcctttccttatgttaagagtcctgaatgtggcatcaaagggggaatccatgttcagagtttgttttgcaaccccccatacctttttttgagacaggatcttggtaggttgcccatgctggtgtgcagtggtgcaatcatggctcactgcagccttgacctcctgggctcaagtgatcctcccgcctcagcctcctgagtaagtagctgggaccacagatgtacgtcatcatgcccagctaattttttgattttttttttttttttgtagagatgaggcctcactatgagcctaggatgatctcaaattcctggcctcaaacagtcctcccgcctcagcctgcccaagtgctgggattacaggcataagccaccatgcctggccttttcttcaaaaataacccttcaatcaattttttttttcctggtcaaattggattttgtgtttcttttatatattccttgtcaggccctacagttattttaattttgggtgttggatagactagggttcatattccatgcctgccatgctttttgtgaacttgggcaaaatasttagctcttctgagactcacttttgtcacctagtaaatgggttcagctgtagtactctatgtatttgtttgttttaagcattagatagtgcgtggtaaatgcttagcacagttcttagcacatagtaaatctttaataaatgttagaaaatataatgatcttgattctctgtcttccctccctagtagttgatttggggcacagtgtagcattatttgaattatcacagaataactttttacctttctgattttaacaggggagagtgtgtaaaggatgggagagggaagagagaaaaaagctgagtaaatgtgatcaactttacagtctttattccctgaactatctttccctgagttatgtgacacattctccttgttttcctctttctatctttgtggccactcctcagttccctaggcccctcttctttgaccactccttgtttgagttaccaaagattccatctctggccttcttgtgttgattctacacgttcttcctggaagcacatgtccatggtttcagcttccttgctaattaggagaaactttgtcctcagaacccatctggattacagccaacagcctactggtctccattgggctatctcccaggtacctataacagtctcagaactgactcatcttccttttcagcgtgttatttttataatctctatcttgatgaatggcacaacacagtgacccaaactggaaacttgaatgttgttcatctggttggtgatctgttcctaactgttttacatctgtaacatttctcaaatttgcctattttccaccatttctcctatcccttaattcaggctgcttctcacctagatgactgctgcaggttcccttgttgtctactcattattagtttctcattccaagtcattgattagatggctgccaaaagtgatctctttaacttcccaactttagattctgtgaataaaatccaaactccttaacagagcaggccctcatgatccaactcctcttaacgttggtagccttatcttttctctgagcccactgccgcttgatccttggtggtgctgtgctctttcttgctctctgtctttggttggactgcccacctccctccttcttacttgacattataatttatcagatagagatcagctcctccagtcagcatttccttactgactactccaagtctgacccagtgtagattctgtgcttatatctgtcaagtcacttattgtatgataattcatacacttatatgataattcacacattggcatgtgtagattaaacatttatagtctcagaaggatcctgatagtccaaaaggtatagtaatgcagttgtctcttagtatcttcaggtgattgattccaggatcccccccatggagatcaaaatccagggatactcaggtgccttatataaaatggcatatttgcatgtaacctatgcacatcctcctgtgtactttataggccctaaataatctccagattacctatatggctaaaacaatgcaaatactatgtaaatagctgttatactgtatttttaagtttgtttcttattttatggttttatttgtttatttttttgatctgtggatgtgcaacccacagatagagagggtcaactgggccgggcgcggtggctcacacccgtaatcccagcactttgggaggctggggtgggaggattgcctgaggttaggagctcgagaccagcctggccaatatggtgaaaccgtgtctctactaaaaatacaaaaattagccaggcatggtggcaggtgcctgtaatcctagctactctggaggctgaggcaggacaattgcttgaaccygggagttgaaggttgcagtgagccaagatcctgccatagcactccagcctgggcaacagaatgagactctgtctcaaaaaaaaaaaaaaaaaaaaagaagagagggccaactgtatgtaatttactgaagcatggattcacattatagatggtccctgatttatgatggttcaacttatgatttttatactatgatggtgggaaagctggtgtgatatacgtattcagtagaaattgtacttccaattttgaaatttgatcttttcccaggctagtgatatgcagtgtgacaatttctcatggtgctgggcagaagcattgacccacacctcccagtcagccatgtgatcaggagggtaaatgagtatactccatggtgtactgtgttgccaggtgattctgctcaactgtatgctaatgtgagtgttctgaacacatttaaggtaggctaggctaactatggcattcggtaggtaaagtgtgttaaatgcatttcctacttaaaygatattttcagtttatggtgggtatattggaatatagccccattgtagggcaaggagcatctttatttacccagttgagtttagtggcagcagractaagttcggtttagctgttcagtgagccaagcctcacttagcatctaattctgtctttattttctgctttagataggccacagctctcctgaagggattaagactttctgtgtgaaaaatggtattcagaaggaagccagcatkaattctgtttttatacatttatsaagatttgaaggaatttcactgtcaattctgtcttaattgtattctgtataataaatcataatggtatccaacggctcttgaaaggtttggtttttgtgaacatttctttgaatgtcaaagttgtattagtttgtttctcaattaaactgggtgctctttgagggcagggatttatgggacttgtttgttttgcagttttatatctccagctgctaatgcagtgcctggtttgtagtaggaatgagagatttactccaatagaaccatactaaagatcttacacttatggattacagttgatagctttgtagagtgaactggtattccctttaaatgagaygacatgacctgagtataaagtataatcaactacatgactccagcaagaataccatgtgtccctcagatagcatagctggcagatggagttatgcacatcaactggacatttaagasagctggagatttcttacatttagatgacagtttagattagaaatatttaatcttagctgtacttaatatattatgtagctatatgatacatcatgtatatatggtatatcatatatatcatatatttaatcacatttaatccttagctatattttcatccccaaaatggtatatggatctgtttttattgtcagctggttatttattgttgcttatccatggctcatgaaaatcttcatgttacttgggaaatctttcactctgccttttgaaggacagcccagaaccatttccttcttggcacatgaccttctaacccagtgaccaaagagtatgtaaaagyatggtacacactgcttttgaagattacgtgtgtctattctagatgtgtcttatttcttgcagatatattgcctacaaagattttgatatatatatatacagtagactatactatataattaatatttataccagatattaaatatataagcattctactagaactaaagttaagaatttgaaatagtctcatgtgagtaattaaaataacaatagcatctttttcaagaaagttttttttaatatggtggagataatgacatggaaaaaagtagttaattatttttggtattcccgtatttcatcagtaggttgccatagaacataatagttatataatcaaacagcagaataattttatatgaggtttattgatacagaaatgtttggttcagtgtttgtcttccagttttgcagattttcttttcrattttaaaactggagaatacattaaaaccagaaactttcagcctctataatgccctcaaaactcagcaggttttgaaaatgcctcttccttctcttctcctccccataatcytgcttatttttggcattaagtgagtcaggggttccaaacccaaatacgtttttcaaggctatgtagtcagtgtgaatgagagaagtaaatctgttgggtcctgtgccacactggagtttccaaggctggtctaaatgagttcaacttcagtttttttgtgtttttttagagatggagtcttgctgtgttgcttgagctggtcttgaactcccgggctcaagtgatcttccagccttggcctcccaaggtgctagaattataggcatgagccactgtgctggccaatttttttttttttagcccactgtgctaccagtttgtgatcttcactttaactgtgaaaggactgtcaaagattgtacgtataagatttagtttgagagccaggcctggtggctcatgcctgtaatcccagcactttgggaggctgaggcgggtggatcacgaggtcaggagatcaagaccatcttggctaacacggtgaaaccccgtctctactaaaaatacaaataaattggccaggcgtggtgacgggcgcctgtagtcccagctactcgggaggctgagacaggagaatggggtgaacccgggaggcggagcttgcagtgagcagagatcacgtcactgcactccagcctgggcgacagagcgagactccttcacccaaaaaaaaaaaaaaaaagtagtttgtctttctctttgaaactgaattcattaaacaaaagcctaaataactatactattacttgttatttatttatttatttattttagacagagtcttgatctgtcagcaggctggagtgcagtggtataatcttggctcactgcaacctctgcctcccaggttcaagtgattctcgtgcctcagcctcctgagtagttgggactacaggcatgcgtcaccacacccagctaatttttgtatttttggtagagatggggcttcaccatattggccaggctggtctrgaactcctgacctcaagtgatccacccacctcagcctcccaaagtgcataagtgctgggattacaggtgtgagccaccacacccagcctactacatattcttttagacccagctgaaatatcacgtaattgctgaaggctcctgaactcttccagatcagggattgattttcctcattttaagattgtcatgacaactgtagtattgataactgtattttattttattttattttttttgagacagagtgttgctctgtcacccaggctggagtgcaatggcacgatcctggctcactgcaaacttagcctcctgcgttcaagcaattctcgtgcctcagcctcccaagtagctgggattacagatgtgcaccaccaaacacctggaattagtctggctaatttttgaagttttagtggagatggggtttccccatcttggccaggctgttctcgaactcctgcctcaagtgatccacctgccttggccttccaaagtgctgggattacaggtgtgagctaccgcacccggcttattaaccaatttttaatgttcagcacaacttgatcatgatgtacaatgtcttttttatgttatgtgttgatggagtcaaattaccgatattttggttcagttttttcaataagagatcaggctattttctgattttcattctgtttttttctttgatctgtatgtatttataagtgtctcttattttcaaataggttttttctagttatctttttgtaacggatttatagattatacattgtggttaaagaatatggtctataggctgggcacggtggctcacacctgtaatcccagcactttgggaggctgaggcagggggatcacttgaggtcatgagttcaagaccagcctggccaacatggtgaaaccctgtctctactaaaaatacaaaaaaaatttagccgggcatggtggtgggtgcctgtaatcccagctactagggaggctgaggcaggagaatcgcttgaacccgggaggtggaggttgcagtgagccgagatagtgccactgcaatccagcctgtgcaacagagggagactccgtctcaaaaacaaaaacaaaaaacaaacgaaaacacacacacgcaaagaatacggcctacatgcactttcagtcctttggaaattgttggtatttatttgccatttggcctagtttacccagattccacaggttgttaatgttgtacaattgcrtcttctctttctcacttcacccatctatgtaatttttctgaatcatttgagaaataagttgcaaacataatgctgtattacccataaatcagggtgtgtttcctgaaaacaaggatactctcctataaaatcaggaaataaatattgatataatactgccatctgattcacagaccctactcaaatttcactgatcttccaattatgtcttttatagcaaaaacaaaacaacagaaaccaacaaaattccctcaagaaaacaaaagcagaaaaacttccctttccccttcacttatttctgattcagggaccattcaggattatgccttgcgtttagttgtcatgtctgttcagtctcttttaatctagaatagttctcagtctttccttattttcagtgatcctaatatttttgaagagtagagaattattttgtagcaagtcccacwatttgggttagtctgatgtttccttttgaatagatttaggttatgcatttgtggcaggaataccaaagacacgatattatgttcttctcactgcatcgtatcaagaggttcatgtcaatttgtccaattactggttatgtttaattttaccacttggttaagatgttggctggcaagtttttgtaaaattagtttagaggtatttcatacttactggttagtaagtaataatgcattttgtggggtgatgctttgagactatataaatagcttatttctcatcaaatttttgcttgctagttttaccatccattggtgatttgtgcctgaatcagttattatagtggttgctagatggtaaatttaaaaaatttcattatttcttctgaattcatcacttggcatttcttttyttttttttttttttttgagacggagtctcgctttgtcacccaggctggagtgcaatggcgtgatctcgtctcactgcaacctctgcctcccaggttcacgtgattctgccacctcaccctcccaagtagctggggttacaggcacccgccatcatgccctactaatttttgtatttttagttgagatggggtttcaccatgttggctaggctggtcttgaactcttgacctcagatgatctgcccaccttggcctcccaaagtgctgggatcacaggcttgagccaccgtgcccagccaatcacttgctatttcactctaaggaaaagctttctctctctggtttttgtctttgtttttgtttgtttaaaaatcttttaaacatatgagcacagcctcattgattcttattttgttcctttttcatgtattttttgatattcaaattgtcccaaatttggccagtgggaaccctttcaggctggctcctgtgtcctttttccatgtcctcatcattctttttttttttttttttttttttgagacagagttttgctcttgttgcccaggctggrgtgcaatggcgtgctctttgttcactgcaacctccacctcccaggttcaagcgatcctcctgcctcagccacccaagtagctgggattgtaggcacctgccaccacacctggctaatttttctatttttgtttttattttttttattttttgagacggagtcttgctccgtcgcccaggctggagtgcagtggcgcgatctcggctcactgcaagctccgcctctcgggttcacgccattctcctgtctcagcctccaggcatgcgccaccatgcccggctaatttttttgtatttttagtagagacggggtttcactgtgttagccaggatggtctcgatctcctgaccttgtgatccgcccacctcggcctcccaaagtgctgggattacaggcgtgagccaccgcgcctggcaatttttctatttttagtggagacaggatttcaccatgttggtcaggctggtctcgaactcctgacctcaggtgatccgcccgccttggcttcccaaagtgctgagattataggcatgagccaccacgcctggtcatgtccccatcattctttgatcactttttttcttactttttggaataataagattttctgtgggctgggcgaggtggctcacgcctataatcctagcactctgggaggccgaggctggtgggtcacctgaggtctggagttcgagaccagcctggccaacatagtgaaaccttgtctctactaaaaatataaaaattagccgggcatagtggcacacacctgtagtcccagctgctagggaggctgaggcaggagaattgcttgaacccgggaggcggaggttgcagtgagctgagattgcgccactgcactccagcctggatgacagggcgagactccgtctcaaaaaaaaaaaatttctgggctcatctttacttttgttatctcagtcgtggaatcaataattttatcagggaaccctggttccttttattagtgaatgtacttagaaaataaaatatgtgcactactagatatgttctttctattggggtgttcttccttttaggctctatgtgaggagagaactagaatattgttttaaaatgtaccaggtaatcccagcactttggtaggctgaggcaggcaaggctggcagatcacttgagatcaggagttcgagaccagcttggccaacatgatgaaaccccatctctaccaaaaaacacaaaaagtagccaggcgtggtgacacgcacctatagtcctagctagagtgagatagagtgagaccctgacttaaaaaaataaacaaataaataaaatatactggaatttaatttataggtatgaatgacacagagaggccaatattattgaaaatgtgttactcacagttcttctgaaacagcaggcgcaccatactatgcaggaccacatggggaagcaccagggtgggtcaggaggcagaaggaaccagaggaaaggatgggtgagttttttttttgttaaagtgctagaaagttgttaggtgggacatcccctattgagcagaaagagaaacacaaatgttgagatttgtggttggacggtttgtaatatgatttttgtgtagcctcaaaaacacagagatggtatgaatgtaaacaactttggtcgttaatttggcccatcctttcaagatgccaaatcatcaattacagaatatcaagaatgattatataggtatgtatgcatgtctatacatacatatatacatctgtatcttcctgtaaataatgaaagccatggtttcattccaatactcttaattctagtccaacacaatagggtttcttctggtgtttcccttttctgacattgaaaaatctgaggccaggcacagtggctcttgcctgtaatcccagcactttgggaggccaaggcaggtagatcacttaaggtcagttgctcgagaccagcctggccaacatgatgaaaccccatctctactaaaagtacaaaagttagccaggtgttgtagtagtggtcgcctgtaatctcagctactcgggaggctgaggcaggagaatcgtttgaacccaggaggtgggggctgcagtgagctgagatagcgccactgcactctagcctgggcgacagagtgagactccatctcaaaaacaaaacaaaacaaaacgaaaaatctgccycctttttttttttcattcattcattaattctttagatggggtcttgccctgtcacccaggcggtagcgcagtgacacgattatagctcactgttgcctcaagccatcctctcgcctcagactcctgagtatctgggaccatacaggcacgtgccactgtgcttggctctcacattgtcctttttactcaccttcctgttggtgacaatctcctgactatgtaggccattttcttgcccccagccccactgaatgagctggctgatcactccttcaagttccatgagccattgttacatacaggtagtactcagtttgcttggttttgatattcataaatttccattgctgtggtttaattaaataatgccagtcctcaaatagcagttaatgaaatacaaaatataacctgtgatcaagaaaagcttctcaggtgggcgtggtggctcatgcctgtaatcccagcactttgggaggccggggcgggtggatcacctgaggtcaggagttcgagaccagcctgaccaacatggtgaaaccccatctctactaaaaatacaaaaaattagctgggcgtggtggcaggtgcctgtaatcccagctactttggaggctgaggcaggagaattgcttgaactcaggaggcataggttgcagtgacccaagatcaagccattgcactccagcctgagcaacaagagcgaaactccatctcaaaaaaaaaaaaaaatagcttctccaaaattttaaaaatttaccctgaccctgaaatagttgattgttccctccctagacatcattcagttggagctagcctaattttgttttttttgttttgttttgttttgagatggagtcttgctctgttgcccaggctagagtgcagtggcgcgatctcggctcactgtgacctctgcctcctggttcaagtgattctcctgcctcmgcctccagagtagctgggattacaggcgcgcracaccacacctcgctaatttttgtatttttggtagagacagggtttcaccatcttggccagactggcctcgaactcctgaccttgtgatccacctgcttcggcctcccaaattgctgggattacaggcatgagccaccgcacccagcctttttttttyccttgaggagaattacagtctgcactgctctcagctgaactttacacagcttttacatttccctctgtcagttcctcttgtaatggtgggtgggtagctgaagggaggatatgtacaataatgtatttttagttcctttgaacagagaggttgcttcagccattgctattgatggcaggaagtatatttatagctccagggaaggaggggtagtacgactgctggtttaagaaaacctgggagattgtatttaatatatgttgttaaaactcatttgtactttattgtaagttcttgccttagaaatgcagctgagatgaatgaacctgttacttatgttatattgttacttatgttatatatgttatatgtattattgtaagtatattgactctgctccctaatttggaaaaatcttccgttttgaaattttacaatatacaatacctaaaacaaagagtacttctagagcatacaggatgtatgtggagaattcaggtgttagcatgcaattgaacagtaaagatactgactagcagtataaatatcgtccccatttagatattttattcataaagttcttgttggtgtagcttttattgtgattttttcttttttttttttggatacagagtctcgctctgtcacccaggctagagtgcagtggcgcagtcttagctcactgcaacctctgcctcccaggttcaagtgattctcctgcctcagcctcccgagaacctgggactacaggtgagcattaccacactggctaatttttatatttttagtagagatggggtttcaccatgttggtcaggctggtctcgagctcctgacctcaggtgatgcacttccctcggcctcccaaagtgcagggattacaggtgtgagccactgcgcctggccaattgtgatttttttaaagattgaaaccaaaatattttatacagatcataagatattcttggtaaacactaagcacctcataactttaccacaattttgaytgcacaactttcacctgtggttatcatgtgcaatgggcacattcaacacaaatcaaattattctgaagcttgctttctttcttttttccctactccctttcttaattgaggggagcaaaaagttggtttccagggatatgtcttctctcttatgctggtcccagattgatgcagtcatggaaactaggcagtaaactcattcttggcagctgccrgcactggtctgattctttcttttaaaagcatgagattctttaataacacatattggaaagattgatgccaagtgattccaggtcatcctagaggaggcttgggaacattgttgaatagatttaaatgattcagttaagtgagtgatttaacccaaggtttgtgtctaatttaaacaggacctataaaatatagaacaattggtttgtttcttttttagaatattgaagattagattttaatttgagaattttactaatttgagggttttattttttgtttttaagcgttcaaaatgttgaattgtagatatgctgagttttataatgagcacaatgaaggtttttcaactggcccgttaaagccaacccactaatgaaatgaaaatatgaaatattatgactccataatatttcatggattttgaagctgggctgcctgggttcaaatcccatctctgctactttttgggtacgtaaccttgtgccagttacttaacctctctgtgcctcagtttcttcatctgcaaaatgggagatagtgcagtttgagtgttcctaatctgaaatctgaaatgctccaaaatctgaaactttttgaatgcctacatgactgctcaaaggaaatgcttattccatggagcatttggatttcggatttttgggttaagaatgctcaattggtaagtaagtgtaatgcaaatattccaacatctttaaaaacctgaaatccaaaccacgtctggttccaagcattttggataagggatactcaacctgtaaataatgtctgtttcatggggttgtgatgtggagtaagtgagcaaagttgtgtaatgtgcctagcttatagggaacacttagcaaatgttggctattccatttatatataagaaatagaattattggctgggtgtagtggctgatgcctgtaatcatagtgctttgggaggctaaggtgggggattgcttaaggctaggagttcaagaccagcctgggcaacatagcaagactctgactctgcaaaaaaattcacaaattagttgggcgcggtggttatatgcctgtagcccttgctactcaggaggctgaagcaggaggatcgcttgagcccaggaatttgaggctgtggtgagccatgataatgccactacactccagcttgggcaatagagtgagaccccaacttaaaaaaaagaaagaattattgatgggattgtaaaggctgaatattaaataaattcagaggaggtttttacggaacttatttgtgaaatatttttaaaggaaggaaggcatgtttgttttaggtttataagagatggcagatttaggaagctcctccctactccagatgaataagccatctgtttttctatcccttttaaggatttgcttggtgggtttccataacttttttttttttgagactggatcttttacccacccaggctggcgggcagtggcgcaatcatggctcactgcaacttcaatctcctgggctccagcagtcctcccgcctcagtctctcttgagtagctaggaccacagacgcgtgccaccatgcccagccaatttttatttatttttttgtgtgtgtggagatagggtctttctatgatgccccggctggtcttgaactcctgggctcaagtgatcttgctttggccttataaagtgctgggattacagttatgagccatggcgcccagtctatgtattcttacaaaattaaattcatgttaagtgctacactagcagaatttttaaaatttttaaatgatgcacaaatagagaagagagagtgcaaattaacgagaaataggcaagactaatttgaagaaaactatgaagctttactgaaggatttttttaaagatataaaatgctggccaggcgcggtggctcatgcctataatcccagcactttgggaggccgaggtgggcggatcgtgaggtcaggagatcgagaccatcctggccaacatggtgaaactccgtctctactaaaatacaaaaaattagccgggcatggtagcggatgcctgyggtcccagctaytcgggaggctgagctggaagaatcacttgaacccaggaggcagagttgcagtgagccgagatcacaccactgcattctagcctggctagagarcaagactccgtctcaaaaaaaaaaaaaaaaaaagaataggcaaataactagagaaaaatagtccagaaacagacctgaatatatataggaatttagaatatgaaagtgtcagtgtgtaggaaggagtgaaatgaaaaaagaaagaaaaaaggaatatgttgaaagtggcattcagaaatcagggagaaaatgatcgattactaagaatgatcctgtaacagtgggctgtttggggaaaaatacgtaaagatttctaatttagactatattcaaataatcaccaaattatatagagcagggatacccaacctccaggccacagaccatcctgttaggaactgggccacacagcaggatatgaactttaggccagggaacattacacctgagctctgcctcctgtcagatcagcagcagcattagattttcataggagcacaaaccctactgcgaactgtacactccagggatctaggttgtgtgctccttatgagaatctaatgcctgatgatctgaggtgttgcagcttcatcccaaaatctgaaaccatatcctccacccctccatttcatagaaaaattgtcttccacaaaactggtccctgggtgccaaaaagattggagaccgctgataatagagtatatataatcaaattacagaaataaccacactctattcttcctctagaatatactgaatgtttcctaagaaaagttgaacactcatggctggttggctgctctctagcacatcttgccttcgtctctcactagttgaattttacacttccaggggtcagtatgtttgttccaaatctgcttatgccagttacatttagtactgtaattttataatttaattaaacattaactaatgaaatatgactgcaaaaagtagttgtttttaggaaaattaagttgtagatcttgaacaaattggataaatacaaatccccttttccccttttcaccaaattactgtcttactaattgtgggcgtgaatattttgaaagattgggggtggaaatcataaaattctttttttttttttttttttttttgctcttgtttcccaggctagagtgcaatggtgtggtctcagctcaccacaacctctgcctcctgggttcaaatgattctcctgtctcagcctgccgaatagctgggattacaggcatgcgccaccacacctggctacttttttgtatttttagtagagacatagtttctccatgttggtcaggctggtctcgaactcctgacctcaggtgatccacccgcctcggcctcccaaagtgctggtattacaggtgtgagccaccacacctgacctcgtaaaattcttaaacgatctatactcagttgtcttacagttgcctagattcttgttccatttaaagaaactgaaatttgaaatcacaaatgtggattatggatatgatgggttatggatatgatatatttgtaatgaatatgcaagagagaacatttgaaacattaattagtagaaatgtacttaaagaagaggccttggttttttaccgtaatattggcaggtgacatgtatttgttttgagtaaaaatcaaatatttcagttacatttttaaaattacctgatatactgtactttttcatgtaaccagtcagccctgagtcctatttgtgttagataagtttttaccaatcccagaaggagatagaggacaagcttttatatgcttcggctgaagaaaacctttctccaaagaagtaattatctgatcctcctataaagggccagatagtaaatattttagattttgcaggctgaagtagaatcaagggtaatacgtacgttctgatataacaagagagaaaacaaattttgagaaatttcttaattgattaaattcaaaataataaacacaatttattgaaatacaggtatactaatgagaagaatggagttcttttcggagtgataacattttcttaattggagttcagagttagtgcttcctattcaataaataatcatcaaaattgattgcaagtatttatctattaatgcaggtctgtaatgaggttttatatatttcatctttgacatgtcttcacacatacatgtcaaataattgataccagcccataaacatatgattttaattgagcatattaataactcaggaagcatttatagaattaggtttttcttataacatttaccttttagtatattattcattgctgcttaattacttccaatggaaggttagacagaagctccacaattgcactgttaaatagatactgaaatatagatatttccttgtgcattaaggtcctaaaaattattctggaaatgtagtgtgagctaagaaactatatccactgcaaatttgtttgggaatggagatctcacttcttgttttaacttttgatagcatgtaaagtgtataaagcagctcaacgttgcttatgattcaaaagttagttgtctaaataacaacagtttaagtttcatatataagtgytgttctgtcctgtaattttaagttgaatttactattataaaattagcaaaagctaattctcaaagccatttattgtttgatcatagtgtctgaaagcagtcttattgttgtgaaaaatttcaatctcagttccaagctgaaaagaaaaaaaaaaaagcatgataaaactttagtacagctcagccgtcaaactgctgtgtgcctgggcaagtcaggttattcagcttctgtttctgacaatggttaagcccatggcagtgaatgaaattcaccattaacatggttggtttaataattcatgataaattcagatatttttcatagaatatctattgataaaaaacatgaataaccaccttacattttcacgttttataaatcacccaactaagcctttttctgcttcacacatatttttaccattatcaatgataacgtatctgagattccactttaggttatatggaattagtactttttcaccttcttgtttgtagttgttcaacacagactattcatagaagctaattcttcagttgttttaaacttggcactgactccttgaataaacatctgaacagtgttgtaacatctatcaaactcattcaaaagagatggaaatctacttaacctcaattgccttggttttttttttaaacagattattgatcttgctcctaatattttcgacttttagagcaaatgattttgttgaaaggctaatagtctttttttctttttaaattatcttatattaaatttaaaaaataatttttttgttacctgtctggagaaagcctagagaaaggctaattaatactcttaaacaagtttattttctctggatacatttcttcagcttcttcatgatttaattcacttatcactagaatattacttttcttgctttgctaacaaatgagctacttagaaacttccctcctttacaaactttctattccttaccttccctccttgctgtaatgaaatattccactttaaattttcaaatttttctgaccattgctttcctgtgaatcggaaatactgtgatcggtccttagtttggtaacattgatgtattttgaattcttttagcacagacagacagttgactccttgaacaacgcagtttcaaactgcacaggtccaattatatgagaattttttttcaataaatacaatcagcagtttatacatatacaaccaaacgtggatcaaaaatacgttatttgaggaaacccccagatacagaacagtgaaatttttgtatcctctgggccactgtgggacttgagtgtgcatagattttggtatccacggttgatccacagataccaagggatgaccgtagagtcattgcataataaacaaaatgcttccctatcttgtcttgataaaataatgcataccctccactgtgccttaaaagcatgacattcaggctgggtgtggtggctcacacttgtaatcccagcacttttggaggccagggtgggaggattgcttgagcccaggagttcaagaccagccttggcaacatagtgagagtccatctctagttttaaaaaaatacaaaattaaaaaaaatgaaaaacatgacattcaaagtgcatttgtttttgtttcgacatgatggttatgcactaataactaatgatagttatgtactaataaaatgtcaaaataataacgacttttagttactgataacagttatgcattaataaaaaataaaatgtcacagtatgacaatatgcatgtgtggcaccaaacatgctgttgagttataactttgtgactgtgatttgtgggatactgagcagcagtggaaagctatataagccactccactctgccagtcagtacagtggctgattaccaattatggataaccagaacacatsaaaaagcagttcaacaaggatcagaataataacatgtaagtaccatttattaagtagttatrtgtaaggcactgtgtcagactgtataatgtacattatttaaccttcaaaagattgagagggaagatcccttgagtctgggaggtcgaggttgcagttagctgtgattgcaccactgcactctagcctgagtgatggagcgaaatcctgtctcaaaaaacaaaacaaaacaaaacaggcctggtgcggtggctcatgcttgtaaatcccagcactttgggaggctgaggctgaggtcaggagtttgagaccagctgggccaacatggcgaaaccacgtctctactaaaaatacagaaattagttggtgtggtggctcacacctataatcccagctactcgggaggctgaggcaggagaattgcttcaacccaggaggcggaggttgcagtgagccaagatcatgccactgcactccagcctgratgagagtgagactccatctccaaaaaaaaccaaaacaaaacaaacgaaaactacaaaagattgtctgaagccagccacagacaatagtaaatgaatgagtgcagctacattctttcttatttatggatgcagaagtttgaatttcatataatttttccgtttcacttatatataaattatatattatatattacataatatataatatatattataagataatataatatatattagataatatatataatataagataatatatattagataatatatataatataagataatatatattakataatataattaaaatatattaattataatatataatatatgacatatatatgttatatattgttatatataatatgtgtaattatatattataatatatgatatatatataatctatcatatatcatatatataatctatcatatatcatatawaatctatcatatatcatatcatatataatatatatcatatcatatataatatatatgatgtatagtatatatgatatataacatatatataatatatgatgtatagtatatatgatatataacatcatatatactatacgtcatatataatatgacgtatagtatatatgatatatgatatatatactatattgtatatgatatataatatgtattgtatattatatataatatatatataaggcacagtggagggtatgcattatatataatatgtattatatattttatatattataatatatattttatatataatatattttgtatattatatattttatatataatatattttgtatattatatattttatatataatatattttgtatattatataatatataaaatgtatattatatataagtaaagtatatattatatataatttttatatatactttttttttttttttttttttagactggatcttgctctgtcacccaggctggaatggagtggctgggactacaggygtgtgctatcatgcccagctagttttttttttgtttttttttttttttttttaattttttttttttttttaagacggagtctcgctgtcacccaggctggagtgcagcgacatgatctcggctcactgcaagctccgcctcccgggttcacaccattctcctgcctcagcctcccaagtagctgggactacaggcacccaccacacgtccagctaattttttgtatttttagtagagacggggtttcactgtgttagccaggatggtctcgatctccggacctcatgatccacctgccttggcctcccaaagtgctgggatcacaggtgtgagccaccgcacccggcctactttttattttaacttttttttttttttttgtagagatgtggtctcactgtgttgcccaggctggtctcaatctcctggggtcaaacagtgctcctgcctcggcttcccaaaatgttggtattacaggtatgagccactttgcctggctatcttataaataattttgatgttaggaatttttagttgcttttatttttatttttgttgttttaaatatttattaatagaagcaaggggtggataaatcttctagatcaaactcttccttaaaatagttctgcttttggtaggattccagattttcctagttttgttaagtgtttctaatgatgtttggcataggtgttaacttcatgggcctgttgtatacaaaccaatttttttcttgctctgagtgaacagtaacagaacctggtaggtgagtcacactgatactgcattcactgaagttactaagctgaatgataagagatgagaatcctttgcatttgtattcaaatcaagagttgtagaatttgaaattcctgttttgatgaactatgtgaagcatgctgtcattcttctctgctagtctatgttgatgatgtcattaaactagtctttgacttttagttcttggcttaaaatattggaatgattatataataaataggtttatttcatgtggaaaaggaataatgtgtttgccctgaaatagtctgatctgatcaggaggatattatgctgagcatggctggaaataaatttgtagcaccaattaaatacactgtagcagctctgagagggaataaaagtaaaatataaatagtaaatatgagagaaagtgactatgggatctaactatgtaagagcagggtgggagtatgggtagatacgtacatgccccctagattttaggaaagcatatttcaagaagtagagaagacatggatatcaatcagtggaaatcgtatactaaaacggaagtcagtgaaaaaaaaagactgctctcaaactaaagatagatggttgcttctaataggtaggtattcagattcgattaagaaattagaaggccgggcatggggactcaggcctataatcccagtactttgggaggtcatggtgggcagatcacttgagcccaggagttcgagacaagcctgggcaacctggtgaaaccccatctccacaaaaaataccaaaattaattagcagggtgtagaggcacatgtctgtattcccagctactcaggaggctgaagtgagagaatcacttgagcctgggaggttgaggctacagtgagccgagatcacaccattgcactccagcctgggtgacagagtaagaccctatctcaaaaaacaaattttgaaaatatacagaagtatagaaaaactgaagtaatttaatttgtgttaaaatctgtttggtattaaaactaatgtttggccgggcatggtggctcacgcctattaattatcctagcactttgggaggccgaggcaagtggattgcttgagctcaggagttcaagaccagcctgggcaacgtggcgaaactccgtctctacaaaaaatacaaaaattagctgggcatggtggctcacgcccgtagtcccagctcctttgcaggctgaggcrggaggatcacttaagtccaggagktggaggttgaagtgagctgagatcgcacctctgcactccagcctgggtgacagagtgagaccctgtctcaaaaacagacaacgacaaaaaaccctaatgttttatgaaaaagctctttaatttttcgtgaccaaactgctattctctagacctacactgtccaaaatgatagccattagccatgtgtgctactgtgttggacagcacgtatttagaacatttccaacatcacaaaagttctattgcagaatgctatgaaaatgagatacactttcattagaaaagctagtaaaaataagtaggggtaatgrggtactttgactatccagaaattttactaaggaagaattagatttttataatactgggacattagtgtgcactttttttgtcgtaattgcattttgttttttattttgaaataaatacatgtacagaaaaattgcaagaatagttacagagtcttttcgctccctgaaccattagagagtgagccccatcagccccaaatactttaatgagcattaaatctggagtttggccgggcacggtggctcacgcctgtaatcccagcactttaggatgacgaggtgggcagatcatttgaggtcaggagtttgagaccagcttggccaacatgatgaaaacctgtctccactaaaaatacaaaaaaatgagccgagcttggtggtgcacacctgtaatcccagctactcaggaggctgaggcatgagaatcacttgaacctaggaggcrgaggttgcagtgagctgagattgtgtcactgcattccagcctgggtgacagagtgagaccctgtctccaaaaataaaataaaataaatctggagtttaataccagtacagtactaccagcttatcttcaggccccattcgagttattctagttgtccccaaaaggtgaaggatccagtttaaaatcacacattgcatttagttgtcatgtctgtctttgacttgatcgccttgacacttttgaagattacaggctcattattttgaggaagtcattaacatggacctgatgtttcttcatctttagattcagattatgcattttatcagaattgccacataaattgtgctgtgttcttattttatccatccaggtactacataatttccatgtgtcccatttttcttgatgttaaccttggtcacttgattaagattgtgtctgccagttttctctaccatacatttaactattttttcctttataatcagtattttatgaggaggaggaggaggtactttgagacaatgtaagtatcccattcctcatcaaactttcaccttctagttttagcacccattgaaatttttttgctggattattggtatgatggctgccaaatgatgattttctaatttcatcatcccttctacatccattcattgacatttcattgaaaggaaaaactgttttcttcccatttatttaacttatatcaatatggacttacggattcatattttattcaataagttatctattagtgtactttggtactttgatgctgagtttgtcccagatttggtcagtggaaaccctgtcaagctggcttcygtatccttttgacattgtcctatcattctttgatcactttcctctttctgggaccagatatgatcaaagcccttcttatacttttcctgccctacctctggaatcatttcaccaaggtaccctggttccctttattgaagaatgtatttagaggttaggtctggacagtagatggcattgttccactgaggtgtcactgctcctagactttctcagcagacagagctagagcatatatgcatgtatatacatacacaaacatacatccacacacatagactcatttttttatttcttgctctgtgtgtgtgtgtgtgtgtgtgtgtgtgtgtgkactgtgagttcacactggtacctagtacctcaacacctcagagttcattttatttttcttcctttttgtatttgtaactcccttctctgacagagaaactgggccccagtttttcttaatatattactatttacttaattgatcaatccccttgaatgtgcccagtctttcctttccttatcagatcatgtgcatgctaaccttgctcagccccacctaatggtttttagactgaattatttggagacgaaaaaagtacggttgatgctcattagtcacagattttttttatttgcaaattcacctacttgctaaaatttatgtgtaaccccaaaatctgtactcgtagcacttttatggtcattcatgaacacgtacagaagggtaaaacatttgagtcgctattgggtaacgtgtattcctaggtgaggccaagcaaggcagtctactgccttcttctttgagtcctcatactataaatagttgtcccttttgcagtttacttagcgccacatattttgcattttgacttcttttacttagcatgtgttttcaagttccatccatgtttatagcatgtatcagtacttcattcttcttcttttttttttttaaagagttgggggtctcactgtgttgcaggctggaatacagtggctattcacataggccatcatagcatgctgtagcctcaaactttcactgggctcaagtaatcctcccacctcagcctcccaagtagctgagattagaggtgtgggccactgtaccaggttccttcctttctaaggctgaataatagttcattgtatgtataataccacattttgtttatctattcatccaataatgggcatttaggttatttccaccatttggctatcttttgaaaatcttttcatgtgcttgttggccattagtatatattctttggagaaatgtctcttaaattctttgcctattttttaaattggggggargttgtctttttttgttactgaattgtaagagttctttatctattctgataactagacccttatcagatacatgatatctgattaacacatagtttcttgcatcccataggttgtctttcaaaattttgacgaattccaatttgtcagttttgttgcttatgatttttagtgtcatatctaagaatccattttcaaattcagtgtcatgaagatttacctatgttttcttctaagaattttatagttttagaccaagcgcggtggctcatgcctgtaatcctagcactttgagaggctgagacaggcggattgcctgagctcaggatttcaagatcagcctcagcaagatggtgcccatctctactcaaatacaaaaaattagcctatgrcgtgtgcctgttcagctactcgggaagttgaggcaggaaaattacttgaaccatggaggcagaggttgcagtgagccgagattgcatcactgcactccagcctgggccacagagcgaaactatgtttccaaaaaaataataacaataattttatagttgtagctttttaagtttttaatccactttgatttttttgttttgttttgttttttgagacagggtcttgctctgtgctgcaggctggagtgcagtagagcagtcttggctcactgcagccttgacctcctgggctcaagctatcctcccacctcagcctcccaagtagttgggatcacaggcttgtgccaccatgcctggctaatttttgtattttttctagagatggggtttcactattattgcctaggctggtcttaaactcctgggctcaagtaatccatgcccaccttggcgtcccaaagtgctgggattacaggcgtgagccaccactttcagtcccaagttaatttttatatatggtatgaggtaaggattcattcttttgcatgtgaatatccagttgtcccagtgccatttgttgaagagcctgttctttccccattgaatgttgtcttagcactctttccaaaaattagttgaccatagggcatggtggctcatgcttataatccaagagctttggaaggcccagatgaaaagattacttaaggccagtatttcatcaccagccagccatggtggtgtgtgcttctgggagggtgaggcagaaagatggcttgagctcgggtgttgaaggctgcagtgagctctgattgtgccactgcactccagcctgggtgacagagtgagacactgtctctaaaaaatagaataataaaaatcagttgactatagatttgtggatttatttctgaactcatttaaaactrttccattgatctatatatcactccttataccattaccacacagctttggttaccggtgctttgcaataagttttgaaatcaggaagtatgagttctccaactttgttcttccttttcaagattgttttggccattcggagtcccttgcaattccatataaattttaggatcagtttttttatttctttttttttttttttttgagacagagtctccctctattgcccaggctggagtgcagtggcgtggtcttggctcactgcaacctccatctcccaggttcaagcaattctcctgcctcagcctcccgagtagctgggattacaggcacacaccatccgcccaactaaattttgtatttttagtagagatggggtttcagcatgttggccaggctggtctcgaactcctgacccccaagtgatccgccggcctcggcctcccaaagtgctgggattacagacatgaaagcttttttatttttgaaaaaataaataaataaataaagacataagatgtctttccatttatttagggtctccttgttcttggaggtagattttctctgatctattttcattgagaccttgggccttaagagagccacaatttcatgagagattatttctctggagcccttcctacccttctcctatttcctgtctcctttcctcccttgttattcaaaagtcttaacaaatgctcctgggcccaatacagaggtcagctcacacttccagccttagctttggttcactttttgctttcttgccactggtagttttccctcctctcttaagaacttagctaagcttttcaaaggatgtttgcatttatccaacatttctagattttggtagctggagagttttaataattttctagattgctgttttactagattagaaaaagatagagctgggtgtagtggcacatgcctgtaatcccagctactccagaggctgaagtgggaggattgcttgagcctgggagttagaccaacctgggcaacatagtgagacctatctcaaaaaaaaaagtaagactttagggcgcagtgtaatcccagcacttttggagaccgaggcgggtggatctcgaggtcaggagttcaagacaagcctggccaagattgtgaaaccccgtttctactaaaaatacaaaacttagctgggcagagtggcaggcgcctgtaatcccagctactctggaggctgaagaagagaatcacttgaacccgggtggcagaggtttcagtgagccgagattgcaccactgcactccagcctgggcgatagagtgagactctgtctcaaaaaaaaaaaaaaaaaaaaagacagtgttttttaaagatggagtttagtatacagaaatattgggtgtcaggcaaagtattaattactttgtacgtattctcttttccttcttttttttaaaacgagacagggtgaccaggctaaactctgactgttgggctcaagtgatcctgccttagcctctggagtagctgggcattacaggcacatgccactgtgcccggctacatactcacttataaaactctatttttaaatgacagctcctctttacaaaatagatcaggagagcgattttcctgtctgcttcctgaggaagcaaaaaggcagaaacatggtgagcagcaagaccagtggttgcygtagtaagcatgggacttcctatgaatggctctgttaacagtaggggatggtaatgttctttgatttgtggactctgtttgatttgtggacaaggttttatttcctgtctttggggtaggagggtctgccatatccacaaattggctcttcccatttgttgtattcatttagttagaccatgattggaaagcctcactggctgtgcacattgcaccatacttaggaatatatgacggttatacatttcaaacagggctttaaaaccttccattcagctccttttggataaagctcttttcctcatgtggttgttgacatacatgaattataggctttgtttagctagtgggtaagagcagattttggagtcatgtacacctgggtttgagtttcagtcttgccatgtaccagttgtttgtggacaagttatttattaataactactctgtaccatagtttcttcattggtagtatcttcaaaatgaagtatctatttcctgtgctgttttgaaggtaaccttaaataatgtgcattgtacaatttgatacagtgtctgacacgtagtaaatactttaatatataatacctgtttttattctgatccttgttgagctgctgctttttgatgtgttgattatatataattggtaatcatccattttactgacatcttccaagatttgaccaagttgattgtctcaaatttccaagcagaaaaagtacccagaaaacagaaattaagcagttattaaagaatcgaatagcaatgatcattacgacttgtgcttaataagaaatgtgggccatgtctgcctgagcctttatttaatgcattttaaaatttgctgggttttttcctccctttaaaccttactatcargttcagtaataagttaaactaaaaagaaacggatgccttagaataaagaaagattcaaattaataggatatataatggcctttcatggtggtggaatttctgtgtgttttgaactaagggaaagacttaaaggaagattgcctacagtgtactggacactttgctaggctctgtggatattatcaagacacagtccttaccctcaaggatctttttatttttcttttagagacgggatcttgccctgccacccaggctggagtgcagtagcaaaatcatagttcactgcaacctccactcactctcaaggatcttactctcagctgggggaggccataaacagttaaagtagcttactctcagctgggggaggccataaacagttaaagagttaatgattgactctagggctaagggaaagaaagtaattgggtcaactaggatttctagcttggcaagggggtagacctggattggcaaactacaacccaatgccagtttttgcatagcccacaaactacaaatgtttcttacatctttgagtggttggaaaaatatcaaaagaagaatactattttgtaacgtggaaattatataaaattaacatttacatgttcataaataaggttttattagaatatagctatgctgaaactacatatctatgactgcttttttgtcacaacagcagagatgagtaattgtgacaaaggctgtttggcctgcagagccaaacatttactgtgtggctctttacagaaaaagtttgctaactcaatgagtaggtggtaatttttatccattgaaacaagcaattaaggaagaacagatacaggagaagataacatttctgtgagtgttgattatttgaatcagaggtacttgtgaatatgcaggtctagaaggcaagggaatttataggtttggagtttggaaagagcttgaggctggaaatggatgtgggaggaaaggaggagatcaagaagactggatggaggagtgcaatttttagccctgtctgcacattggaatcacctgtagtgcttaaaaccaaacaaaaccagacagacatttccaggaacccaaccccaactccctctttcccaagattatgatgcacctgagctggacttgggcaccagaattttttgaaagctcccccagcaactctaatgtgcagccactggtacagagtgagaagattggaagatgggacaccaggaacaccaacatttaagggatagttctaggtgcttctgctgaggagaggaaattctgagggagtgatgatgggaattttagggtggtcagatcctgtaatttgagatcattgttgactgatgaatcaagagcagtttctgtagaggccaggtgagggtgtatgtcagaggcccctggtttgaggtgggagagtatgaactattgagaatattgaccgggaggaaaggggggaaagtgatggctgggatggggggcattgggaatgtagtttgttctagagaggtttttttaagatgttaaagccttgaggctatttatgtgctgagggagtgagtactcrgaaagaaagcctggaatggcagtatcagatgccaccattcagttttcatgatggagtgaagggctagattttgaatagttcttggaataatcttaatattgtaacctttttggaactgtttgcttaatgtgctttcttcatttaggtgcattacattgtacctggaaagagaaatggacccaggcattgagaagcaaggccaacaactctgctttgcttgcccggttactgtcgttctgtctgggacattggtctcatctctgaaagcaggagggcaaactgaatgggctctgtagtctcttctaaaagtttttagtttaaactattaatagtacaactttgatttaacaaatgaggaagctgagcttacgagatgtctgtgaagcccattgtctgatcttttatttccttagtacctgggaatgcgcttttttttttttttttttttgaagaacaccaacagttgttcacccttccttgaatttgggtacactgtatatacagagtataccaatttagcctgccattagaacatgtcttcacgagcaaaatctagtataaagtcttactttaatattttctttattatgtataaataatagatggttgttatggaatactggatagtacaaaagtttagaatttttaacattttggtttatttattgggactcttttttccccccagtgattcttgtttctccaacaatgtgaatgcgcactccattcagtgtgaacgtgaatgttaatttatgtgccagctggattctacaggaagcagacacagatggggttggaggggcaaagggcttattagaggagtaatgcctgtgaagaaaaggggaacggaacatgtttgggtatagggagccatcaractgcagtgcacacctgacgaagtctctgcccacccagattgcctgatagaggaataccacaagaggtagaaatggctaggctcttgtactaccactttgcacagtcattgactagagatagatctttgatcaatgtagagattttcagccttggcattgttgacatttgggactggatactttgttatagggggttgtcctgtgatttgtaagatgcttagcagcatcctaggcctstatcccctagatgccagtagcccagcctccctgctattagttgtgacagtcaaaactatctttagacactgccatatgttccctagggaagggcctaatggtatataaacaaccctatggtggcatagtccaagttttgggacagggaggagtgttctatactacccttactggaaagacctatgagctattcagaaatctgaactatttaagatggagctttgttctgtggctcctggaattttaagcacacccctgtgaaacatcttgttaggatatactccactctccaaaacaatccataatgtttaaatagggctgttttattgattgattgattgattgattgagatggagtctcactctgttgcccaggctggagtacactgtcacgatctcggctcactgcaacctccccctcctgggttcaagcaattctcctgcctcagcctcccaagtaactgggattacagacacccaccaccgtgcctggctaatttttgtatttttggtagagacggggtttcaccatgttggccaggctggtctcgaactcctgacttctcaggtgatccgcctgcctcggcctcccaaagtgctgggattataggcatgagccacygcacctggccttatttttctttttgagatggagtctgactttgtcgcctgagctggagtgcagtggcgcgatctgggctcactgcagcctctgcctcccgggttcaagcaattctacctcagcctcctgaacagctgagattagagatgcgtgccaccatgcccagctaatttttgtatttttagtagatgcaggatttcagcatgttggctaggctggtctcaaactcctgacctcaagtgatccacccacctcggcctcccaaagtgctgggattacaggcatgagccaccgctcctggctattttcttttgagactgggtctcattctgttcccaggctggagtgcagtggcacaatctcagctcactggaaactccaccttctgggctcaagcagtcctcccacctcagcctgctaagtagctgggattataggcatgtgccaccctgccyggctactttttgtggagatgggattttgcatgttgcctaggctgggcttgaattcctaagctagaacaatctgctcagggatgttgtatatttctaaaggtatttttccttttgttgcaggtgacacaactaaaaaaaaacaaaggtatttatggaattccactgagtggtaatggatgatgcagttcaaataactaaggtaagagaaataaaaccagaactgtgaggaggcttttgccagccaagtagtgtccttaaataaagctaacatcacatgctttcctgcttcatttcgtttctaagctgtaagagtagcttatttttttattattataaacattgtaattatcctttaagatacttcttaacctgattatgaatcagaatcacttgaagagctttttttttttwaaaaaaaagaccaaagtcaggctgggcatggtggatcacgcctgtaatcccagcactttgggaggccgaggcgggcagatcacttgaggtcaggagttcaagaccagcctggccaacatggtgaaaccccatctctaccaaaaatacaaaaattagccagatgtggtggcatgtgcctgtaatcccagctactcgggaggctgaagcaggaggatcccttgaacccaggagacagaggttgcagtgagctgagatcgcacactgcattccattctgggcaccaaagaatgaaactccttctcaaaaaaataaaaataaaaagaccaaagttaatgccctgccagcattgaattaaagcttcttgagtagatcacagatgatctccaagttttttaagtgggaatgtaaaccaactctatagttttagaaaactctttggcaatatctgcaaaacatacacgtatctaataacccaggaatttcaattctaggtatccacctttgagaaatgaaaaatatatgtctacacaaaagtgcacatacaaatgttcactgcagctttatgtattatagccagaaaaactgtaacccaatcaggtgtccaaaaacaggagaatagttaaayaaattgtgatatatggtcaggtgtggtggcttacacctgtaatctaagcacttgggaggctaaggcgggcagatcagttgaccagcctggtcaacatggtgaaaccccatctctactaaaattacaaaaatgagctgagtgtggtggctcacgcctgtaatcccagctactcaggaggctaagacaggagaatggcttgaagccaggaggcagaagttgcagtgaggtgagatcacgcccctgcactccatccaatctgggcaacagggcgagactatgtatcaacaacaacaaaaaattgacatacactattgataacatggaattttattcagtaatagaaaggaacaaactaccagtagacatgacaacatggatgaatctcgtagataaaaggttgagtgaaagaaaccagatggacaagaaaaagtagatgtagcagaattaccgagtaaaactaaactacagtgataaaggtcatatccctacttcctctgacaggaggtgggaggttgtgactggaaagaggtatgagagagcctctgcagcaccgaaaaggtgttttgttttgttttttgagactgagtcttgctatgtcaccaggctggagtgcagtggtgtgatctcagctcactgcaacctccgcttcctgggttcaagcaattctcctgcctcagcttcccaagtagctgggattacagacacgcgccaccacgcccagctaatttttgtatttttaatagagacagagtttcaccatgttggccaggatggtctcgattgcccaacctcatgatccgcctgcctctgcctcccaaagtgctgggattacaggcatgagccaccgcgcccggcctgaaaaggttttacatcttaatgtgttcatatacatacttttctcatggtaaaatatatataagattaaatttatcattttaactacttttaaagtatacaattcattggcattaagtacattcctgttgtgcagccatcaccactgtccatctccaaaactttttcatctccccaaactgaaactccatatccattaaacactaactccccatttcctcctcccccagctgctggcaaccattctaccttctgtctctatgaatttgactataatagttacctcgtataagtggaatcatatttgtcatttgacatctggtttgtttcacataggtttatttcacaaaggtatcttgtttatttcacataggatgaccttgttttcaagtcatccatgttgtagcatatatcagaatttacattttatggttgaataatattctgttgtatgtttataccactttatgtgtatccattcattcactgatggacacttgggctgcttccaccttttggctgttgtgactaatggtgctatgaacatgggtgtaggctgagtgtggtggctcacgcctgtaatcccagcactttgggaggccgaggcaggcggatcacttgaggtcaggagttcaagaccagcttggacaacatggcaaaaccccatttctaccaaaaatgcaaaaattagccaggcatggtgctgcatgcctgtaattcccagctacttgggaggctgaggcaggagaatcgcttgaacctaggaggtagaggttgcagtgagcccagatggtgctactgcactccagcctgggtgacagagtgaggctgtctcaattgaaaaaacaaaaacaaaaacaaaaaaaaacacatggatgtacaaacatctgttcgagtccctgcttttagttcttttgagtatattcttagaagtaaaattactggatcatatggtaactccatgtttcattttttgaggaatcaccatgctgtttttcacagtactgcatcattttatattcccaccagcaatgcacaagggcttcaatttctttacattctgctttttggtgacctccataattctaaattatatgtatatgctgtttcttcttaattcttttattaataaaaaagacaacataattctttgcctctccagtgtgaaaaaatgggaatttaccttacactatccccccatttaatatttgtattatttcctgttctgctgctgtttattagtttcctcagacttctgtaacaaaactccaygaactgggtggcttaaacaatagaaatttattgtctcagagttttggaggctagaagtcttgcgggctgtgcgggagaatctgttctatgattttcttctagcttctggtwgcctcaggcatcccttacattgtagatggcattctctctgtatcttcagattgtcttccctctatgcatatctgtctcttgtgtccaaatttcctttttcaaaataagtgcgctagtcattggattagggaccaccctaatgagctcatctcaacttgatcatatgcaaaaatcctctttctaaataagttcacattcacaggaactgagtagggggttacaattttaacatcttttaggggacacaattcagtctgggtgacagaacaaatctctgtctcaaaaacaaaacaaaacaaacccataaagtgattacatttctaactttcggaagtactcttcaacctcctttttttaggttaattttcagcactctttccttctttcttcctttcctttttccttttccttttttttttttttttttttttttactttttatttttttgagacagagtcttggtctgtcgctcaggctggagtacagtggtgtgatcttggctcactgcaacctctgcctcctaggctgaagtgattttcctgcctcagcctcccaagtagctgggattacaggcacccgccaccacgcccggctaatttttgtatttttagtagagccaggttttcaccttgttggccaagctggtctcaaacttctggcctcaagtgatccgcccgcctcggcctcccaaagtgctgggattacaggcatatgccaccacacctggctaatttttgtatttttagtagagacagggtttcacctgttggatctcctgacctcatgatcgccctcctcagcctcccaaagtgctgggattacagtcgtgagtgccgcgcccacttaatatttatgttattatagctaagtaaatattgttcactgtcaggccaggcagcattttctgggtttttatttctttctctgtaggttcaatgtcatagaccctgggctattcaaatgagaaaatgaagaaaaagtgaattctctctctgaaactatcagttgcttccaatcatgtctttatattttatatttgaaccgtaactttctcataaaattttctccctggagtttctaattttcttgtctatttgcctgttattatagtttcacttttcaccaagatctcaatcatacactccagcctgtcaaggctagttcaaaccatacactgtggcccaaatttaggctagtcgtacactccaatccgagaccagtgggcactgttttttaggctgtctacacagtcatattggtattttccttactggtttttctttgacgggggtgcaggggaggttgggtccactgatcttggatatcagtctttctttgtatttgttttttaaatcttactagaggctagggggcatggtggctcatgcctgtaaccccagcactttgggaggctgaggcaggtggatcacttgaggccaggagttcaagaccagcctggccaacacggcaaaaccctgtctctactaaaaatacaaaaattagccaggcgtggtggtgggtgcctgtaatcctagctagtcgggaggctgaggcaggagaattgcttgaacccgggtggtggaggttgcagtgagccaagatcataccattgcactgcagcctaggcgacagagtgagactccatctcagtcaatcaatcagtcaatcaatctatcttaccagagttcattctcaagtcacttactgagagaaaaggtacctggcagataaattttgactctttctggtatccgttttttgktgttgttgttgttgttgtttgtttgttttggagacggagtctcgctctgttgcccaggctggagtgcagtggcgcgatcttggctcactgcaagcttcgcctcccaggttcatgccattctcctgcctcagcctcctaagtagctgggactataggcgcctgtcaccacgcctggctaattttttgtatttttagtagagatggagtttcactgtgttagctgatctgccctccttggcctcccaaagtgctgggattacaggcgtgagccaccgtacccagcctctggtgtctgtttttaagaccctcatgttggagtgatggtttggttgactatagaattctaggttgcctattatttttcctcaaaactttgaagtcattgctccatttcttctgacatcccttgttgttcatgagaaatagaaagtttcatataggaaattaatttttcttcttttctggaagcttttatgttctatatagtctggaattccatagaggtgtacttggtgggcccyttaatagatctgcagactcatagctctccattttttggttcttttctgtcagcagctttctgatattgagcttcctgggttgttcatataatgttcttatctattctgtcctttttaaaaactctttgcttttggttgttttcctggarattgtcataactttatctcctaatctttttttctctctttttttttttttttttgagacagggtctcaccctgtggcccagactggagttcagtggtgccatcacagctcactgcagcctcgagctcccaggttcaagcaatcctcccacctcagctttccaagtagctggaactataggcatgcgctactacacccagctaattttttttatttttagtagtgacagggtctcactgtgttgccctggctggtctcaaactcctgagctcaagtgatccttctgcctctggggactacaggagtatgccaccacacctggctaatttttgtattttttagtagagacagggtttcaccatgttgccaggctggtcttgaactcctaggctcaagcgatccacctgcctcagcctcccaaagtgctgggattacaggtgtgagccaccacacctggcctgctgttttttcttttactgtttcttaaactagtcttctccccgctttcttttcctgtatgaacgttaatagttgaccacagcattggccctgtaatactcttttgttctttgtatttcttcagttttatttagcctctgttgtgtgttcacacattcctttttatttgcttgatgtgtgtcccatcccttcttttgaacactgtgtggtcattaatgagagtgtggtaggattttatgtactgatatttaagaaaatgaccataaaatgttcttggagatggtctttaaagaccgggcatggtagctcatgtttgtaatcttagtactttgggtggctgaggcaggaggattgcttgagctcaggagtttgagaccagcctgggaaacatggggagatcccatctctacaaaaaatgcacaaattacccaggcgtggtagtacatgcccgtggtcccagctattccagagcctgaagtgggaggattgcttgagcccaggagctcgaggctgcagtaagccatgtttgcaccactgcactccagcctgagtaacagaacaagaccctgtctcaaagaaaggaaaaaaaaattttaagtagttgattaaaagaggtctttagggtgggctctaatttgatgtgactggtgtccttgtaagaaaaggaaatttgtacacgcagacatcagaaacaaatacacagaggaatgaccaggtgaggatacagtaagatggtggccatctgcargccaaggagagaggtctcataggaaaccaaacttgctgacactttcatcttggacttctagcctgtacagctgtgagaaaataaatttctgttgttgaacccaccgagtctgtgatacttttatggcagccctaccaaatgaatatagacatttaagaaggcttggtgcattgcagcatttsgtaaattattatgcatttcgttgtattgtgcatgtagtgccattactgagaatagcaggatggatgggaagcatcgagacaaagtaaaatacgagctggccactaacatatggtatgattttgtggtaggtgaaaaaaggattccagaagtagagtgcttatgaaagaaaagctcagtagtgtaagaattttacaccagtttgactttaacagagagtgagttcaacagtgaaagatgaggttgcaaatgtagtttggggacccatattaatttcctggtgctgcccaaacaaagtaccataaactcggtggctaaagacagcagaaatatattgtctggcagttctggaggcccaaagtcaaggtgttggcagtgttggttccttcttggggggaatctgtcccatgcatctctccttagcttccaagagccccctgtgttatttggattgtaaatgatcactcaaatcctctttcttcaattggcattttccctgtctgttttcacatgattatcttcttataaggacaccagtcatattggattaggggcccacagtactccagaatgacctcatctttatttaactaattacatcttcaacgaccctatttccaaataaggtcacatcctatggtactggggattaggacttcatatcttttttggggaggcatagttcaacccataacaggggccaaactgtgaagcatttcctatatatcaatccagatattttcaaatctattgtttattcagtgggaaaccattgaaaactttgagcaggatgaatctaacactttaggaagactccttggggatggggttggagagatgttagctgcactggaagtcagtagaccagagtctggaccactgggagtctggaccagatcaatgttatggaaaaccaggattctggggctcccactcaagatatcccaaacccaaatcttcagactggagacccaggactgttttttaaaagctccctctctctccctgtgagtcagatgatttagcctagsttggatgtaacactgggtgtgaggtgatagaggcatgaaatgggttggtggttatgcaagtagaaagaccagagagaacctgggaaaagagacatttcgaaaaagtagtatgtaaactggcaccggagagtctgagacagtggtggaatccttaacagaaataaagatgtctagagaataaattgggtttaaagggaaggtaattaatttggtttacagtgtaaggtgatagacagtcagcaggcacttggagaatggtgatgtatgttcagaagtgagataatggaggtgataatcaaaaccctttgttttgatttgagcctttgtgtgggagaaaggatatggcgagaagaacagaagatcaggaagccaatactgtagaccctcattccctagcccctgaaacaaatggatttgacttctctgtcatgacacctggaacaaatgtggcattgcttacttacttcctttgccatgaactcagtgaaggcagggacgggtcttggcttgtgtgtgtgtgtgtgtgtgtgtgtaagagactgggtctcattctgttacccaggcatgagtgccatggcataatcatagctcactgcagcctcaaacgaacctcctccctcaggcctcctgagttgctgggactacaggcatgcaccaatggccctggctttttaaaggccatcatctagcacagtgcctggcttttcaatggaagtctgttgaatgactgactgactgaccgacttggaaaatgaacacatcaacttgagaataagaactttaacttttttcttccttgcatcccctaacatttaatccaatgcctggtccttaataggacccaaataaaattttgatgtgtgaatggtagaagaaaagctaaaattgagtagtcattgtgtcaaagagaaccaggaaacagagaagcttttgagaataagttgaccataacatgtcaaatgcaagtcaaggagaatgaaaactgagggcaggaattagatttaatcaggaggttatttgtagatttgagaacgaaggatttaagaacataatgaggttgttaagggagaatgaaggaattaagatcataatgaggttgttaagtagaggtggaaagtgaggaaatgaaagccaagtacatcttatacaagtttagtagtaatgaggaaaagagaagctcatagagttaaagctctaaaaatctgtttagaacatccgtgtctatttgtaaacaaaggggtatgagggttagggatggaaaaatggaaagtaccagaaggaaatgcataattttaggggaaagatctcaaatgggatcaagaacatgggcagtagccttaaaaaggatgagggaatctcttcctctagtctaaaaagggagaatagaggctctatagaggagagagaggtcatgtcctcttgtcagccatctgctcagagggagcttgggctgctgtgctagaaactgacataggaaactgacaaaggaaggatatgttttctgcacagcactgaggagtgtgatactcctaagcagtagttggcagcctgagataggaatggtggaaccagatggtaagtataatccaggaatcaggatggcactttctgtagattagggagttgtaggctgggggtgtacttttattcactcttctctgattcagaggttttataattttcactaacatcattaaaaacaatattggatgcctactacctgttggtttttattttaatcttgggaaaaaaaagtaaaagctactatcctgaggtttctggttttattggggagatagatcatatatgtaaaaagcaagtttagcaaatggcacatggcattatagactaagtcccaaatcagtagattacataaatgtcagagagattacaattatagcagtacactttgaggttcttttccccttagcttatgaacatttaaattttgtcacttttataaatacatgcctatttgagaggtaagaaaagtaccatgttgctttaatttgcttttctttgttagcaaagatgaattttttcagttgtttatcattattttactttttatgaattgcctattcatagcttttatccatctttccatggttgtgtttgtacttactaatttgtaaatacctcatttaataaggttatttaaccttttgcctgtaacattttgcaaatgttttttctagcttgttttttggggttytttcttttggttggttggttggttggttgkttggttgggttttttttttgagacagatcatcactctgttacccaggctggaatgcagtggtgccatctctgctcactgcaacctccaccttctggggtcaaatgattcttgtgtctcagcctcccaagtagctgggattacaggcgcacgccaccacgcccagctaatttttataatttttgtagagatggggtttcacgatgttggctagggtggtctcaaaactcctgacctcaagtgatttgcctccctcagcctcccaaagtgctgggattacagatgcagccaccatggccagccttttctagtttttttaatttaaacattttctttcagatttcttattttgatttattttcagtttatgatgttttgttgacacataagagtttaaatatcttatgtattagaaactattaaatatttctttttaatatttaggaaggctacctcagcctgagaacagacaaatattttcaaatgttttcttcaaattgttttatagtttattggtacttatttacattccattgtattattgttatttatatacttaaaactttaaaccattttggaatattgcatgaaatagagacctaatttttgctgagtagttcagcagtttctagtactgtttactaaataatctatkaaaattttctgcggattcctaaatgattttgtccaggctggagtacagtggcacaatcatggctcactgcggcatctacctccccaggctcaggtgattgtcccacctcagcctctcaagtagctgggactacagaagtgccactacacccagctaatttttgcatttttttgtagagactatatttcaccatgttgctgagcctggtcttgaactcctgggctcaagcgacctgcccacttcggcctcccaaagtactaggattacaaggcatgagccaccgggtattttttatcatattcccaatacttatgtatacagacttccttgtttataaatctgtatctgtaccattgccacatattattgtattaatataatctcatagtgcaaatacttgttcattatttgttttaaataatgcctagactacactcacctatttgtatatgtgaactttttttaaaacattttattttttaataatttaagactcagaaagctgcagtagtacaggttcccaggtatgcttcacccaagggctttcaattagaacctttttttttttttttttttttgagatggagtctcgctctgtcaccaggctggagtgcagtggcgccatctcagcacactgcaacctctgactccctgattsgagcaattctcctgtctcagcctcccgagtagctggaattacaggcatacgccaccacacccagctaatttttgtatttttagtcaagacggtgtttcgccatgttggtcaggctgatctcaaactcctgacctcaggtgatctgyttgccttagcctcccaaagtgctgggattagagtggtgagccactgtgcccggcccctgaaatcaccttttctgtaatgctactttgttcaataaaaataacatattaatatcctttttaaaaatacatacaatatattgttattaactgtagtcaccatgatgtacaatagatctcttgaacttattcctcctaactgaattttgtgtcctttgttcagtatttccccaattcccctacccaccaacctctagtaaccaccattttactctctatttctatgaattcaactttttacattccacgtgtaagtgagatcatgtgatatttgtctttctatgtctggcttatttcgtttaacataatgtcctccaggtttatccatgttatcacaaatgacagaatttattctttttttaaggctgaatagtgttccattgtgtatgtatgccacattttctttcaccattcatccatcaatgaatgaaaacacttaggttgatttcatatcttagctattgtgaataatgctgcaatgaacatagtagtacagatatctcttcaacatacccatattagttatatcctttagatatatatccaatagggggaattactgaatcatatagtagttctatttaaatttttttttgttttttaattttgtttgtttagagacagggtctcgctgtgtctccaaggctgtagcacagttctgcaatcataactcactgtaagctcaagtgatctacttcagcttcgctactacaggcacatgccactatagtcagctaatttttaaaaattgtttgtagagtccaggtgtggtggctcacgcctgtaatcccagcaatttgggaggcctaggcgggtggatcacctgaagtcaggagtttgacactagcctgactgccatggtaaaaccccatctctactaaaaatacaaaaaaattagccgggcgtggctgtgcatgcctatgatcccagctacttgggaggctgagaggcaggagaatcacttgaacccgggaggcagaggttgcagtaagccaagatctcgccattgcactccagcctgggcgacaagagtgaaaatccaactcaaaaaaaaaaaaaatcgtttgtagagacagggtctcacaatattgaccagtctggtctcaaactcctggcttcaggcagtcttcctgtcttggcctcccaaagtgctgacattatagccatgagcccctgcacccagccttatttttaattttttgaggaacctccatacatgttttccataatggctgtacttatttaccttctcaccttattgtataatggtgcatatctcagaatgtgtccttactgagtgacacataactatatttgaagtaagtttcttatagatagcatatagttgggtcttttcttttctttttttaatagagacagggtcttgctatgttgcccaggctggttttgaactcctgggctcaagcagtatgcctgcctgggcctcccaaagtgttggtattataggcatgagccaccatgcctggcctaggtcttttttttttgagacagggtctcacttttgtcacccaagctggagtgcygtggtgcaatcatggctcactgcagcctcaacctcctaggctcaatcagccctccacctcagcctcctgagtagctgggattacagatgcatgccatcatgcctggctaatttttgttttgtttggggtttttttggtagagacagggttttgccatgttgcccaggctggtctcgaagtcttgggctgaagtgatccacctaccttggtctcccaaagtgctgggattacaagcgtaaaccattacacgtggtctagttgggttcttttttaaaagaatcagttctactaatttcttttcgttggtatgtataaaccatttatatttaatataattattgatactttggatttaaatttgccatttttgtttcattcattatttttgttcttctgtttcccctttcctgttttacagtgggttccttgaacattttttaatatttcattttgagtgtatctctttataaagttttttgtgtgattgctctaggaatatatatgtagataacttattacagtctattaatatcaactttttaccaccttaagtagaatgtagttagttttagtagaaggaatcttttagttccttctacctttcttcttctttttttttttttttgagacggagtcttgctctgtcatcaggttggagtgcagtggcgtgatctcagctcattgcaatctccacctcccgggttcaagccattctcctgcctcagcccctccgagtagctgggattacaggtgcatgccaccacacccagctaatttttgtatttttagtagagatgaggtttcaccatgttggccaggatggtctcgatttcctgacctcgtgatctgccggcctcagcctcccaaagtgctgggattacaggcatgagccattgtgcctggcacaccttccttctttatggtacagttgtcttaaatattacctctacatacaaggagaaccacttcagggactgctataatttttactttcaaccatcaaacataatctttaaaactcaagagaagaattgcttaattagtgtatgtatgtgtgtctgtatatgaataaacatatatatatgcataacatatatatggatatatgcatatatagacacacacacaccctttccattgctttttctttacttctatttgaggttttcttctgttatcatttacttcctttctgatagagtttctttagccattcttttcaaagctgatctgttgrtgacacatttttagttttgttcatctgccagtatttgtatttcatttttatttctgaaggatattttcactgtctatagaattttagcttgatagttattttctttcagcatttgaaaaatattgtatccatccttgtggtttccatggttcctgatgaaaaatctgttgtctttcaaattgttattctcctatgagtgatatgttgtttctctctaattgatttcaggacttttctttagtttttagaagtttgattctgtaagtttatatctaaatctgaggctgagtgtggtggctcatgcccataatcccaacactttgagaggccaaggtaagaggatttcgtgagtccaggagtttgagaccagcctggacaacatagtgagaccccacctctaaaacagatagatagatagttgattttgtttttgttttttcctttttttgagacggagtcttgctgtgtcacccaggctggagggcagtggctcgatcttggttcactacaacctccgcctcctgggttcaagcaattctcctgcgtcagccacccaagtagctgggattacaggcacccgccaccacacccaactcattttttgtatttttagtacagatggggtttcaccatgttggccaagctggtctcgaactcctgacctcaggtgatccccctgcctcagcctcccaaaatgctgggattacagatgcgagccaccgtacccagtagacagtttttagccattatttcttaaatttttttttttcatctctccattcattctcttactcttgggaccctgatagcatgaatgttagatctttgttattatcccacaggactttgaaactgtgttcatttcttttcaatctactttctctcttgtacagactggatgatttccattcatttaagtttactaattgtttcctttatcatttttcttttgctgttgagcccatccagtgggtctttttaatttcagaaattttatttttaaaaattccatttggtactccttatgtcttctatatgctgagtgtttataatgtcttgtttgagcagtttcatgagcgctgttttaaattcttttcaaataattccaaaatctatattatcttggtattgtcatctgttgattgccttttttcattcaagttgagattttcatgttcctggtataatgagtaatgttggattgcatcctagcacttggaatattgtgctatgagattctggttcctgtttaaatttttatatttaacagtcaacctgtttaggtttagaacacataccctgtcccacttttgtcgactgtggttcagttttcagtcttgttttactcttatggtctgtgctaccgaaaggccagtctgaaatttaggtgttattccggagcagtgttcagttcttatgccttttgctgtgttgtttctggtcatttttacacatgggttgctcagaggcacttttaggatttcatacacagattcagagaattcatttctctagctctctcctcaccataatcctttcccaattctgtagttttgctgggattaggactccatctggttattccagggtagagaaagatgagttcacccacattctctgcagctgtaacatggagaagaggggaaaggcgtgccacctcattatggcagagttgtgttggaaggcagaatgctgttcacaatttctgggccacagtgtctggtgaggaaaaggaggggtacctcctccccttttttagtttgcctggtcaaaatgtttttgtctgctgagctgcccctttcccagttctttacctagagagggcaggcttttcttggcactttcttgtctgtgcttactggatctttcagattgtggcttcagagcttgggctaggacatattagaagttaaaccaaaccaaacaaaaaagtagggagcttcctgttgggtcagtcctcatgtcccctggtccctagccaatctaccttcttttttctacttttcagaatttttctgtcacttgtgtcatgaatttcatctagaatgttcggttataatcggtgggaagggctgggcgcggtggctgacgcctacaatcccagcactttgggaggccaaggcgagcggatcacctgaggtgaggagttcgagaccagcctggccaacatggtgaaaccccgtctctactaaaaatacaaaaaaaattagccgggcatggtgggggacgcctgtaatcccagctacttgggaggctcagataggagaatcgtttgaacccaggaggtggaggttgcagtgagctgagatcgcgccactgcgctccagcctgggcaagaagagcaaaactccatctcaaacaaaaacaaaaacaaaaacaaatcagtgggaggaatagggtggaatatgcttactccatcttttcctgaactgtaaatccctgctgcaattttaaattatgaactttagttccagtagttttttttaacctatgtacgtagtctttcaaatacaaataacagttaaggggttttcccccaataattatatcttgttttcttttcttttcttttttttttttttaaagagaccgggtctcgctgtatcgcctaggctggacttgaactcctgtgctcaggcaatcctcctccctcagccttccaagtatctgggactacaggcatatacccccatacctagctgttttcttatcccattatctacttttagaacaaggattggcaaactataatctgtttcccatatccagctcactgcttattttggtatggcagacaagctcagaataggttttccttttttttggagacaggtctcactttgtcactgaggctggagtgcattggtgtaaacacagctcacttcagcctcgacctcccaggctcatgggatcctcctgtctcagagagaaaaagagagagagaaaaaaagaaattatatgaaattcaaatttcagcgttttattagaatatgccatgttcatttgtttatatattgtctgtggctgccttcatggtacgacagcagagttgagtagttgaagcagagacttaattgccagccctttttccagatgatttgtaaatcctagaagtgaaaccattgtccctttcttgtcctgctttagtgatactgatatttcaagatacataattttcttgggtgaaagtttcttttgtttctggtttctaggtatttgtgagatatttctctcacaaaacgtgttcttttcttctgkttttttttkgggggttttttttgtttctttggttttttgagacagtctcgctctgtcacccaggctggagttcagtggcgcgatctcaactcactgcaacctctgcctcctgggttcaagcagttctcctgcctcggcctccctagtagctgggattacaggtgcctgcaatcacgccaggctaatttttgtatttttagtagagatggggtttcaccatgttggccaggctggtcttgaactcctgacctcaggtgatctgccctccttggcctcccaaagtgctgggattacaggcatgagccactacgccttgtctcttttcctctgttatctgacttactggatggcatctgttaggtaaatcagaaaccaaagaggagtagcattcagcactccctgtcaccccaagagcaaatctattatcacaccctgtgcagtttacttcctgaatatctccttccttgtaacacttttgtgtctccaccagtaacttctaactggactgtccacatccagtgctatattctctacacccagctaaatgaagtgttcattccaaaatgcagggcagggaggtcactgtcatgcttctgttcttcaaaggcttcttaatgcttatgggacaaagaaaaatcacccttgtgtggccctaccctgtatacatctccagcttcctggcacctgctcccccttactctttatacttcagacacggtggcttctttcagaccctgctcctgccctttctgaggttacggactggcatggagttccctgccctccttaatgcctccctgattcctgttcatcttctacttgtcagctcaggaatcagtgccttagggaggccttggctgagctccctgactaggtcaaattttcttcttctataggctcttagagtcctataattctcttttccatcacttctcctatttgtctgtgaggtgatttgtttaatgtcagttttctgctactagactgtaagcttcatgaagatagggattctgttagaatttgttcactatttctagtagaaggaacagggcctagcacatagtaaatactgagtaagcgggttatttccccaatgattgcctttttaaagaaaaccagttctgtaaaccagcattcatcaggcttatcatatggctttttatattttgaattatttttgtgaggatttttattaatatgttttccaataatggaccatggttaaatttttgaagtaagccttacttgatcaggttgtggtataattataacatatgctgctttttctttgctaggattttaagattttgcagttaaagttattttcttttttgtgtgctttgtcagattttgacatcagtgttatactagtattttcatggcttattttattccattcttttattttcaacttttctatatccttaagcttaaaaatgtctcttttaaacagcatataattgagggcttttattattaggctttataatttttgtattttaattggaacatttagtttgtttaatatagttaatatattctttgctttctattttcctcaaagatttgaatagaacaaaaggctgacctcccccaarcaagagggaattctctggcagtctgcctttgcacttgaaatgcaactcctccctgaatctccagcctgccagcctcttctattatgagtcaattccttaaaataattctatatgatatatatttaatataattaatatataatgtggctactacctagtagaattaatgtatacttaatatgacatataatataattacagtagtaccttcttatctgggggaagcattatattccaagacccccagtggatgcctaaaaccacagatatatattttcctatacatacatagctgtgataaagtttaatttataaattaggcacagtaaaaaattaacaataactaataataaaatacaatacttataataatatgccagcatgttcctttttctcttttttcttgctttttggattgatagacttttttactatcctagcttttttccctcttgccaagttatagaccctgttcttttagtggttaccctacagattacaacacatagcctgcatgtataggaatgaaatacagtttacgtagggttcagtaccatctgtggtttcaggcatctactgggagtcttggaacatatcccccccmccccccccccagataagggggtagtactgaaattatattaaatatatgcttattatattaaatattagtcatatattacatacatattatatagatttattttaagggattgattcacagtgggggaggctagcaggctggagacccaggaaggaactgcacttcaagttcaagggtagtctgctggagaattccctcttgcgtggggaaggtcagccttttgtgctattcagaccttcagttgtatggatgaagcccacctacattatggagggcaaccttctgtactcaagagtccattgatttaaatgtaaatctcatccaaaaaaacccctcacagaaatatccagaataacctttaaccaaatatctggacactgtggtgtggcccaaccaaattaacaatcacaagtctactctttatcaacttggcacccatacacatctccttaaaccattattaatctccaaataaagacagtaacaaagtcatacttctgcttagcatgaaagaactatcttgcatgtagccgaaaacacactattcctttctctaaaagaggatgcagattatttggttgatgtttactcttcttgatatcctgcaacttaaattctaaagtttaagaaaaagttaatacttaagtattatgatcagctgttaatctaattttttttgacgaaaatattttcgtatccattttctattgctgcctagcaaaacatccccaaatttaatattttaaagcaacaaccatcaaaaattggctcacaattctgtgaatatcaatcaatgctgggtagctgtttggttcctctactggtcttttttttttttttttttttagacagggtctcactctgccacccaggctggagtgcagtggcatgatctcggctcactgtaacctccgcctcccaggctcaagcaattgtcctgtctcaaccttctgagtagctgggattacagacacacaccactaccacctggctaatttttttatttttagtagatatagggtttcaccatgttggccaggctggtctcgaactcctcacctcaaatgatccacctgcctcggcctcccaaagtgctgggattacaggcgtgagccaccatgcctggcccctctgctggtcttgattgaagtcattcatgcaactgtaatcatctaatggttcatctgggactgagattgtctcaagcacatgtctggcagttggtgtcacttgttgattgggcctctctcttaacgtaaggaagtgagccaaagcttctcacattatgacagcagtgttcccatagagccaaatgacagctgtaagttctcttgaggtatcaacttggaagacacaccattacttctgcattttattggtttaagcaagtcacagggccaactcaaattaaaggaatggagaaataaacttcacctgttgataggagtggcagtgtctcactgtaaaaggcatgtgtacaaggatgggattttacgtagccatctttgcaaacagtctaccacagtgtcttttttcctttcgagtgcttaaaaaaattgtttttaaataattatttggttttcagaaatttcactattgtgtatctagacacagatttcctttttatttatctgtttggggggtgtttagggcttcttggatctgtggtttgatgtttttcctcagttttggagaattttcagccttcgtctgttcttcgaatatttcttctgttccatttctccctttccgcttttctgaaactgaaattacatgtaggttagatcatttcattgtatcctttatacctcttaccttctctttggtatttttttataaatctttttgcttctctctgcttcattctakatacttccttttgacctatttaccagctcactaattctctcttcaggtatattttacctgttcttaaatttatccattaagatctttttttcagatctgctattacatttttataccattcttgactaaaattcttaatgctacaggactgttcttcttgtctgtttcttactgattctcatgttgcctttttatggactagacactgtagttttaaaattatttatagaaatgacctgagacctatgatatatttttcaagagaggatttacgtttgtttctagctttgcctaggagtcttcaatcattttaattcagtttcagggactgatttgcttttaagcagggctgtagtccctacaggggtggtcaacttcatttcactacctaatatacctattatgtgtggagtactttgctagatgttgggtaggtcttgtgagcagagcagacctctctttggtctgtatggagcacggagcttgattataattggcaggtgtgtgtgtgtgtgtgtgtgtaaataaataaatatttatttatttatttattataggccgggtacagtggcttacacctgtaatcccagcactttatgaagtcaaggcaggtggatcacttgaggtcaggagtttgaggccagccttgccaacatggtgaaaccctgtctcttctgaaaatacaaaaattagccagacgtggtggcaggtgcctgtaatcccagctactcgagaggctgcggcatgacagtcactcaagcccgggaggtagaggttgcagtgagctgagattgtgccactgtaatccagcctgggtgacagagtgagactccatctcaatatatatatgcgtgtgtgtatatatatatatctatatctttaagatagatatatttatatagctaagtaattaataaatatattaagttctatgaaagcaatgagtaggctgctatggttgtgaatatttggactacacaggggataagaatgggtctaccataattagcagggacaggttttgtttaagccaaaaactaagagggcttagaacagaaaccgccaggcagaagcagttaccagtgtgaagactagatgacaaccaaaaaagtatgtgggaggagggaggggaggttgcgcagtggggagttgagattgacttagaactgtattaatgagctttccccccaacccccatttttctcccatttaccttcagaaaaattagtgatttggctaccagtgaatctaggctccaggtgtagctctgtagttttggactagttacctaattcttcattcacaacaaaacagaaggagagaggaaaaagagagcaaacatggaattgggatgggaagtaagagagcacatgaggagagagactatgtcaagtttcttcgtattccttttttaattacagaagaaaagatgggataaaaatattccatcttatttctctgtttaaaagaaagagtaggccgggcatggtggctcacacctgtaatcccagcactttgggaggctgaggcaggcggatcacaaggtcaggagtttgacaccagcctgaccaacatggtgaaaccccatctctactaaaattacaaaaattagccgggcgtggtggckcatgcctgtaatcccagctacttgggaggctgaggcaggagaatcgcttgaacccgggaggcagaggttgcagtgagccgagatcacgccactgcactccagcctgggcaacagagcgagactccttctcagaaaaaaaaawaataataataataaaataaataaaagaaagagtaaatgaatcaaaatgaagagaagccattttatctgcctcctggatgaagagtttcattgatgaacctgaaatgttttggttaacatgagaaaggagggtgagaagatgcctgagatgtgagctccttgaggacaggagctgctttctctctccagcctggcacaagacaaggaacttagttgaatgaatgagcaaataagtggttctctgctttgaaggaacttggactgtcattaccttgcaaatcaggtttaccagttatttgctttatataagttccagaaagaaactatttcctctcataatattactaccctaaacttctggtctgatctatggattgtagagcttaaatttcctcaaaccccaacagtcagagattgttacaccaagataaatagcatatttctcagcgccttgtattttctgtctttggccacagaccttaggacttaggctgatatttgagaaggaaaaactggaatttagtagaattatacttcctgtatcttaattttccaactcttatataaggtttgctttttctagagagagactaatctggaatgagaatgaattctcatcagtaaaggcaaagctttaagtgggtcatctgactttgcttttgtgctctacattcaccctgctcataaaaggtcctttcatgagttttctaggctttcatcactgccagcgtctccacaggcattgtgaaagtattaaacttcctaccctcccccatgcttgtctcatggactctttcgtagagtgcacagtggactgtgtttagctcagcaggaactctttgcaaacactgaatacatgaacaacccccctggaaagataagagatttcagtattgcttggtgtcatagccgcagaagttagtgtctgccagtatctgatraatatggtgacttgcagcctaatttttgtgaaattatgaggccaaagtttaagaagtgttcatgttaaagttacttatatataaaatttgcctatcgataatttctgtcaataggaggttgatgaatgcttcacataacctagatactcctaattaactgttttttatttctttttttctaggacacatgttcaaagagcataattaactttttaaaagaagctagtaagtactgaaatagttttttaagttttttctacaagaatagaggaagaaaggaaacatggaattctgaagggctacttagcaagctgcttatggcataatctggggtgggggtgcatagtaaaggatttgcattttactgagaccgatacatgtcaagggaatggtatttaaaattagtgatatgtgttgatttttcaaggactatagcccatcaactacaataggctccaaaaaattctggtgaaattagcttcttggagccttccagtttacctactatgttattcccactataaaatattctcaacttttggggttttagccacttaagttttttattttctctaatgtctctagtatctgctttagtttcctgtcaatgctagactctgtggttcagcagttcatccattctcttcccagtactcaacctcgttgcttatagtttcattacattcatctagcaaaaccttaattctgtatgtttgccataccattagtgcttagagcattttttcagaaaagaatcctggaaaaatggatcttatctcacctgggccctcaggactgmtgggctgcctggtgtcagcacttcccgccattttctatagcaccagtattattcttaatactttaaaaaaccaccaggcacggtggctcacgcctggaatcccagcactttgggaggccaaggtgggcggatcacaaggtcaggagatcaagaccatccyggctaacacrgtgaaaccctgtctgtactaaaaatagaaaaaaattagctgggcgtggtggcrkgcacctgtagtcccagctgctggggaggctgaggcaggagaatggcgtgaacccgggaggcggagcttgcagtgagccgagattgcaccactgcactccagcctgggtgacagagcgagactccgtctcaaaaaaaaaaagtaaataaaaataaaaaaccatatcccactatctcccccttctctctttgcctgtgatcttgctgcatacttatggggaaatctttaagatgtcagatttcagttctctcacttttctacaacttctcccacttttgcctttcttatgtaccttcccttccttcccatctgattccttatcagtatttacacatgattagttcttgcctaacctaatagaccctttcttgagtgcaaatcagtggctatttttgctagggtataaaaattacctatctaatcaccttgacaaagttaccctgttatttccaataacttacttcctatggattcttgtagattttcttttttttttttttaatttttttattttcagatgttttctcgctttgtcaccatgcctggcctaaattctcgtaggttttctatgtaaacaatcagattttctgcaagtattagtctcctttctaattgttataattttaatttctttttctttttaaaatttttcgtagagacaaggttttgctatgttgtccagcctggtcttgaactcctgggctcaagcaatcctcccatctcagcctcccaaagtgccattacagtggcatgagccactgtgcctggccaaatttcttttcttgttgcgaaggcagacttttcatacaatactgaatagaagtgatagtagattactttatttctgattttcaaaggaatgctttccgtttctctctgttgaagataattgcgtattgtttttttttttaaatagtaacttttatcaggttaaggaaggtttcttctatttctatttaaaaggattttttaaaatcttgaattcatatgtttttatctaatgcattttctacatcagttgaaatggttgtatgaactcttttaatatgggtgaattatatttatagattttatgttaaaatatccttgtatatcttggataaactcaactggatcatgatttatcttttttatatgctagattcaatttgttgatactttgttatgatttttgaatatatattattgtgtaaaagtgagcctgtgattttctttcttgtaatgtttctgtccagttttggtgcctggttttgctctctccttagaatgagctgggaactagtcactcttgttttctcacctrtaatagcatctgggtccagtgttttttatgtgggacaaatttgaacttgtggtcaacctctttaattgtaagaatattcaggtcttttgttcttcctgggctagttttttattctttttctagagattcgttcatttttcttagttttatttgcctataattgtggataatctgttttttatctgctacttctgtaattatttccacatttgatttataatattaacttgtgggccaggcgtcgtggctcacacctgtaatcccagcactttgggaggccgaggcgggcggatcacgaggtcaagagatcgagaccatcctggccatcatggtgaaaccccgtctctactaaaaatacaaaaaaaaaaattagccgggcgtggtggcaggcacctgtagtcccagctactcagaaggctgaggcaggagaatggcgtgaacccaggaggcggaggttgcagtgagccgagatcgcaccactgcactccagcctgggcgacagagcgagactccatctcaaaaaaaaaaaaaatttacttgtgtcttctctttttacctgtttgttaatttatcaaataactacttttggctttgtttcatttttattatacaataaaatgaaattcttttcattgtatttcttttcattgattattcctataattcttaaacaactttataattgatgtaacaataacctgtacacatttaaagtgtaaaatttattacattttgatccatgtatatagcagggaaatatcaccacaacaagagtgtgaacatataatctctccccaaagttttcttgtgtcttttataatcactgcctcttgcccctgcccactccctcatccttaagcaaccattggtctgttttctgccactatagattagattgtattttctagagttttatacaagtgaaatcatgtagtatagtattaaccatgtgtttgtttgtttgtttgtttctttctttctttcttttttttttagacggagtctcgctttgtcacccaggctaaagtgcagtggggcgatctcggcttactgccagctccgactccggggttcacaccattctcctacctctgcctcccgagtagctgggactccaggcgtgcccgccaccacgcccagctagtttttgtatttttagtagagacggggtttcaccatgttagccaggatggtctcgatctcctgacctcgtgatccgcccacctcagcctcccaaagcgctgggattacaggcaggagccactgcgcccagcaactatgtgtttctgatcctttgtcagggctagccaattcctagagacagtgaataactcactcataatctagctgcctcctttatgtcgctctcataggactttgacacctctctgctacaatccacctgccctgttcatttcaagatcaggtaccaggaaactcgggacatccctatgctgcagaactcactgaaattattcaaactagccagtcctaaacatgcttaccctgccttgcccattccttccgctgaaaccacataaaggctcttgcccatgttttcatcccattccattgacctccttactgaccctagctagtgcttcctcatgtggcccctgcatggcatggtgtgcaccttcctcttcggaactgcgagtaactgtcttgtcagcggcaatcatcttgtgatctgttggcctcatcatatttgaataacaataaaatctgttttaaggctgggcgcggtggctcatgcctgtaatcccagcactttgggaggccaaggcaggcggatcacgaggtcaagagattgaggtgaaaccccctctctactaaaagtagaaaaattagctgggcatggtggtgcgtgcctgtaatcccagctactcaggagactgaggcagggaatctcttgaacccaggaggcagaggttgcggtgagccaagattgcaccacggcactccagcctggtgacagagcgagactccatctcaaaaaaagaaaaaaaaaaaactgtcaaatgatactccaaaatggttgtaccattttatatttgcaacaacaatgtctgagggtactgattgctccatatccttgacagcacttggtatagctgatcttttaattttagtcactttagtgggcatatactggtattttatgttttactttttattttcctaatgattaatagtttgcagcatctttcatgtgcttatttccctttcatatatcttctttgataaaaatatctgttcaaatattttgcccattattttgttggaatacttattttcttactgttgagctttgagagttctttatatatctggataccaatcctttgtcagatatattttttgcaaaattttttcccagcctgtgatttagtttgttattctcatgtcttttaaaaaaaattgtagttaaaatatacacataatacaaaatttaacattttaactctttgtaagtatacagttttgtggtattaagcatagtcacattgttgtgcaaccatcaccgccatccatctctggaactttttcatcctccctgactgaaattctgtacccatttaaacactaacttctcattcccccttactccagcccctggcaaccatcgttctgttttccttctctatgagtttgactgctctaagtacttcatataagtggagtcatacaatattttcattttgtgactggcttattagtataatgtcttcaagtttcatccatgtggtagcatgtgtcagaatttccttcctttttaaggctaacattccatcctatgtatataccacattttatccattcatctgttgatggacatttawgttgcttcctccttttggctattgtgaataatgctgctgtgaatgttgttgtataaatatctgttcgagttcctgctttcaattcttttgagtatgttcccaaaagtagaattgctgggtcatatgttaatactgtatttagttttttgaggaattgccatactgatttctatagtagtggtaccatttacattccaaccagcagtgttcagggttccaatttgttaacattcttgccaacccttgttgttttctggattttttttattttggggttttttattttatttatttattttttttttgaggcagagtctcactctgtcacccaggctgaagtgtagtggcgcaatctcggctcactgcaacctctgccccccgggttcaagcgattctcctgcctcagcctccgagtagctgggactacaggcgcgcgttaccacgcctggctaattttttgtatttttagtagaggtggggtttcactgtgttaatcaggatggtctcgatctccggaccttgtgattcacccgcctcagcctcccgaagtgctgggattacaggcgtgagccactatgcctggccattttttatttttaaacaatagccatcctaatgggtatgaaataggttttttggtgttttgttttttttttttgagacagaatcttgctgtgttgccctggctggagtgtagtgacgtgatctcggctcacctcaacctccgtctcctgggttcaagcacttctcctgcctcagacttccaagtggctgggactacaggcgcccgccaccacacccagctagtttttgtatttttagtagagatggggtttcactgtgttggccaggctggtccacgatccatccaccttggcctcccaaagtgttgggattacaggggtgagccaccatgcacagccagggttttgttttgttttgtttttactatttttttttttttttagagacaagctgtctcccaagctgtagtgcagtggcaccattcgtatctcactgtaacctcaaactcctggacccaagcaatcctcctgcctcagccttccatgtagctwcgtctacaggcatgtgccaccatacccggctaactttttttttttttttttttttgagagttttgctcttgttgcccaggctggagtgcaatggcatgatcttggctcactgcaacctcctcttcctgggttcaagtgattttcctgcctcagcctcctgagtagctgggattacaggcgcccgccaccacgcctggctrattttttktatttttagtagagatggggtttcaccatgttggccaggctgggctcgaactcctgacctcaggtgatccacccaccttgacctcccaaagggctgggattacaggcgtgcgccaccacacctggcccccagctaacttttaaatgtattttgtagagatgaggtctcactgtgttggccaggctggtcttgaacttctgagctcaagtcattctcccacctcggcctcccaaagtgctgggattacaggcatgagccaccacacctggcccctttgcccattttaaaaattaggttgtttttgttgttgttgagttgtaggagctctttgtatattctgcatttcggttccttattggatatgtgattggcatacattttttcccatccatggattgctttttcattctgttatagtatccttgattcacagaagtttttaatattgatgaggtcctgcttagtctgtgttttgttttgttgcttgtgcttttggtgttatatccaagaaatttttgccaaatccaaagtcatgaagctttgccctctgtttccttctgagttttatagttttaggacttaaatttaggttttcgacccatttttagttaatttttgcaagtggtataagggaggggtccagcgttattgtttcacgtgtagatatacagttttctgagtaccatttgatgaaaaggctgtccattgaattgcttttgcaacttttatttgggcatatttatgtgagtctgttactggttctatattttactccattgatctatgtgtctattcctctgctaatactgtcttaaatatggtagctatatagtaagccttaacactgagtagatagatttctcccctttttttgttctttttcaaaattgtcactggtttgtttttattttttactttatgcagataatctgtactatactttggtttcatgtatcaagtagtttgttccaagttgtgctttaagcagaacaaataaattttcatattgttctttgtgttaatctgcaatataaacctataccaaattctattttgtgtatttgtttattgtagtaatctgactgactcttttgcctccagactcatctctttcaaggtccccaactgaatcttgttttaggtggaacttagaagcagtagaagttaagaatctatttcacagccttagtagtctagtttcattctctatataatgttgtctatgcaagtgagctgctctccagtgccttagtttcactaatgttggggaaggtctcttctcttgttttggacttctctatcacattgcctttctcaagagaagacatataatgaaagttgatatctggtgttctaggacttcttcagaagcttgccagtttttcaagctgatttctctcactggcaactcttcagagtgctgttcctactccaccctcccctggtggtatgtatcagttttctactcatcagcacccacctactcctgcctactgtgtttctcagatgtctgctgcctggctagctcattgctgcttttgtcactcatagagctgtcttcttccctttttttggctttctgcctgacttccagggcagctgctctgtcattgcctgtctgccattctgtcttttttccccctaccccccacagatacaacatctactctaataccacacattctccatgttcaaactaacctcatcactttccccaccacattccccaaaactggtcatcctccagcttatagcattgcagttcactgaagttagacatctgggccttgcttacctccaacatctcattagccttcgattctacccctataaatcctcttctcagtctcctttagatattcctgccctgctgtgagatccatctggtttattggctagattacttcagaaagcttcagtcagtgaccctccttacttcaaaccccaccagttgatccttcactctgccatcagtcattgcttctaaaatctaaattgttccatttaaccttgctgtgataaaacctttggtagttcttcagtgtgttcagtggtaagttaaaactttcactgtaatgtacaggccccttcatgatatgatcgctgcctcctcgagcctcattgtgtgcatttccccgccccaccctttcctcacccaccctagtctttcatgtctgccatttttacattcatttagcagatatttattgaagcsccctgtgatgtccttacctaggtctttcttgttgccaggaccagacaggctttttcaagcttccaagtcatctcagtttgaaagactatgtctgacccttgtcttggccaattactctttatccttccaagttcaatgattgtcccactgcactccaaccagagtgagagagcaagaccctgtctcagtaaataaaaataaataaataaataaataaataaatcagccataatttatttaatcatgtctctctcccccattgatagacgttaagggtatttccagtattcttctcttgaaaacaatgctacattgaataaccttgtacatgggtcactttgaaagtatggatatgtatccgtggaataagtttccagaagtggaattgtgtcagaggggttgtgcatttgtaattctgatgaatatttatagattatatgagagtacctgtttactcaaactcttgccaatgcagcattatcaaagttttttatgttcgccagtgtgatagattaaaaaatggtatctcagccaggcgcagtggctcacgcctgtaatcccagcactttgggaggctgaggcgggcagatcacggggtcaggagatcgagaccatcctggccaacacagtgaaaccctgtctctactaaaaatacaaaaaattatccaggcgtggtggcgggcacctgtagtcccagctactcggaaggctgaggcaggagaatggcatgaacctgggaggcggagcttgcactgagccgagatcgcgccacaacattcgagcctgggcgacagagcgagactccgtctcaaataataaaaaaaaaagatggtatctcagcattgatttctttgatcatcagtgaggttgagcatcttttcatagatttaagagaactgtatggttttttgtgagttatgtttcatatcgtttacccattttacttttaggctggaagcagctgttttagtggaatggtggaacaagaagccagattgccatggagagacaactctttctagagatttggctatgaagcagagtagagacaatgatagctgaaggattgatgtagatgcaaagaaatttttcatcttctttgaaaacttaattgtgttaaaaactggtatgaaagggaggggttaaagctagagatggtggtagaaaaaaatgcagggttcctaaaggactgagattcctggatggaatttcagggaaggggaaaatttctggatatagtgactggggagttaagggtgtctagtccaatggcttttattttcttggaagggtaggcaaggccaacagccacatgtgtgggaggagatggttagaggggagaggaggtttgaaggcaccgctatggagaattggagagagctaaggaaagacagaaagactgcagaaagtgcttagggttccactgaagcggaaatagtgatttgtagtgatacaacccttatgagttatttgatttttttttttttttaagcagcatctggcagtccaagtatagggctgacagtttgggatttttctttccatgttggtgtaaaagaagaacagtgtagtgaaggaagttaggacaaaagaatgattgaactgacaccaagttttcttgatttggtagaaaaggaaataaagatagagcagagatattgaaaagaattagagaggggttcaagagactgaaggcctgggtgaggtcagagagcaggtgtggtagacataacagagagaactacaaggatagaaagtgtggttggagagtgggaaggcaagatttattcagtatgggggcttttctgggtgatgacagcatctggagtacagccattgtcgtgagtggcccaagtgtagcagagataaagcgttgttggagtgaaggaagtcaaggaactgagaggctggcctagatggggattttggttgtcatccatgaggatattgaagtcatccaggagaatagcaggcctgggggacaggaaggaaactgagccacttacagtgtcttcagtgataggaaagcacagggcaaaaagctttcaagaacagggactgttaagccgggtacagtggctcacacctataatcctagcattttgggaggccaaggcgggtggatcacttgaggtcaggagttcaagaccagcctggccaacatggtgaaaccccatctctactaaaaaaaaaaaaaaaaaaaaaaaaaagaaatacaaaaattagccaggcatggtggcacgcgcctgtaatcccagctacttgggaggctgaggcaggagaattgcttgaacctaggaggcggaggtggcagtgagcctagatcacaccactgtactccagcctgggcaacagagcgagactgtatcaaaaaaaaaaaaaaaaaaaaagaacagggactgttagagcaggctccaggagaaatgctttgcatatggcattcttgaggagtgaggaggacctcaaccctacttcctgaaatggagctctgagatgttggagtagaaatttggaaaccagagagagaagtaaggatagtgttgttgcaaatgcattgtatatggggggtcgggaagtcacaggagtttgcctcaaagtctttctcggagacggatgaggttttcactgtgattttcctggtcgtggtctatggatatagtacctgttagtgacatggatcttcttaacttctgatgtgtcttttcctccctagtgtacgcataccaattctctccacagcttccatcaccatgcatttgttcttttcccttgttcttgtattacctttctggaaaggaatttttattgtaggctaattgttactcccaccagtatttaaccactggatatttcatatgattgatctcttctgatttggaaaataaaaatgtaatctcattatattcatttgattagtggggacagtcaacacttctttgtgtattttcttagctgttcgtttttctcgtctgtaaattatctgtttaggtccttcagatttttcaaaattggactgttatgttttcagtattgttatgagttcttgtttcaattatttatgacagttcattttcttttttaaaatagactttttttttcttagagaaataagaaaaaataaaaattaaaatagactttgtgttttagagagtttcaggttcacagcaaaattgatcaaaaagtatggagagttccggccaggcgcggtggctcacacctgtaatcccagcactttggaaggccaaggtgggcagatcacaaggtcaggartttaagaccagcctggccaatatgatgaaaccccatgtctactaacaatacacaaattagctgggtgtggtggtgcacacctgtaactgtacctactcaggaggctgaggcagaagaatctcttgaacctgggaggtggaggttacagtgagccacagtcatgcccctgcactccagcctgggcaacagagtgagactccgtcctaaaaaaagaaagaaagaaaatatagagcattcctaaataccacctgtccccaacacctgcacagcctcctcattatccacatcctacaccactgtggtacctttgttgcaattgatggaccaacattgactcctcattatcacccaagctttggtgttgtacattctgtagatttggacaaatgtataatgacatgtgtctaccattgtagtatcatacagaagaatttgactgccctgacagtcctctgctccacctgcttactcctctctcccttttcctaactgcacaaccactgattttttttttttttttttgagacggagtctcactctgtcccccaggccggagtgcagtggcgccatcttgggtcactgcaagctccacctcccgggttcatgccattctcctgcctcagcctcccgagtagctgggactacaggtgcccgccaccacatccggctaattttttgtatttgtagtagagacggggtttcaccatgttagccaggatggtctcgatctcctgacctcgtgatccgcccacctcggcctcccaaagctgggattacaggcatgagccaccacgccctaccttttttttaaaaaacaaggtcttgctctgtcacccaggcctgagtgcagtgatgatcactcctcactgaagcgtcgacctcccaggctcaagtgatcctcccacctcagcctcctaaatagctgagactacacacacacaccaccatgcccagctaagttttgtattttttatagaaatgtggtcttgctgtgttgtccaggctggtcttgaactcctgagctcaagcaatttgcctgccttggcctctcaaggtgttgggattacaggcatgagtcaccgcacctggccttttttattttctttttttttttttaaccagtgatcttttactgtctccatggtttttcacattggyytctgtcacttagtaatatatgtttaagtttcttctaygtattttcatgtttttagcttatttctttttagcagtgagtaatatttcattgtctggatgtgccatsacttatttatccattcgcctgctgaaggatatcttgattgctcccagtcgtggcaattataaataaagttgctgtaaacatccatgtgcaggttttttttaagtggcataagttttcatctcatttggttaaataccaaggagcacaattgctggatcatatggtaagagcttatttatttttttgagagactaccaagctgccttccaaagtggatgtaccattttgcattcccaccagcagtgaatgagagttcctrctgctccatattcttacaaacatgtagtattgtcaaatgttttggattttaaaaccaaaatccattttcatagatgtgtagtggtatccmgttttaatttgcaattacctaatgacttgatgttctgtgtcttttcagatgcttatttgccgtactgtttatcttctttggtgaggtgtctmttcaggtcttttgcccatttttaatctggttgttatttttcttgttgagtttaagaattctctgtcctttgtcagatctatcttttgcaaatattttctcctagtctgtggcttatcctctgattctcttggcattgtctttcacagagtagacattttatattttaatgaagtccagactatcaattatgttctcatggatcatgcctttgatgttatatctaaaaagttctcgccatacccaaagtcatctagattttctcctgttatcttcttggcattttatagtcttatgattgatatttaggtctatgattcatttttagttaaatttttgtgaaagataataaggtctgatatggattaatttttctatatgtagctgtccckttccagtatcatttgttgaaaagactatcttgctccattttattgcctttgctcctttgtcagttgactatatttatgtgggtctgtttatgatctctgttccgttccattgatctgtttgccttttcttttgctaataccacagtcttaattaccatagctttaaagtaagtcttgaagtccaatagcattaatctttgactcttctttaatattgagttgccccttcagaatcttaatgtctctccatgtaaactttagaatcagcatttttatattcacaaaataacttgctgagattatgattgagattgcattgaatctataggcttatttgggaataactgacatcttgacaatattgagtcttcctgtccataaacattatttatgatgggcttcttctttatgtttaggagcttttgttttttctgtcagatattccacttctacctttatgatttcttaattgccttttatgcttagaaagtttttcctcatcctgagctcacatattcatttattttcttttaaaatgtgttttcaagcatttaatttttaaacctatgtggaatttattttggtatatggaatgaggtggtggtctaactccctcctctcaaatatgtagttatttttcccaaaaccattttctattaatttatcaagaatagacatgtatacatatacatatataatagtcagccttccacttgttgtttgacccttgtgaaggaaattgtatgagtttccaattttggattaggctcaggtagtaattgagctgggttctgccagagatccatgttaattcactatccaaacagagttataaaatgtaagttttatgaaaatctaacagtatatcactggtttaatgatcacagcctaggaagaatggggaaattgtcaaaatcttctgtggatgcacctgaaggccactgctgaacccatttccctgctaggcacggctgctggtaccaggggcaaactcctggagtatatatgaaccacctacatctccttctcttccccccctacccttgagattttcatgtgtcccttaaggatgtgtgtcctacttcccttggagagtcactaccacattgaacactttagactgtgagtcctgtgaagatggggctcatgagtgtattgctccccagttgtttctctagcactagctcagtatagggcataaaaatctgaatggatgaacaaaccactattactggtggggacatgctactatcttacatggttcgaggtggaataaaggttgagaacagctatataatgtgttccttgaagggcagcagtacatcagtgcaatcagcctaccttctccatacttctcactctgaaaactgtaaagctgcacctagcaatcaacttgggagctttaaaagggactgctccctagctctcacccacaaagctgtagtctagcacaggtgacttttttaaaaaagttttttggtccagatgtgatgactcacgcctgtaatcccagcacttcgggaggctgaggctgggaggtcacctggggtcaggagtttgagaccagcgtgaccaacatggagaaaccccatctctactaaaaatttgccgggcatggtggcacatgcctctaatctcagctactcgggaggctgaggcaggagaattgcttgaacccgggaggcggaggttgccgtgagccaagatcacaccattgcactccagcccgggcgacagtgcaagactccgtctcaaaaaaaaataaaaaaggagtcctattaagacttatttttacaggttggatatctctaatcccaaaatctgaaatgctccaaaatttgaaactttttgagcgcagacatgatgctcaaaaaaatgctcactgggacattttggatttcaaaatttggattagggactaggtgtgggagctcacacctgtaatcatagcactttgggaagttgaagcaagaggatcagttgaacccaagagtttgagagcagcctagacaacatagtgagacgccgtctctacagaaaattttaaaaattagccaggcatcgtagtacatgcctatagtcccagctactcaggaggctgagacagaaggatcacttgagtccaggaggtagaggctgcactgagctatgatcataaccactgtctccatcctgggcaacagagcaagaccctatctcttaaaaaaaatctgaaacactgctagtcctcaagataagggatagtcagtctttataaagactcaattagttattggatatctgaggaagcatgcatatcaggctcccaaaagatcattggtttaggcacacattttaatagcttgraaatccagaatactcttctggtgaccagctcagacatagtcctgataatataggacctcatctaacatgactccctattttccagataagcatggattcctggttcattcttgttctgctcggcagtggtctgatatgtgtcagtgccaacaatgctaccacaggtaaattgtcatttgataaggctgctatttraaatgaaattttgctttcacatttaatgagccacatttgaaaaccgagatggtatttgaagaaaggaatataaaaattttattcaaagtgatggtaaaataggtgtcttcagaaatcttggaattgaatgctcagcattgtttttcatacatacataactgctttaaataaatcaaagagattatgtgttctttcctgaaaagtaaaataaattgttgacatttacaactctatatatggtttctgaggaactaagtgaakaatcttgtgtctttctcccttaaaccgtagtcctttggaggaggtaggaaaggtccagcatgagataaaaacgtagggggtgggtggtgttgagggggattggtctttgcttggtctccatrtgtttgagagtttattaaggcttgctgctttgtgtctcacagctttttagcctcacattcttcatgtgctatttccttgttttttggtgtttgtagttgcaccttctgtaggaattacaagattaattaactcatcaacggcagaaccagttaaagaagaggccaaaacttcaaatccaacttcttcactaacttctctttctgtggcaccaacattcagcccaaatataactctgggacccacctatttaaccactgtcaattcttcagactctgacaatgggaccacaagaacagcaagcaccaattctataggcattacaatttcaccaaatggaacgtggcttcyagataaccagttcacggatgccagaacagaaccctgggaggggaattccagcaccgcagcaaccactccagaaactttccctccttcaggtactagagatgattctgtttgttcttttgctctttgagtttagtcttccttttattatcttgtttgtgttttctagccttaaaatttcttcaaataagtaaaattgctcaagtgaagtaatgaaacctgtatgtggaatttttgggttagcatgagtgaagaggaaagaagaaagattctggagaatatctttctgctaggtgggatcctggttagattgagaggacttaaatgtgtttaaaggtagagaagaaggcttaaaaagacaagagaaatagaggagctcattgacgatgcaagagactgaagatgaaaagatacagagaatgagtaataagattaggtttggaaagggagggatccgtggagaccatggaaaggagaatgggtattgatgtccatgacagttagatgtgagatacagagaatgagtaataagattaggtttggaaagggagggatccatggagaccatggaaaggagaatggacattgatgtccatgacagttagatatggagtggcaggccagtggccaggggtggcatcaggctctgggaaatggttacattgcagtgccagttgttcagggcctcaggttgaagcagtagtcccaaggagaaaatcagagacgtggatctgagaccagggcaggtaagacaagtttctgacctctttgaaccttaggtaccttgtctgtaaaagaggattagagataccctcaaagggcttctatgaggagtaaaggaaataatcattacctgattgctatgtaactgtcatcccttttctagcaaaaatcactctttcctcttctgtgttcccagttagatggtgagtgcccctaagcagaatcacatctcgctcatgtggaacattcaggaactgtttgctcagttgattctcatttgttactacagatgatatcttttactgcgccttataactcagacccttcacctgccagcttttccccatattttctaccgtaaagacaagacagcatttgcagttaagagcacagtcttcagtgccacactgagtttgaatcccagctcttccataaaccagccatgtttatggcatagctggcttactttatctctctacctcggtttgttcatctgtgaaacaagaatgagtgatagtaatagttcttacctcatagaggagatattaggattaaacaagttaatatgggtaaagcacttataaaggtgcctacacatggtaagcactatttttaagtgtgagctgttagtattgttgtggttattgctctgatagttaccagtaaaatatatgaaggtacctttaatgcagatggcatcccactattcttgatgagataggggactgcagacaaataatgtctgatacttgctttgtgctttagagttaatgtagttttgtcatagttattactgtgtgctaggcatcgtactaagagttttctagaataatcctatgaattaagttctattttatgttttataggtgaaagtattttacaatgatgaaaccataatttgtggaatgtttttcagtgtacaggtcatgacacaattcatgaaatcactttagcaggccaccactagttgtttgttttgttttattttaatggatgatccagttccatgtttattcttttaatgttacatacaattttttgaaattttagtaacaacataaaatgttgggttgtggccattgcttagggagaaaggcaggataacttgtacaaactgtatgagtgaatggaaaaggtggagactgtaacacaggcctgactgactgaacagcccatgttctattgtgtactgtctttcatttaacagttctgtgacatgaccatggataatcatctccttttaacagatgcttgatttcagactgtatatagaggttaaatgatttgttttagatctcaaggctgacaaattaggcctatttctcacttttgcggtctttccactctgcttgtagggaacttagttttccataaactgacttaggtccaaattgtgccacagctaagaatctagttattgtacatttaacacagttcacgtcataggaggctgagactatgtttctctagtggcgtttattcaagatgagtaaaacacaagaaaccattatcgcacatgggaatttcatagtcttaaaccccacatcccacttatcaccaccatttaccagtcctcctgtaacagttacaattttttattaaatcagtatttgatgtatattattgtaattatgaaatattcattgctgagctataagtataaatggattgtttttcttgtacagttttttttctggatttaatacttaccttattttttgtttatttagttttctatttagtcaggccaggcacactggctaacacctgtaatcccagcactttgggaggccaaggtggacagatcacttgagctcaagagtttgagaccagcctggggaacatggtgaaaccccatctctacaaaaaatacaaaaattagctgggcatgggtgcatgtgcttgtagtcccagctactcaggagcctgaggtgggaggattgcttaagcccaggaggttgaggctgcagtgagctgtgttcataccactgcactccagcctgggtgacaaagcgagaccatgtctcaaaaaagttattgctactcaattcttaccatgctctccagagcctctcaaaacagctttctacaaagtgagatctgttagataatctatttcttttttacctctagaaattcctcctgagccctccattgtcttattccagtctaggcttgtcgatctctagggctactacacagatacatcagcctgagatttcccttctctgtcattctgggaattccccttgctgctgcttcctgacttccatattgtcttcctttttgtcttctcatcattcggtagattcctgagaaaaggggtccatgggaggcaaattgcatccttacatatctaaaaatatctttagggctgtgcatagaatttgaggaatatttttcccccagaatttttaaagtaatgccctaactgacacctgtttaccaggtttggaggattttactgctatcttaatccctaattgtttgtatgctttctaggatcttctctttatcatcagtatcctgaaatttcacagagatgtatcttgatgtgggtctttttcgttcattattatggatacttaataggccctttagagccttgatcttgcatttctgaaaattttctcccatttctttgaaaccttctccccctcttcctttttttttkttctcaaattcttaatatttggatattggatgtatcctgaattaattctttaatctttaaaatttttcctttctgttgatctttgctttgagtctttttctccttttaaaaataaacaaaggccagctaggcacagtggcttatatctgtaattccagcactttgggaggctgaagcaggaggatcgcttaagcccgggagtttgagaccagcctaagcatcrcagcaaaacctcatctctacaaatgatttagaaattagcagggcctaatggctcatgcctgtggtcccagctactcagggctgaggcaggaggattacttgaggcctggcagttgaggctgctgcagtgagctgtgatcgcaccaccgtactccagtctgggcaacagagggagacctcatctcaaaaataaataggcctggtgtggtggctcactcctgtaatcccagcactttgggaggccaaggcaggtggatcacttgaagccaggagctcaagaccagcctagccgacatggcaaaaccctctgtctacctactaaaaataaaaaaattagtcaaacgtgttggcatatacttgtaatcccagctacttgggaggctgagacatgagaattgcttgaacctgggaggtggaggttgcagtgagtcaagtccctgcactatagcctggggaacagagtgagacccgagactctatctcaaaaaaaaaaaatcagtgacaagtaaaaaggtagaatacctttttttttttctttgagacagtctcaccctgtcgcccagtctggagtgcaatggcgcagtctcggcatactgcaaactctgccttcagggttcaaacaattctcctgcctcagcctcctgagtagctgggattacacatgcccaccaccacacccagctgttttttgtatttttagtagagacaggtttcaccatgttggccatgctggtctcgaactcctgacctcatgatccacctgccccggcctcccaaagtgctggtattacaggcgtgagccactgcgcccagcctagaataccttttaaaaataaataaataggccgggcgcggcggctcatgcctgtaatcccagcactttgggaggctgaggcgggcagatcacgaggtcaggagatcaagaccctcctggctaacatggtgtaaataaataggccgggcgcggcggctcatgcctgtaatcccagcactttgggaggctgaggcgggcagatcacgaggtcaggagatcaagaccctcctggctaacatggtgaaaccccatctctactaaaaaatacaaaaaaaaattagctgggcgtggtggcaggtgcctgtagtcccagctactctggaggctgaggcaggagaatggcgtgaacccaggaggtggagcttgcagtgagccgagattgcgccactacactccagcctgggcaacagagcaagactctctctctaaataaataataaataaataaataaataactccttttacaaaagcatatatattcattttttccatttataatataaataatagatatgctgagttgatttctgcatattgctttttcagttaccctatcatacttgctctttgttttagtaaagagctgctgtattgaaggatataccttaatctctttatccagtttccccatcagtggacactaagattgttttcagagtactcttataaacaatacagtttgtcatttcagacacatatgagaatattagcaggatgaattattttaagtctgcatttataaatttatggatattgccacatttacctctgctaggaagtctattcctattaacaatatgtcaaagtgcctatttttctaaactctcttcagtgtggtgaattgttaaacttggggatctctgccaatctgacaggtgaaaaataacatctcagtgtaagtttaatttgcattttgctgagattgagcaattttgtgtaatttaaaagatcatttatttttctgagcattctctgttgatattctttacccatttttattagagtgtcaaggttttcctgactcgtttgtagatgttctttgtacgtttgggaaatgagtcctttgcctatggtaaaactgcaaatgttgttccctaggtggtcatctagattttctgcattgcagaagatatcattagctatttttaatttttttaatttaaatatttctcagtttaggttttctaggaattgggtcatatctaggaaggctttccttactccaagattataaaaataattttcttctggacttctatggtttcgtgtgtgtgtgtgtgtgtgtacacgcacttaagtctgtctcgaatttattctgatgcagagtgagctatggatctgtttttccccaaatatctaacttgtcccaataccccttaataatttatttttcctcattgatttgaaatgccacctatcttatatattgaattcagatatttatttacctcttcatatgtatttgagtatttgggaacattcattttattttctattaatctttttctctgtccatgtgcaaagcctcactgtctcaataattgtaactttgtaaagtatttaatatccagtaaaatgagtcattccttgttaattttatttttcagaattttgttagcaattcttattataaacattagaattaacttgtctagcaggaaaaaaagtttgtattgatcatgttaaatacgtagattaacagagaaaatggcatcttacagatgttgagtctaactatccaagaatgcaatatattccattttctgaagtcttttttttttaaatcttctgtttttgtaattataaatggagcattttcttccatcagatcttctaactggctgctgttggggatatgaaggctactgatttttgtagagacattttgtactggccaccttaaactctcttagtattggaagtaattttcttcattaatttttatggcttcaagtcatctcatctgcatatatcttccaaatttttagaactttctttttcttctgtttaatcgcattgatgaatacctccagaacaaagttaagcagctggtaaatgcagacagcattctcttgtatctgacactaaggaggacactttcagtggtttttcattatacgtggtactgactcttgagttgagataaacatattttattgtgttcaggatttaatgagcgtttatgttaggaatgggtgttaaattttgccagttgcctgttcaggatcaatgagaaagatctgaatgattttttttctcttttggtctgtttctatggtggattctattcctaggtttgtttgtttgtttgtttattttgagatggagtctgttaccaggctggagtgcagtggcgccatctcagctcactgcaacctccacctcgcgggttcaagtgattcccctgcctcagcctccgagtagctgggactacaggcacgcaccaccatgcccggctaattttttgtattttagtagagacgtggtttcaccatgttggccaacctggtctcgaactcctgaccccatgatcctgcctcagcctcccaaagtgctgggattataggtgtgagccactgcgccctgccagtttttatttattcattttttagagacagggtcttgctctgaattaattctttaatcttcttaatttttcttttctgttgacctttgctttgctttaagtcttttcctttgagtcatccaggctgaagtacagtggcacgatcatggctcactgtaaccttgaactcccagacttaagcaaaccccacctcagacttctgagtagctaaggactataggcgcatgtcaccacgcccagctaatttttaaattttctcagaaacagggactcactgtgttgcccagactggtcatgaactcctggcctcaagcagtcctcagccttagccttccaaagcactgggattataggcatgagccaaggccgcccaaacatattgtatcgttcctgtaacaagctgttgcagtctatttgatattatttcttatttttttcatttagaattttctctgtctagatattctcaaattatctctaaatgagattgatctatgtttttcctttgtgtgtgtattctttttgataagttttagtttttagtgttttgttttgctacatggaaaggatttgaaagtttacactaaaaaatatgctttttttttttaagacaggctttttcactgttgcctagtgctggagtgcagtggcatgatctcggctcattgcggcctgcacctcctgggctcaggtgatcctctcacctcagcctcccaagtagctgggattacaggtgtgttccaccatgcccagctaattttttgtatttttktgtagagatggggtttcgccatgttgcccaggctggtcttgaactcctgggctcacatgattctcctgtcttagcctcccaaagtgctaggattacaggtgtgagccaccacatctggccatttcattcatgttttcaaatgtatttgaatgaggaaaagttctcccttgtgattatttattataatagcctacagagctattaatttttaaattttgtttactttatgtctcctttttttttttgtttaggctgaataaccatttatttcataggtttattgccttttttcttccaaagaacttgctattgtgcatttatagtccttttatgtttacgttttctatttcattgatttttactttctaccttctttagatttattttgttctttttctatcttcttgaattgagtgtgctttaattgcattctttccagttaattaacatatttagtgctgtgaattttgaacaagcacagctttagccacatcccataggtgtttctataggcagttgtattaggatgcgctataagctgctctgacaaagataccaaaattcagtgacttaaataagaccaaagtgtctttctctccccagttacattccagaggtagacagggccttcgtctcagtagggaccaaattcctttcctcttgtggccctgccatcctaacaatattgcccttatctgtttggttagagatagttctcaccattgggttctagttccaaccactgcgaaggacaaacaaagggaataggggccatttctcttccaaaagatgtgacctggaagttactcacattgctttagctcacatcccgttggctagaattcatcacatgaccacacctagcacaaaggagtctcaaatatagtctgccaggagagcttggtgctcagctaaaaaacaaaggttctgtatcaaggcaagaagagaaagagactgatctgaggggaggagagttggcaggttctgtcacaaaacttctcgtcattgttatttttaaggtatttttccattttgggttttttgtttgtctgatttttttttttttttttgagatggagtctcgctctgttgcccaggctggagtgcagtggcgtgatctctgctcaccgcaagctctgcctcctggttcacgccattctcctgcctcagcctcccaagtagctgggactacaggcgtacaccaccacgcctggctaattttttttttgtatttttattagagacagggtttcactgtgttacccaggatggtctcattctcctgactttgtgatctgcccacttcggcctcccaaagtgttaggattacaggcgtgagccaccgcgcccggccgtctgtttgatttttgagatggaatctcactctgccccccttctggagtacagtggtgtgatcttgggtcactgcaacctctaccctcccaggtttaagcaattcttgtgcctcagcctcccaaagtgctgggattaaagacrtgagccactgtgcccagcccattttggttttgatttttttttttctttgaaatagagtctcgctctgttacctaggctggagtacagtggcatgatctcggctcactgcaacctccccctcctgggttcaagtgattctcgtgcctcagcctcccaagtagctgggattataggcacccaccaccacgcccagctaatttgttttgtatttttagtagagacggggttttaccatgttggccaggctggtctcgaactcctgacctcaggtgatccrctgcacccggcctcattttggttttgatttttattttcaaatgttttcttactttgtcaatttctaattttattgcattgggacaaaagaatattgtactctttctactgttggggtttataagggctgtggatatttcactcgcctttgaaaagaaggttttctctgttagtctgtagagtttggtatgtaccaattagattttattacttatcattttggtcttttgtatccttacttaattttgtcctcttgaattttaatggagcaaaagacataaagtcctctaataacatgcgttctgtttgcattctcatactttttatgaatattgatgctgcactatttgtgtacccagggagaaggccagaccactgtccaaagtttagtgaatctgggcagccttgtttcccagttgttggaggatgcctcatggaggaaagcattcctaatcctggagcttgttttgttgtactctaattgaattgtaatgtgtttctttaacctgaatgaatgtttctattttttacttattacacaggtaattctgactcgaaggacagaagaggtgagctgctcaccttatatctgttgttccttttacacagtgtacagtattcatttatttcctctgctcacagtctgtggtaaccgtgtgcatctgtggctgtgttgtttgtttactttcccttaagttatttccatgttaatctcatggagaagagcaatagaaacaagtactgtattcagtatgttttttaatayagactatggattctaacagctatgatgtattttaacaagtaacaaaatatatcttactttgacatgtcactttgttaacattactttttggtgatattaggtcataatttctataccattagttacttctgatttctaggccacagttccctttaaatattctttgtgttgtttttcccctagtgtataaaatgtcaaccctttgtggctttatatggattttatggattttcagcccttaaatgtaaagtctctatggcctgagatgttgtgtctgtggtttaagctggactgctgagtccctggtcactagagagtagggggacatgggtacttgtctgcagaagtgtggcacattttgcctagaatgacagtaaggctgctatcaaagagcatgagagaaagagaaagagatcatctaacattctaagaagtgattattacatttgagttttaaaaatgttactattcgaagcagtgtttttatcataattttctattttatcaaatcagacttgagttttttttctgattctgttatttaaccatacacaattttccctgtgtaattaagtaatggaacacttggaggcatatgaagtcccactaagtagggagcatttgagtcagaaaagtgggtactctcttcctttatgtgatgtccatctgccattgtatttggtaaggaatagtgaggtgttaccatactgtgtacagatttccctcacttttccacctctcactttcctaaacttgggaactaaacattggattaatacagtgtctttgctgttcagattcacttgccagattttatcaaatgtagacttaaataggttttattgtgatagatatttacttgctccctaaaactgctctcttaaccagccttacaataaagtcaaaagtcaaagtggtaggcttcaagatgaaacataagatctgttgactccttcctctatttagtatatattttcataatattcagccttttcttgccccagatatcatatctattttacctacccaatatttaagtagtttccatgttgtgattaagaaaacaaaattaccataattacctagattattgctaattgtgacatatgtaaagtctattaatgtaataaatctcctttcttaagtcaaaaaataattttgtgtaattccaaacaggaaactgaaaaggcataggtattctcagcagtctctaaagtcccaaaatctaatggcaattttaccagagcagatctttagaagtattgctataaatttggatatcccattctaattttaagccaaatgctttttgagaaataagccagctgtttggaaatgcttgtattataatcggtttgataagcagttatgtcttatgcagatgaattaggggctacctgtttttatgcactggtctttggggtgcttttgaacagtagtgtctgatgttttaattgtcaaagcaaaaagaaatgagagggagggcaacttttcttcctcttctgaagtccaggaaactggttattttctcatgcatattattttaaaatatattccagccaggtgcagtggctcacgcctgtaatcccagcactttgggaggccaaggcgggtggatcacaaggtcaggagttcaagaccagcctgaccaatatgataaaaccccatctctactaaaaatacaaaaattagccgggcgtggtggtgtgcgcctgtaatcccagctactcgggaggctgagtcaggagaattgcttgaacctgggaggcagaggttgcagtgagccaagatcgcgctcttggctgcgatccagactgcactccagcctgggtgacagagcaagactctgtctcaaaaaaaaaaaaaaaaatcagactcttaatatttgtaaagaagtagtccttgagctactacttaagtctagaaagagttgatattcttgttttaagagtgttagggcactttgggaggctgaggcaggtggatcacttgagcccaggagttccagaccagcctgagcaatatggggaaaccttgtctctactaaaaatacaaaaattaaccaggcatgtggtacgtacctgtagtcccagccacttgggacgctgaggtgggaggatcacctgagcccaggaaatggaggttgcagtgagccaagattgcgtgactgtactctagcctgggcaacagagcaagactctgtctcaaaaaaaaaaagggcggggattatcatagtgccattattattatgagtttatgatggctttctctaagcaccttttacattcggcatttattcagtacctattaagcatcaaggagtccagaaaaaattttatatataaatatatataaaatatgtaaatatatatatgcatatgcttccctatctcaggaaggaaatatgtgaacatcaggaaccgaagtctactcagttacatgccattggatatatcacacaaagtgctgagggaactcagaaggctcattatatctggggagtgggaaggaggcacagagatgtgctttgggaagtttaaattaaaatagcaaatggggaaaatgaagacacaccagacagggcacaagcaaagagacatgaaagagtaagtcatgtgtttgaggatctgtgcgcagttgacatgtgtgaggtgtggggagtgatcagaggtggcctcaacagaatgggtgtggtggtccactgagttcaggagttggagcatctcctgaagatgatggtgagtaaggaagtaacatagtcagattttggttttagaaagatattccagaggacttaggggagatagatggacaatagaaatttaggtttctgaataatttggctcaaaacaacggtgattgggctcaacccagtggttagattctagaggcaatccaatgaatattgctgtttttagagccaataggaaacatttaaaacaacattacaaccttgcctttgagagctgataaatacttgtaccaaaaagtgtggcaataggtaaatgggccataggaactggggctataggactatggctattcctttactgactagtttgtagttgaccagtgtgtgtctgaagtccttaagtcactcacctgtttagaggtgagcccttcaattaatatggccctttgttttcaaggaaagaagttatagcaagtaggtatctgttgtcccgggacaccattttagtggttttcattttcrtgcttgctccctggcctgaatctagaaagtaaaactttgctggaatgaagttggggttgaaacagtttcggtttgtaaccatactgtctctgtctcatctactcagctctgcctttgtaatgtaaaagcagccatagatggtatgtaaatgaatgaacatggccatgttctgatagcattttatttacaaaaacaggcagtgggctaaatttgggctatagtttgccracccctcttctaggcaaagaactgcctgagcgtaggaagctggactgaggttctctgctagtgtgtgaacttgtggatgccaaagccaatctcttcccttcatgtcagacactttgcaaatgttacctcttttagatctcccattaactctaaaaggtggagggtgctattatgcttccatttcatacattgttctaagagattatcacactactagtaagttaggatagtaggaatttgaacttcaggtctgtcagaccctaaaaccccatgccctggaaatggttttctaaggctggcctgtggttcgttggttgatttcaattagaatttaagaattttttcagaatacatctaggtgtaaagatttttttgtcaayattactccacaaactagattatttcttttggcctgataactcaggaactttcttgtattacttctctcccttcttactggtttcttctttggactctcctgttgcacaggtattggatctcctggacctatccagttcctttcttttctatgctgtcatatttttcatctcttattgctctgtgttctgggagcttccaggacagttgctctttcacacaactaatttggttttcagttatatcagttctcctrtttagcctttctttttttggaggcagggctggggcagactcatgctctgtcgcccaggctggagtgcagtggcctgatcacagctcactgcagccttgacctctgggactcaagcgatcctccagcctcagcctcccgggtagctgggactataggcatatgccaccatgcccagctaatcaggtgtttgtttgtttgtttggtagagacagactaccagagtctcgctaagttgcccaggctggtctcaaactcctggcctcaagcagtcctcccaccctggcctcccaaagtgttgggcttacaggcatgagccaccgtgcccggccctgttaagcctttctatctagattttttccctcctaatcatgttggtgtttttttgtttgttttcatttttgttttgttttgttttgagacggagttttgctcttgttgcccaagctggtgtgcaatggcacgatctcggttcaccgcaacctctgccttccaggttcaaacgattctcctgcctcagcccccagagtagctgggattacaggcatgtgccaccacacctggctaattttgtatttttagtagagatggggtttctctatgttggtcaggctgctcttaaactaccaacctcaggtgatctgcctgcctcggcctcccaaagtgttgggattacaggcgtgagccaccatgcccggccagtttttaaagaactccttcttactactcagattactcctttttaaatagtggcttttaaaaaatatcaatgtaggctgggcacagtggctcacacctataatcccagcactttgggaggctgaggcaggctgatcacctgaggtcaggagttcaagaccaggctggccaacatagtgaaaccctgtctctactaaaaatacaaaacttagccaggcctgcagttccagctactagggaggctaaggtgtgaggatcgctcgaaccaggaggccgttgcagtgaaccaagatcacgccagtgcacttcagcctgggtgacggagtgagactccgtctcgagaaaagaaaaaaaaacgcaatgcagcagtggctcacgcacataatcatagcattttgggaggccaaggcaagaagatcacttgagaccaagagttcaagaccagcctgggcaacaacaagaccccctccccccatctctacaaaaaatttaagaaaaaaaatttttttaaatcaatatggcatcctgttgcacaaattgcagtatattttgaaagatttattctgtttcttttgtcacctccatttcccagggctactgttgctctgtttgagctatgccctggaccattgagtggcttagactgtgctcacaataggtgtcccttcatcccttcagaagacaaacatggacatacgtcctaaaccaggaaggggttcagtgatggctcaggaaaatcggggcagggtgcagttatcctctaggcgagctgccgttttctttttcctttcctctcttgtggttgcctagaattagcttgggcactactatggtttttttctgtctgcaggccccaggagaccttctgtggacccaatatacttaacaatcatatgcagtgtagacctgctctggtgtcaattctaaccaaaacaaaaaaaaagcatttatgagacactcagggaaattcaagcagtaactgaataatattagatgatactaaggaattagtgttactttttaaattggataatagtattatgtttatgttaagaatcttgatctcttggtgatacatacctaagtaattgcatttgaaatgctaggtctcggatttgccttaaaagaattcagttagaatggcgtgrgtatagaccagtggttccttactgggggctatttcccccacaaaggcatttagcaatgcttggagatacttttggtcatcaaaattgggaatttgctacwgacatctaataattagaggctagggatattgttaaatgtcctacagtgcacatgacagacccacataacagagaattgtatagcccaaaatgtcattagtgtgacgttgagaaaatatatatgcagcatatgttttgtaaaaaagaagcccttaccagtctctgtgacaaactctctactctgtgtagagcactgtttttccagctgagtctagatgggaagccccrcttgtcatttgggctgtgggtgtactggtgctgggttggcaggcctttgcttaagtaccatcctggtacctcaaggtccactttcaaccccagtcccaattccctctgagcttgaggtgtttccaggcccaaactggtagaactagtacttagttttcagctggaggctctttggctctgtttgatctcttggacatcgagtctggtctgttttgtcttccagaaatctctcaaagattctgatctacatatgccaccgtttgctgcctttcagatatgctgttgattcattagtatttttatatttcttctaccatgtcagtgtgctttgggggaagatgaagtaaattcatggatttagcccagtgtcttaagccaaaggtgcctaattactttcttcttcttctttttttttttttttttgaggcagagtctcgctccgtcacccaggctggagtgcagtggcacgatcttggctcactgmaacctccgcctcctgggtacaagcgattctcctgcctcagcctcctgagtagctgggaccagaggggtgtgccaccacacccgctaattttgtatttttagyagagacggggtttcaccatattggccaggctggtcttgaactcctgaccttgtgatccacccgcctcggcctcccaaagtgctgggatgtgcctaattactttcttataatacctgatatactgccccctgttgttggaatttaacaaagacatttagtgataaattactatttttttttgttctttggctcaacgtaatccattgtttgttttgtgcctgttatgtgtgagaccctgtgctaggttttaggtgtacagtgagaatgaagcagacatgtaatccttgctcttgtggaatttatgctataaaggagggatattcattaatcaacaaagtcaaatatgtaattataaagtgtgagaggtattatcaaggaaaataataaggtccttgccttacaaaaatagtataggaaataacagcaawtttttttttttttttgagacagagtctcgctctattgcccaggctgaagtgcagtggcgcaatctcggctcactacaacctctgccccccaggttcaagcgattctcctgcctcagcctcctaagtagctgagattacaggcatgtgccaccacacctggctaattttttttgtatttttagtagagatggggtttcaccatgttggccaagctggtctcgaattcttgacctcatgatctgcccacctcggcttcccaaagtgctgggattgcaggcgtgagccactgtgcctggccgtaacagctaaaatgaagtacacactgtgtgctagttactgtgccaacaactttacatgaaagatctcatttaatacgcagaataacttatttcagaaatgaggaaactgagacttatgatcctaatttagtattaggaagtcagagaagacctgtgtgggaaaagtgacacacagagaaccagacaagtaggagataaccaggcaaagaacagagagaggctgtgtaaagcagaaggaataacatgctcaaaggcctgaggatgaatgaatgaaagcatggaaggacaccagtggctgaaattgagtgagcaaggaaagagtgcaagagatagggcaggtaggggctaaatcgagggggttgttagagtccaggataaggagattagatttcattctgaggcatgagaaactgttggagggttttacctaagagtgggacacaacctgagttgctttcctagagatcactctgctttgtggagaatggattggcaggggcagaggcttactgtgatccaggtgagagaggatggaggttgggactacactggtggcaataaaaaaaatgcaaaaaaaaaaaaaaaaaaggcagacagatttgaagttttagatatatctccaaaatatattatttgcagctgtgctagatatagaagataagtgtgaggaagaaatcaagggggtttccacatttcttacttgagcaacagggtgggttggagtactagctactgaatggtgagggaaaggttttaaacacagaaagcttgtgttgcctatgaaatttaaagtggaggtggcaaataggcagttgagaatctggaactcagaaaagaggtctgatcaagcaaagcamctgtgggaattgctagcatggcatttatatttacagtcatctctctgatcagattaactagatatagagaagagtgccaaggacagagccctgaggaattcccacatttagagatctggtgttggaagaggaacagatagtgagggaaactgagatgggcagacgagatagaaggaaaatcagaggagtgtttcgttgtggaaagctaagagaggaaagtgcttcagagaggaaggagtgatcagccagtctgaacactcattttaaggygagagccacataccacagtatgtttgaaacttaccattaacaaagaagcgtcatgtaatgtcttccatctctaaaaacraaaccaaaaaaaacccatctgtccacctcactcacatctccctccatctgtcattcctttcctctgcatcccttartgttaaaagtccccacgaaaggacccagtgtctcactgtcctttttctatctttatttcactccatttaggctttctcacccatattcaactgaaaatactcttggaaaggtcaccagtagccaccgtcttgtcaaatctggtttcacttctctgtctcatccttcttaagtctgtaggcagtatttgattgaattgattgctccctccttgaaaaactctgctcttggcttctatgacactacattcttagattaacctctcacctcatggctactgcttatgggtcagtttagcttttaacagaatgtaaatccagttatatatctcctctgttcaaagcccttcgatgacatagtgtttctcatcacactcagaattaaatccacaatcattacaatggactcccaagtcctaagtctgctggcttttgcccacctctctggcatcttatattgaactggcctttgtgctgtttcttgaacctgccaagctcctgagagctaccatgcttgctgttcccagtgtctagaaagctcttcacccagatctttgcgtggttcacttcacgttatttagagctctgcttgtatattacttcctcagagagaccttcccagaccactgtatcactgctccccaacctgtcactttctctctccccaccctgctttttattcctcatagcacttgtccctgtctaaaattaagtattgacttgtttataaacagtgtcttccttcctccccacagaatggaagctttctatcacttgtctccttgaacacttctctgttcctagtgtctcaaacaatggcatgcaattgctggcccacagatatttgaatgaatgctgctaaaaggttgaatcagatgaggatgggaatgttcctgttggatttggcaatatgccatttgttggtgttctggctgagcagtttaaacagagcactgagggtgggagtcagggcaaatagattaaggagaacctgaaggtaaggaattagacaagacgaattagacaactgtgtttcggaaagtcagctgagaagagagacgcgaggctggtggtagctgggggagggtaaatgaggtcaagaagacaagtctttgagttgacagcagtggatgtaatccagagcacacatgacaggatggaagagacttgtcttcccttttagcaggtaggaaaatggtgaagatagttaccaagccactctgatggtgtagttcatggagtcgggtggagggtgagagtggaggcggatgagtcagtgcctggccagctgcatgagaaaacaaggctaggtattgggtgaaagggagccaggccctgtggaatgaggtgggattgccatgtcttcaaaccagatgttgccatggttggggtcctggcaaaaggtgactaagggagcagggtgtggaaagaggaaaaaagaagcaaccagcagttttgttacatggtggctgaggatctaataatgtctccttgttttattttatttttatttagctggtctcaaattcctggcctcaagcaatccttctacctcagcctcccaaagtgctgggataggcatgagccgccacacccagctgtctccttgtttgtttgtttgtttgtttgtttgtttgtttgtttgtttgttttgagacagggtcttgctctgttgcccagggtggagtgtagtgtacaggcccggctcactgtaatctccatctcctaagctccagtgatcctcctacctcagcctcctgagtagctgggactataggcgcacatcaccacaccggctatttttttaatttttagtagagatggagttttaccctgttgccaggctggtctcgaataccttggctcaagcaatccacccgctttgtcctcctaaaatgctaggattacaggcatgagccattgtgccctacttgtctccttgttttaattaggaacagtattctctgtgcccggaaaccatttgggtttatgataggaaaactgtctttttcccttcctctcccatcttcctctagatggaacccattgaggctgagagagtgtacagtgttggccctgcatacctaacttgccatcagaattgaatgtgttcatgcctccagatattccagtgctttttatgtgctaagtactgttttaggctcaaaggatatagcagtgagtaaaacaaagtgtctgcctttaaacagcttttattctaatgcagggagacagagtaaataaatgtatgatagtcagagatggggtgagcatgtcatcytgggccccatgctctctccccacctcacctcaatagccctggcatggcagtgggaggtgcacactcatactttcttctctgtttccatttcctggcatctgcagaaggactgaatgagctcttcctcttcagggtgttgccctgaatggctgacttaagccctccattgcacaacacagtaatgacttgttctgttgtcttgatttcagatgagacaccaattattgcggtgatggtggccctgtcctctctgctagtgatcgtgtttattatcatagttttgtacatgttaaggtgagcctactaacacttcacattctcttagattctgtttcaatatcccagtgtcccaatgaacccacacagtccagtagacagtaggatatacacaatgaataggatagagggggaatgacccatgatagtgctaaaattgaagttctacttagaaattatttaaaagctctacatagtcttccttaagtcctaagccctccctctttcttccatctgtccaagcccagtctcccaactccagtgcaagctaaagcccagaatggtagtttggaggttgaggtaagaaaccgcagtttgttattagtgacaggtgttacaggatctctaggtctagccctgctgaagcaacccctaaaagggccccagtaagattacatgctcaacaaaagcctactgtatttctggctggggctttgtccccagacccttctgggacccctggccctggcatgttgagttgagccatgtgagttgtgagttacaggatccctctttctaaccttctttcagggtcctctagacgttaccactcaagcagaagcaaggaaggggaacccaagggagagaagagggtggtgcatttattctcttcctgctaaagctactgccctgactaattggatttagccctgccttatctttggcctaaccaaagatgttctgtgctccctctgttcttctgcagggataaagagagaggaatcatgtgccccctataatttgtcatgtgtctctatcattctgcaggagacttgtggccaggactgtgtccacccaatccaaagctctgggcttctccctgggtctcccaggctacactgaggaaataccaagatttttgtttgatatatattgtctgtctcccccagctgtattccacccactcaccctctctctacctggtgtggctgtgctctgcagtgagccacatgagcctgaatatactgttggggttccctggttggattccagtgtgccaagggtaaacaggagtatcccgaggtactcggtcaccccagcatgctgctgcctcagggtgtgcatgacctgtctctaaaaaagcccgattatttttaaaggcgatttagaaaggctgaattgatgagcaggaatacagaggtgtgatttgcctctcccacctctgtgctccattcttcactgtgatcattttctcattaggtttaagaaatacaagcaagctgggagccattccaattctttccgcttatccaacggccgcactgaggatgtgggtaaggcattccttaatgtcatggggaaccttcacaaggaaggaaatcaagaaattaggagtttctccatccttttaaaagaataagacaataaaaagaggaaaaaagatttttgaagaaaacagtcctagttcttacaggcttggtccatgaggtagaaccccgtttagcctccagaagagggrctaggttctcagggtacctgactgaccttctcccttgtgtactgcagagccccagagtgtgccacttctggccagatcsccaagcaccaacaggaaatacccacccctgcccgtggacaagctggaagaggaaattaaccggagratggcagacgacaataagctcttcagggaggaattcaacgtgagtactttgttgaggctggtgtatcagcagggaagaaggcagacctaaagtcagacctttcagatctttggagtcatgaagtaaaaaatgggcttttaatgtttaagaggtgagaaatgttttaccaagtttatctgactccctgtatgatcatggataggaaatgaagtgagatttgcctcacctccctaatctacccatccattcagtcatcatcacatctcttacttcttttgtttaataaatacttagcaagcatctaatatttgtcaggtaatattctagttgccagtgatatgatgaggagcagaaacagatccaatccctattctcaaggaactcactgtccaggagggaaacctcacaaacaagaacaaatataactgtgtaagttcaaacagcagtacagcacatgaaggactggtgcatatttgtaggcatccatattaagaggttgcctttttgagtctagagcaggggtgtcagtgtttaaagtagacagtgggatagatcagtgtgggaaatgacgaccatgggagactgcagagcacaggtctcatcttgagtatttagattcacattttttataattcccacaaggaagcagaatatgtttttaatccaccagttggtgatcctagcctaccagttctgatcccagatcagaagagcttctggccagcacggtgactcacgcctgtaatcccaacactttgggaggctgaggcgggcacatcacgaggtcaagagatagagaccatcctggctgacttggtgaaaccctgtctctactaaaaatacaaaaattagctgggcgtggtggcatgtgcctgtagtcccagctactcaggaggctgaggcaggagaatcgcttgaacccaggaggcggaggttgcagtgagccaaggtcacgccactgcactctgacctggcgacagagcgagactccatctcaaaaaaacaagagcttcctcgaataaatgatattttaattgatacctaatcataggcaagggtggtggggacaggggattggggagccttccagccactggaaatagcaggagaattgtcaggagtgagtgtgctgaaggagggcacacccagaacatgacagggctgtgtgcagctgaagaccagagcttcaaaggaggataagaggtgaaactagtgtggccagaccacagaccttgcagatagtcatgagaraagtggcaagccatagagcagccagatttacatcttgaaaaaatgactcagctgggcrcggtggctcacgcctgtaatcccagcactttgggaggccaaggcgggcggatcacaaggtcaggagatcgagaccatcctggctaacacrgtgaaaccctgtctctactaaaaatacaaaaaattagctgggcatggtggtgggcacctatagttgcagctactctggaggctgaggcaggagaatggtcagaacccgggaggcggagcttgcagtgagccgagatcatgctactgcactgcagcctgggcaacagagggagaccccatctcaaaaaaaagaaaaaatgactctggcttctgtaaggagaatagcccatgggcagaccagaatagttgcgggaatacagttaggggttacaggtgttaatatcagaagtgctagtagattgacctaatgtcatgactaggaaatgggggatggatttaaggacacagaggagcagttccagagttggtaaatacatcagctggggcattgctaaaccatcagtttccttcacaactttccactaagccatgtgtcagctttgccttataggctggctccttttttatcagtgggaaaaattttcccaaaagcttctggagacttctcttgtcacatgctccttcttaaaccggtcgtgagcaagggagaaaataaggttactgtggttggctgagactagtccagattactcctgggtcaaggccaggcatgctagctcacacctataatcccaacactttgagaggctgaggcaggcagattgccttgatcacaggagttcgaaaccagcctgagcaacatggtgaaaccccatctctacaacaacaacaacaacaaaatacaaaaattagctgagcatagtggtacatgcctgcagtctcagctacttgggagatgaggtgggagtatcgcttgagcctgcggggtggaggttgcagtgagtcagattcactccactgcaccccagcctggacaacagagccagatcctgtctcaagaaaaaattttttttagatattcatgtgggatatggatggataacctcacagaataggaggtctggtaaaggaggaatggttattgggtcagtgggtcaccattcatatctgctccatgacagaagggcttagggggagtggtgagtgatgtcagatttgcattttgagaaaataactaactacaatatagagaatagataaaagggagaggcaagagttgaagtgggagaccatttaccaggcaagagttaacagaatagcttggaccctttttgggggctattggaaaaatagcaccatttaatgttcattattgattgataagatttaccacatcctgccaggcacagtggctcacacctgtaatcccagcactttgggaggccaagccaggcagatcacctgaagccaggagttcaagactagcctggctaacatggggcaatcccatcccatctctactaaaaatacaaaaattagccaggcgtggtggcacgtgcctgtaatcccagctacttggaagtctgaggctgaggcaggagaattgcttgaacctgggaggcggaggttgcagtgagccaaggtcgtgccattgcactccagcctgggcgacaagagtgaaactccatctcaaaaaaaaaaaaaaaaaatttaccacatctcacaagacagcactccagcctcagtaccatagctggatctgtgctaggcattgtactgttttgtaatctataatgccaactgcttctgggtgatggggtatgtgatcccattactatactttttttctgacaaattagttcttttctttttccataacattaaatttacataagcatgaaacgaattatttgtttggaggtaatattccctgagactccatggtaaggtatttcagtaaatccctggatggtgatggtattcctggaggcatgacaggtaaattcggatagatattgtggtgagagccatttgctgtgctaccatggcaaccgtgttcacgagctcattgggccagcactagggtagtgagggaaagggctgaccatcatcacctgggtttctagcaatgagtgccatcttgtgagcattcacatggaacataaatattttctttcttgtgctagttatccactacccagcgattggtttagatcctgacttccagtgagataagtggtgtgataatttgcttgaagttctcttcactaggagaatttctcttttatacacattcaaagccatcacttaagtagtataccccatagcagtctacttccagcccagcatgggccagcatgtttcaccaagcagtttatataccaggccggactttttcttcttcagttaactgttgatgtcaataggaagtcagaagtatctattgcggcagtgggttgtgtggtaggcattttatagagatcacttccagctgataatgggattctgctgggcatgtccaaatctatggctaattgaatctcataatacctagtttacgagaccggcccggtggctcatgcctgtaatccctgcactttgagaggctgagttggacagatcacctgaggtcagaagttcaagaccagcctggccaacatggtgaaaccccgtctctactaaaaatacaaaaattagccaggcatggtggcaaatgcctgtaatcccagctactcgggaggttgaggcaggagaatcgcttgaacccgggaggcagaggttgcattgagccgagaccaygccattgcactgtagcctgggcgacaagagcgaaactccatctcaaaaaaacaaaacaaacaaaaaaacccctagtttaygatggggagttgaagtcatttggatacctgtctgtgatcaggcttgcagtctctaccctagagcccagtactaggctaggagcatggtcttaccaataggatcatggtcttatatccatatccaaatattacgattcttctgtttaccttactacaaacactctagagctccatacaatctaccagagcttatttctctgtggcctggatcagcaggagcactttctcttttcagatcactcaataaattggtcagaggctgggcacagtggctcatgcctttaatcctcgcactttgggagatgaggcaggcagattgctttgagtccaggagctcaagaccagcctgggcaacatggcgaaagcctgcctcttcaaaaaattagctgggcatggtggtatgcacccgtagttccagctactggggaggctgaggtggggtattgcttgagcctaggagtttgaggctgcagtgagctgtgattgcaccactgcactgcagcctgtgtgacagagcaagatcttgtctctatgtaggtaggtaggtagattgattgattgatcagatggattagatggattaaattgagagatcagagttggatgcaaggataaggtatctgctgtctccaaaactcaaaatggcccagcaagcattgctcctctttgttagcaggagaggggtggtggggcaaggggcaacaagttgtcttttatgttggaggagataccctgacgtgctgcaggcctttgactttcagaaaatttggctgaggtggcaggccactgtatttttatgtctgacatgtacatctaagatacataacttcctgctyttcatgtctcacattgatgtcattagcatagttgtcaaggtaatgtcctgtgaaacagacaaaatcttgatgaaccagatcacaacacagaaaggtcaagatgatttatcactgaggctgctcttgccatgagcaagaaaaactgcttcaagtagtccacacaacttaaaaagaacacacacttacccctagcagtagtctaggtaccaggagttatatgttaatctgcagaaagtagagtacgtctggaaaagtaactgcaaatctgcaaagtcttctgtagcacttaagatcctgcggttcacatggagacttcgccttttgctaaagagatcactgctctaggagcttacatttgctctttctgtgatggttcttatccagtgggctagggaatctgtgtgtctttgggcattacctaatggccaatgttattgaaaatcaaggtggcacagagggaggtctagccaacttcacagagccgggagcatctagtttctttccctcccttttggaggccctgacagacaggcaggcaggcagacagacagatcgacagacaggtaagatagattagatagattaataggtcctaatgtgaagccacctcaggccaaaattccttccatcagctggcctgcaaaggctccgttctaactagcatatcttagcgacattctgagttcctagcaagtagctacctcaaggccaggacctagcagaccccaaaagatgcatttccctttacctagtacagttgccatggcaaatatctgcagattattaagaaaagatgaggagggaggtttataatatatgtgtgttaatgcgctgtggcagggttcctccttacagatgcctggcctccctgttattgaagggttctgggtctgaaatgacccaggcctacgagttggatgagggggccccctctctagcatggtggtctagtaggctgcctaaactgacctggaaagctactttccgtttccattactgggagcttcacaatgaattattcacagccataaacgtctgatcatggtctccaacagtctttctagcccacttagatcaggaatcccattttgaaatagtcccttccactagcatctcacgctgctgaggacagccaggaaagcacttctgaaagattccagtgctttcctcaccagtgtatagcctcagcaaggcatgtgatgtggatcccatcaagggcatactgaaggtgtcagtagaaggctgagcctttagagtccatatgccactctggtctcctctactttgtgcccaggtttttctggcttttcattatcacctcactaaatccagcattcagtccaggtttccactggcgagcctagctcaacattaaaaccatggccagttacctgagctgttacactacctgcagaagttcttttgaccataccataattagaaatttggctttatccaggctgggcacaatggctcatgcctgtaatcccagaactttgggaggctgaggcaggcagatcacttgaggtcaggagtttgagaccagcctgaccaacatgctgaaaccctgtctctactaaaaatacaaaaattagccgggcatggtggtgagtgcctgtaatcccagctactcgggaggctgaggcaggagaatcgcttgaacccgggaggcagaggttgcagtgagccaagattgcaccactgctctccagcctgggggacagaacaagactccatctcaaaaaagaaaagaaatttggctttaaccaagtcatactctcccttccttgttataacgtctccaaaatctatatcaacaattgttcctatcatttgtaatgatccagctcagtgaattcctgtagtttcttctggatatttattagctctttactttttttcccccgctgtagagacggggtcttgttgtgttgcccaggctggtcttgaactcctgatctcaagcagtcctcccaccttggtctcccagagtgctgggattacaggcatgagctactgtgcctggccagcattttacttttctaccttatttatgcattttaccctcaggtcatgttatgcttgcattctggtaatgtgtgggcaatgcaggctgggttgtggggcagttttcatcatgacagcaagatgcagtagagagcataatagagatttttggaaattaactttctttgggtcctctcttttatcatcatttctgttgtctcacttaaagccttatctttctcatgagcaacccaggaaagatgtgaattctgtggcattaaaattcagcaactcgcaaaatttggaaaccttaacatttcacttagcaaaatacatatatagtaatgtaaaggccctgagtcttgggttttcatttcaaggtgagcatttgatattggagctgggttatttcttgttttgttctctaatattgtcagaagtaatcctactccttggtttcaacatttcccctctccttttaattgggacacccctactcgtttaccaccagcttgaacacatcacaggtaattgcaagcaataactaaaatagtagttgtgcagctatgaactgtgagcagcttgctctttcccatcctggcaattggttgtcagtttctttccttccatctgaacccagtaacatcacccacgtttcccctagcagtctctcaactacaacccactctgatagtaattgctaaatcagttaaggtcctctagttaaaagcaagagaagtcacctcaactaaattaagcaaaaacaaacagaactattgatttgggaagacactggaggagctggcagaatcagaaggtaagttggagtaccaagtctcaggtagagccgaccttggtggctttggggcccttctagggaagcccctgcttcttcctagttttcaaaatcctgggagagaatctgattggctcagtatcagtcaggtatgactgtgtttggatcagtcagccctgggagagaagaggagaaataacacatagggcaaacaaaccaatttgtgtctactgtcatagaataatatttttagtaaccatcagatggggaaggcctttctaagctacttagaagatttagatgccagaatggaaaagtttgaaagatagcaaatatattaaaatgtgaaacatctttgtgacaaatgatgtcgtaaaaaagtggccaactgggagaatctatttgccataggtagacaaagaatgttccagaatatacaaacctgtgagtaaaaggtaaacaatccagtcaagaaactggcaatttacagaagaaatacagatggtctataaagatatgaaaagaagatcaactatatctagtaatcagggaaatacagattaaagctaaccattattttggacctatcagatttgaaaatttaaaaagctttatatcaaatgtggacaaaagtatggggctgcagagacttacaggtgggggagtttaaattggtattgcattggagggatgattctggcagtaccaatcattatttaaatgtttgagttttctgaccaagcttctgagattcttaacagaaaaagccatgwacaaagatgtttatgacagcattatttataatagcaaagaagataaaaacgcaaatatctgtcaaatagaatggccagatgatttcttatatccattatgatattctatactatcattaaaataaatgtgttcacatagatctctaagttatattgttatgtgagaaaacatatgtgggataatttcatttttgttttcaaaaatatgtatatctgtgtgtgtttgggtatgttaatgcttttttttttaagtctgaaagactacaaattgtcaacagtggctgcctacaagggggctggaagagaggagagacataatagggaactttgttttctactaaattatttgacttaaaacaagcatattctttttataatatttttaaagcagatttttttgaatatgggaaataaatctaatggacttagtttgcttcgatggatatataacatctagaataaagaagttcctatgcctagtttgaactgtgtcaggagtcttgtggtcaggtctctataaaaagggatatcaccaaatgggatgttgttctggagagaaactggaccatgggggtgaataactaaaggaacaacactcataggacatgacagctgttttcagatatgtgacaggctaaaaggagactgtagcatttccgtgaatgcccacctgattagaagttctaggctgtggctttcatcctaattacaagctggagcttttttgttcaccagcatttgtctttctaggaatcattgaatttattcaaaagaaatactttgaaaaaccactcagaagcccccattttcagggaaaattgaggtctttaaggcattatcaaggtttaaaaagaaacaaaaagataaaattgtgttagcttctggctgggtgcagttgttcatgcctgtaatctagcactttgggaagccaatgcgggaagattgaggccaggagtttaagaccagcctaggcaatgtagcaagaccttatctctacaaaacaattttttttaattagccaggcgtgatggcacatgcctgtagttctagctactcagggggctgaggtgggagaatcatttgagcccaacacttggaggctacagtgtgagctatagtgctaactttatagagctgcaggagctacagtgagctacagtgatcaccgcactgccctccagcctcctggctaccagagtgagactctgtctcaaaaaaaaaaaaaaaaaaaggcttagctcctgagaggaatgggataggagagaaagaaaagagggaaagaggtgaagccagtgaaatagtcagaatctgtgcgatgtgagatgtgaccttcctcaggacctcacatctcttagattgccaggtgaagaaggcatgtgtgtgtcactagtgatgggactgagtgtggcatctgagttgagatgggtgaaatcgcctctacattgatgagttgtcccaaaataagtgaatcagagtcacagtcctgtgggaattagcaggaactgtgacaagggctttggaattccactgtccagagagttgggrgtttgcgttttgcaaggggcagaaaagatgcccgctgacatctgggttttacattgcttagtacgagggaaatgcaaaagaaattgtgtgtctgggtgttgggtcgttttaaacagaactgttccaagacctaccttggaaggtagtaaatttcccatcactctagtgttcagtcactggtgactattgggtgagagtattgaaaggagattcagacttaaaagtgaatgagattcagacctgtactggagatctaggcaagaaaagaaaggtataaggattgcaaaggaagggacaaaatataaatttttcacagaccaaatactgtcttcagaaaaacccacagattcatcagacatattatagaattaatatgacatattatattatagaattaatawatatgacatatttataatttattatattatatatgacatatttataattaataaatatgacatagaattaatatgacatattatagaattaatattcatcagacatattatggaattagcaaggttgctagatacagaagcagcataaaaatttaatgcatttctatacataggccacaaacagaaaacctaataataccttttaaaaggtgccaattacaatagcatccaaatgtaaagtacctaggaatggatttaacaatttagagaaaattattaaaatgtttgaagacattaaaggaaaatagcttaaattagtgaagagataggatcaatggattaggaggctcaattttgtaaagatgtcaattctcccccaagatatatagattcaatgcaattccaataaaaatcccaacaggtttttttgtggaacttgacaagctgattctaaaatttatatggaggagaaaagattcaagaatagccaagacattcctgaagaagaagaacaaggtgaggagacctgccttaccagatataaagagattataaaattttagtaattaagacagttttgtattggcactgggatagacagatcgaccagtggaatgaaataaagagcccagaagcagatccatttgtaagtggaaacctatttatgacagaaatgctcttgcagtttgggtggggaaaagatggtcttcacaataaatagtgcctgggaccattggtaaccctgtgggaataaatgaaattgaatgcttgtcacatatcaaacacaaaaaccaattccagttgctgtaaacactgaaatttaaaggacaaaaatgataaaatgtagagatcataatgtagtaaaatatacttctgatctcacagtaggaaaggatttcttaagacttaaaatgttgataaaagggaagattgatgaatttacatgaaaatgcaaaacctctgttcataaatgataccataaagaagatgaaagggaaggccacaaccttggtaaaagataacacaggtaactgataaaggaagagtatccagaatatataaagaacttctacaaattgttaagaaaataagtaggctgggcgcagtggttcatgcctgtaatcccagcactttgggaggctgaggtaggcggatcacaaggtcaggagttcgagaccagcctggccaacacggtgagaccctgtctctacaaaaaaatacaaaaaaaattagccaggtgtggtggcgggcgcctgtaatcccagctacaggggaggctgaggaaggagaattgcttgaacacaggaggtggaggctgcagtgagccaagattgcgccactgcactccagtctgggtgacagaacaagactccattttgaaaaaaataatccagtaggacaacggggaaaccacttgactaggtacttcacggaagaggaaactcttttgaccagtatgctatggaaagatgatgaacctcattaataatcagagaaatgtaaatcagttaacacaaagtctgacagtagcaaatgttgataagcatacggaactggaacactacattgctggtgggagtataaattagtacaacttctttgaaaaacaatttggccttatctggtaaggttaaagatacctatacctgaaattcttgcacatatgcacaagaaagatacaaaaatgtgtctcaaagcaggacctttaactgtaaacaacccaaatattcatcagtagtagaatggataagtaaattttaacaccgtctcaaatggagcactacaaagtagctgaagtwagcagccaggatgaatcttaggaacgtaatgttragccaaagaaaaaagcaactcaccacttaatcatgattccattttcctcaaaaactagactagcaataataatacattgttttggatgtaaaaaatatgagatacaaataaaggaatgtaatgataattataaaacttcaggtttaccagtgagaggggaaggaagaggatataaggagaggagcccaaagagagcttctaagttaaattatgtgatggatactttttaaaaaataaatatcaacaaatgtgaaaaaaaaatttttttttaaccgacatgtctttaaaaaatgaatgagtacttagccttggttccagttaaggcttaaacaagagatgaaacggtcttcgatgccacctartgtttctagagagtttaacattttatagacttctgctctagctgctccttcctagctctgtgagctaggtttttcagagtagaaaccaaaaggagtaggattcaccttgttttcatccgtgacgcaggctcttcattctgaacctttgcatctagcgctgtgttctccagggcaagccctttcttctctcttgttaaacaatggctcctgtttcttcctgactctttttaggagccttagtccacctggagacctagtttttctttatcatgactgagggagctagggatgctgatagggctgtgagatgtagtctttgttattcctgacatttttgtattgaagactgttttcaagagtcttgctgtccctacgtctgttctacattttagagaagggatgcacaggaaaactagtgcctctggattagccatcagggcttaaaaaactgacatctcatcctgccctgtacttgggtggaaacctgtggaaatcttatgtgaaggaagagaatgcaaactgtgggtgaactgagaaattctgatctaaaataatggtctctactgcgtgtgtaagagtccagcccaggaaaatcttttcttccttttgtggtattcacagcatagggtcaggggtaattgcctctgttagtaaaataacatgcagaacctccagggttttaatctgaaaggaaatctcttgagtaggtgagggcagatggattttgaggtcctaatttccctatctttgggtctttcactttaatttctyctatcactgtcatgctggtttccagtaaatatatttgctcctttcttaaagctcttgcttcccagcctgggcaacatagcaagatccacctctacaaaaataaaaattaaaaaattagccaggcatggtggtgctgtgcctgtagtcccagttactcaggaggctgaggcagtaggatacctccagcccaggagttcaaggctgcaatgagctatgatggcgccactgcactccagcctgggtgacagagcgagaccctgtctccaaaaaaaaacaacaaaaaactcttgcttccatctracaaaaattggttccctttgggttggcatttcctttattcagtctttttttaaattattatcaaagacagaaacgttcattcttcatttctgcctcttgctcttcccagtccacttttgccttcattccatctccaaatgtagtaattttttttttttttttttttgagacagagttttgctctttctgcccaggctggagtgcaatggcgcagtcttggctcactgcaacctccatctcccgggttcaagcagttctcctacctcagcctcccaagtagctggggttacaggcatgtgccaccatacctggctaattttttgtatttttagtagagatggggtttcaccatgttggtcagctggtctcgaacaccagacctcaaatgatccacccgcctcggcctcccaaagtgctgggattacaggcgtgagccaccgcgcctggcccaaatgtagtaattctaattccagaatatgtctcaaatgcatccatttccttgtatcatcatttttccatgcttctcttcttgctcctctctagtccattttccatacaataacaagtaattctttaacatggaaaatggatcacactttaaaaaccttcaatgatttccttatgcacttaacataaaatttgaactccctattcaaggacctacctggaaatggatgatctgactttgccaggctcatctcttcctacttcctcctgccatccccatcaacctcaccttctgcgtgatacctgcactgattttcggttcctcacacaaccaagccttcttccacctctgggttaccacagatgctgttctctgtgtctggaatactattttctatactcatccttcctcagagagacccacctgtaatccaaatttggtgctttctgatacttcatctctagtagcattctgttctttgattgcattcatcatggtatataattatatatgtatttgttttatttgtttaatgtctgcttttcacccacaagtttatattgtccttgagggcgagaactgcacttatatttgattccccactctttgctctgtatctagcccagtgcctggtaggtacaaaatatatatttgttgaaagaatgaatgaaaagtaatgcatgaattgttcctctactgctgaatactacggttgttctcagttttgggtcattctaaataatgatgaagtaaataattaggacataaagatttttatttcctaagggtatgttctcaaaattgaagttgctaggccaaaaagtatttttgaaaagtttttttaaggctcataaaatgtaatttccaagtcacttactcggaattagtgttggaattttaaagtgcctccctttttgctttcttgtttgtttttatagtgtcagagtctcactgtgtcactcaggctggagtgcagtggtataatcatggccttgaactcctgggctgaagtgttcctcccacctcagccttctgagtagctgggactacaggcatgcaccaccatacctggctatttttttttttttttttttttttaatgtagagacgaggtcttgctgtgttgcccaggctggtctcaaacttctggcctcaagtagtcctcccacctctacctcccaaagtgctgggattacaggcatgagccaccacacccagctccttttttcatccttaattttgaatatatgaaacatacaagaggagaacagatcaaataataaaatttagcttcccactctgataaaactcatttatttgaatacttattctttgctacacatgagattatttccttatgtggcagatgttgttgttccaattttatgtatttatttattatttatttttgagacggagtctcgctctgtcrcctaggctggagtacaatggcgtgatcttggctcactgcaacctccacctcccaggttcaagcgattctcctgcctcagcctcctgagtagctggggttacaggtgtgcaccaccatacccagctaattgttgtctttttagtagagacagggtttcgccttgttagccaggctggtctcgaactcctgacctcaggtgatccacccgcctcagcctcccaaagtgctgggattacaggcgtgagccacttcacccrgccccaattttacagatgaggaaactggacctagaaattttaacagatgtgctcaagttcatacaaacacagactatctcatgtcagatcattgtgtgataacctccctgcactaactaatctacatttgctccagaactgctgcaaatttaatgtcacctcacccaaatcttctgcttcttaactgctgcatctatatgaatgccctcccacccacccaccagtccttgcttccttgccacatgatgctagaggctggggtgccatgcccccttagatccctaggaagagattaaatcagctggccatccagaaccttcctgtgtggttcactctgagatgcatgtcatctttgtgtggtggtaattagcatgaggataaatggcccattccttcaggtatgtccccattccaatttacaagggtaggcccttttggcccagtatcataacaacaggctgctaaccacatagtaatcatggaaagagcatgctatacttacataacagaaagggcattctgccccctgaggattcttgtgttgttgaactctaaggagcttgtggctgtttmgggggagaggagcattctctgtgttaggctgcaggtattcacctgggcccatgkttttccccccaggaaaaggtagaacatgctaccaggtcagggtttggtgcagcagtttgcatgtttgatgtttatccctgctaataattcctctaatttctcttaacctttcaggctctccctgcatgtcctatccaggccacctgtgaggctgcttccaaggaggaaaacaaggaaaaaaatcgatatgtaaacatcttgccttgtgagtgtctttagtgtttcttgggatgtaacctgaaattacatctctggagggattttctgaagatggaaagaatcttgcaattgggcacagcagggtgaataacaagagtgcgttcatggcagtactcagtggctcatacctgtaatcccagaactttggaaggccaaggtgggagaatctcttgagcccaggagtttgaaactagcctgggcaatatagtgagacctcatctctacaaaaaccttaaaaaattagccaggcatggtggtgtgtgtctgtcgtcccagctactcaggaggctgaggtaggaggatcccttgagcccaggggggcagaggttgcagtgacccaagatcgtgtcactgcattctagcctgggtgacagggcaagaccgtgtctcaaaaaaataaagtaaaagaaatgaaataaataataataaataagataaataaataagagtaggttgaagactttgggctgaaagagcctttatggatcccacatactcagagtcaattaggatgatccaggaggatttttgtgtcaggcctaaagtttctaggaggtcctggagaacagcttcactaggatcaggcaggaagcagggggtaatggtggtggtagagatggttttttgtggtattcattgaaagaaattctaatgcagagttctctgtataaacccttcccagagttagccattgctaatcagttgatccataagctaacagacatttttctagtccattggtatccagaatgggatatgcataatttaatgagatatgagaggaagatgtttgaacctcacttgatttttatatttgcttttcaaaaaaaaaaaattcctaatcctcagaacctgtgaaaatgttttttttttaattttttgtagagatggtcttgctgtgttgccttggctgatctcaaactcctggcctcaaacagtcctcctgctttggtctcccaagtgttgggattacaagcatgagccagtgagcccagccagtatatttgccttttaaaaattcatccttttaaattttttatttcatttatttttttagagacagggccacccaagctggggtgcaatgatgtgatcatagatatgtatcctcgaattcctgggctcaagtaatcctcctgccacagcctgctgagtaactagaactacaggtgcatctaccatgcctggctgattattttttagacacagggtcttgctgtgttacccagcctggtctcaaactcttggcctcaagcagtcctcccactttgacctcccaaagaattgggattacgtgcatgagccaccacatctagaccctaaaaattttatatttcagggtatatcatacattagcatatgtgcataatttatcaataaatgagcatgtattagagatgcctgctcacatttttataagtgaagtatggaaccaaaaaattaggaccactacactatgcatttacagatacttttgtctttttcttttttctttctcgctctgtcacccaggctggagtgcagtggcacgatcttggctcactgcaggctctacctcctgggttcaagccattttcctgcttcagcctcccaagtagctgggactacctataggcacatgccaccacacccagctaattttgtatttttagtagagacggagtttcaccatgttggccaggctggtctggaactcctgacctcaagtgatgcaccgcctctgcctcctgaagtgctaggattataggcgtgacccaccatgctcggccttgtcttcttatttatgtgcacatgttggaggagggggatgtgtgtatgtgtgtgggtgtgggtatgtgtatatataatacatattttttaatatgattggtatactgtacacatttctctcttttaatagtatatattgtcagttcatctgtcaagaaactttcttttttctcaactacttagtattccacattgtagatgcatcttaatttatttaactagtcccctaatgatacttaaggtattcccaattttttgctgttatactgttggagttatattgttggagtggcatctttatacaagcgtgagtctgtgcacataggcacagatgtctcaactgtcctggttgcgtcaggttctgtgagaaataaattttgattttactgaaatattgttggtttgtttcctagatgaccactctagagtccacctgacaccggttgaaggggttccagattctgattacatcaatgcttcattcatcaacgtaaggatcgggtgctttccctgtcacttccctgcctgaccattgccactatctgttggctcctccccagctgtgtgttaggagaaatatttgtcatttcatgttttccctgacaagtctggtttttttaagtgactgaatttttttttaaggtcagtcaaatagttttaatcattttctatatttaccctgtcgtcattccctatggtttcccatgtagaaatctgtgtctaaatatgtattttgtgataagagtcagtgaatcctttattgagctgattctaattacaaacaaaagcaggccttgccctcaacagtaaaaataagggagaacaggacaagaatacctgacatgacaccagctatattatatatgtgtgtgtatgtatatatgtgtgtgtgtgtgtctgtgtgtgtgtatatatatatatatatgactatctggttagccatatatgaaccaaggcctgagggaagagctgatactaagaggaggtttttaaagatgatttagagaatgtttatagaacagtctgtatgagagatttgaggtttttgtttggttggttttgtctttggcagtagcctgaaaaaacacataaagagttaagaatatgttttataggtttgggggaagcatcctgtagagagagtgaatttgaacagaaaaaagagagagggaaagctggcaaaagcaagtctgactcctgatgcaaaatgcatgagaagactggataaaatttccacttgcatgtttatagcagcattaatcctaaaagccaggtgggagcactccaagtgtccattgacggatgagtgaataaattaaatgtggtacatgcatacagtggaatgttattcagmctttaaaaggaaggaaattctaatacatgctacaacatggatgaacctggaagacatcatggtaagtgaaataagccagtcacaaaaggacaaatattgtatgattctacatatagaatataaactatatatacatatgtagagtagtcaaattcacagggacagaaagtagaatagtggttgctgggggagggaggaatgaggagtgggtacagagtttcatctggggaagatgaaaaagttctgtagacggatggtggtgatggttgcacgacagcgtgaatatacttaatgctacagaactgtacacttaaaatggctaaaatcagccgggcacggtggcacacctgtaatctcagcactttgggaggccaaggcggtggatcacttgaggtcagaagtttgagaccagcctgaccaagatggtgaaacctcatctctactaaaaaaaaamaaaaaacaaaaaaaaaaaaaacaacttagccgggcgtggtggcaggcgcctgtaatcccagctacttgggagattgaggcagagaattgcttgaacccgggaggcggaggttgcagtgagcygagatggcgccactgcactccagcctgggcgacagggtgagactgtctcaaaaaaaaagaagagtcaaaatggctaaaatcgtaaattttatgttgtattttaccacaagaaaaaaaaaggacactgatggagagattagtgtgaacataagaagggctgtttcttcctctgagagtgaagataaaggagaggacagaatggatagagacgactcgtaggtgtgggtaaagcaagttgaggcaactcacccgtgtgctcatggttgtgtactgaacaaatgagatgggactgtgacatgagagcttcgaaagtttagaacagcttctgaggtccctgagaaaaggataccaaagagagaaagcaaaggacatgtctagtgggatgtcattgatgggggtggggggtgctgagttgtgtgattttttttttcttcatctgcaccctgggattggtggtaaatgcagaggacatgtggtactcagacaaaagggaaggtcagtggctgcttcaagtagtcagccaagggcttcagtttcagtagaaaagaaaagcgttaggaagttgttaggaataaacaactattcctaaggtggtaggattgaggaactggagatcttgagaaagtgaaagaacaggaggttgtgtccaaaaaataggctattagatggacttcaaaaatggggcagtccgggcattctcactggagtgaatttgctgaagttcctgtatgtatgtttaacattaatggttacatgtttgtagttttaaggaaagggaccctgactagacaaataattgttgtagtcgataaggaaaatggagaaaggctagtaatcagcaggaattcctagaacttacatcgaagatcatgatgaagagattaggtggaataggttgactttaatgttatgcagaagagaagagcaagatcagttagtgtgtccagctgcgggtaagagaatactcaactaaaagttgtctagatgggaacattttttttttttctggagacagtctcaccccgacacccaggctggattgcactggtaygatcttggcttactacgacctctgcctcccgggctcaagcgattctcatgccttagcctccctagtagccaggattacagacatgtgccaccatgcccagctaattttttgtatttttagtagagacggtgttttgctatgctggccaggctggtcttgaactctgagcctcaagtgatccacctgcctctgcctcccaaagtgctgggattacaggcgtgagccaccgtgcccagctggaacatttatttgtctcatatactgtgaaagcaaatggagaccagttcttgagttggctgattccatgggtcagtgacatacttacaaaaccaggtgcttccatctttctactcagttatccttagccctgtcaacagtctcatggccacaagatggctgcagcagtcccaagcattcctcataaacacagcatccagccgggtgcggtggctcacgcctgtaatcccagcactttgggaggccgaggcgggcggatcacaaggtcaggagatcgagaccatcctggctaacacggtgaaaccccgtctctactaaaaatacaaaaaattagtcgggcgtggtggcgggcacctgtagtcccagctacttgggaggctgaggcaggagaacggcgtgaacctgggaggcggagcttgcagtgagccgagatcacgccaccgcactccagcctgggcgacagagcgagactcygtctcaaaaaaaataaataaataaaaaataaaaaaaataaacacagcatccagcacagaagaggaacatatctgcctatgcttttctctctgttagggagcaaggcttttcacggaatcctccccaccaccctgtcctcaggaccagcaggccaggattggatcacatgttcacatccctctctaatcactggctaggacattgagaatgatcatgatttacccctctgagcctggggaatgggcaccttccaagccagtgaaaggttaatgtccaaacaaaaytgtggctytaatggcaaagaagaaagggaggaatggatttgagttagtaaccagcagcatctgccaccgtaaccagtttggtcccttcccacattgaaggtgaaaactgacaaaagttaattgtatgttaaggctgttaagcagctgagatggggatctcttcatggtaatggcacagtagaaagaaacagccttatcccttgaccatgtttatttagagcttacactagggcattccataatgccttgatggttattagacagttattagtaggcagagtttacatgaagagggttaaatgggggaccttatgaactcagtgaaggaacaaaagcagggaaaaacctgtggttaaccataagtgggaagcagggattaaagatttggatttcacagtttattaaactcagtcaacattttttgagcacctgctgtgtgccaagcactgtgggtaggcttaaaggttacagaggtaagatgtaatccctcatatactacacaggtagttaggttgtttcctgtaatgtgctacgtgtgcaaaggaggtattgccaggttctgtggagttatgagaaaaaacattcagcccagcctggtaacccagtagagctcattattgaagagtgagtcagagttcaggagaagaaagttgggcagaaacttcaaagcaaaggagaaacatgagcaaagtcacagagactagaaacagcagtcttaggttataaggtataagatgggaagtggtgggaaatgagacttgatcttgaaaggtagtggatgtcaagtgtgtccattggagttcttacttgcagactatagagtgtacttttcatccactcttttaagcagaaaggggtttattataagatactggktaccttaacaaaacctgkggaagagccagtgagccaagctcagatgctgctcagcaaagagcagagcagctatagatctatgcagcatgtgactgtcatagtgaaacctctgcacagtgctgcagaagaactggatgcttctactaccgtgcttgcccaaagaccagatttctagcacagtcgttatctcatgttgctcatttctaccccaagtcttgtgtgggagcatctgctaggaagaagctaggtctcgtggattgctgagctgctagggagtctgggaaatgtagctgtaagatagtcaagctagaagggagcaggagtgggtactaagtgaaccacctaatagtgtctgccagttttcagtacagctgagcggttttgatgaatttatctaggccgtggggtaccattgaaaagtgttcaaggcagggagtagtgtgaccacatttacatattgatcactggggctatcatgtacaacatggatttaggagggkccaattgggggctattgcaatagcaggtagatcacaaatgatgagggttgacaaggaagcggcgacaaagtgaaaactacgtggaggtagaatttagcaggaattggtggttgatttatatatgagagagtagagggtgatatatccatgtagatgtatccagcatacagttggtcatatctagagctgtggacttggaagtaataaaggagtgggccaagaacagagcccttgggcccacagcccctgccaggcacattgaacaggtgctcatgggtgagatggaaggagaccaagagaagagagcatctgagaaggcaaagataaagcatggctcaggaagtgtttggcagtgaagagggttatgtgcagattagagatcagtgggaaagaggaacagattttctttggacttagtgtgtagggcagcatcctttgctgaagcaaattcagaggccgtttgttgcatcctttttgtgggctgctagttaacacttatcaaaccctttttttcccctaacattgaggtataatatatataacataaaattcacccattttaagtgagaattcagtgattttttggtaagtttaccaagttatgcagccatcaccataaatgtcttagaacattttctaacaactttattgagatgtaattcaaataccatgtatttcacccagagtttacaattcagtgtttttttaagtatattcacakataactgcagcccatcaccaattttagaacattgtcatcccctcaaaagaagaaccttacactctagctgttgcccccttagttttagaacacattgctcaccccaaaaagaacctcagtgtctaaatacaattaatctccattctcaccccccggccatcacttaactttttgcgtagagaactgagaccacacacatggatcttgaagggaactaggcaccatggagtagtggtgaaaggcctaggaaagtggggtctgtagtttgggaaacacataggtcagctaacctaacactgttcacaggaggagatgaaacagaggcagtggcacagttggcaggtgggcttccagcctagagccttaggagaaaccagtttccttactcatttttagatgtctaagaatatataggatttttttttttttttgagacggaatttcactcttgttgcccaggctggagtgcaatggcgcgatctcactacaacctctgcatccggggttcaagcaattctcctgcctcagcctcccaagtagctgagattacaggcatgcaccaccacacctgctaattttgtatttttagtagagatggggtttctccatgttggtcatgctggcctcaaactccctacctcaggtgatctgcccacctcggcctcccaaagtgttgggattagaggcatgagccaccgcgcccagcctagaatatataggatctttagacgtgtttctttttagaggtaggaatgtagctaccacctagagcccactgagattcagctttcagaatctagagacatctcaggagccagggagccacatttcatctttcccttgaacagaacacaagatcagtggctttgcttcattctcattactctgtattagttaagcagtgccgccacatcactgtacaagcatgttttcaggaaggcatatgacgcactcctggtaagatggggcaggaagcactttggggctgggccttccaaccaggtgttcaggctgttcagggcccgcatgctgcaatgagaatttagcagtgactcctcatggagcaggaatatgatgcgcttaacgtattcttaaggacttctcagttttaattataagtttagtaatataagcagaatttaacatccagaattaaggctatttccatttccattctctaataaataaaaacatttgttgaaacttaaattgctcttctcaatgaaaactttaacaagtcttttgttgctgactaaacatatccatctctgaggcctaaagctttctccttctgtgttgggcagcaaccctgccctgcccttgtttgaactgaaattgaaagtggctcctcagaccaggcacggtggctcacacctgtaatcccagtactttgggaggccaaggtgggcggatcatctgagttcaggaattcgagagcagcgtggccaacatggtgaaaccccatctctaatttttgtaaaaatacaaaaattagccggccgtgatggctcatgcttgtgatcccagctccttgggaagctgaggcaggagaatcacttgaacccgggagcagaaggttgccgtgagccaagatcgcaccactgcactccagcctgggtgacagagcaagactccgtctcaaaaaaaaaaagaaagtggctcctcagatttaggccacttcttatatttggccactgccttgcagccttgtagttcacattgccaccctggtgttggtgtgacatggtgtcccatccctgaagctgcctcccttgttactcaccttattgctgtctgagaaaggaaatgggtgattcacaatccttaaatcaagtggctttctcttacctagaacttctgaattgaacatacatttaaacaatgacgttgaaaagatgtataactggagcaataaagactgaaaaagaaagctgcggccagttgttagtttttccgaggctccttatctgttgagtggcaccccaggctcccttgctcttgtcccccactgcctgtgatagagaagcctcttgttaaacactgggagctacttcaccacactcacaggctattcccagaaagattttgcacctgggtaaagcatccttgagaaaataacctgttttctttcccagagtgaacccagcttcatccctggaaccaccacatatgcttttcccctggtgggttcttaacctgttaacactgaaatctacattgttagctgctgataaagcatcagaaacatggtctaatctgggagtcagtatttggatttcttttttctttctttctttttcttttttttttttttttggagatggagtcttgctctgtcaccaaggctggagtgcagtggcgcaatcttggcttggctcagtgcaacctccacctcccaggttcaagcaattctcttgccttagccaccctagtagctggaattacaggagtgcaccaccacgcccggctaatttttgtattttagtagagatggggtttcaccatgttggccccatgctctcacactcttgaccttagatgatccgcccaccttggcctctcaaagttctgggattacaggtgtgagctaccacgcctggcctggatttcttattctagtatttattaataattcaatttgagaagactacctagactatttgagttttgtaatctctaattcctagctctaaagctaatcccttgtgaatatctagactggaaatccccgttaagtacctgcacattttcaggttttgttaactggttggagwcagactggagaatttcatttctattcatttttggttttctctttctttttctttccttccccacaccccagggytaccaagaaaagaacaaattcattgctgcacaaggtaaagtaatgacaacttttttctgttagatttaaccatgatcacataatgggtttgktttttttctcccaaatgctgagtggattaaccagaatgctgtagcttttctgtactttttaccacctgaaagaattataatccattatacaggtttacagctaacagccttcatcttgatgacttagtatccagggatccattaaaagaagtctttttgtgtatgtatattaaaaagactggaaaaggctgyatacacaaaacacagtctaataaggccctctgtccttggggctagttaaccttaggttccagccaggctgctcagagtttgaattaggaatcagtttccagagaggatcagccacctcacagggtccaggctggttctcccccagctcatgggcctgagcctcaccattattcacagatagttggtctaggaaccctcagatcagggacccagcaccatgtcctttatgtgttctacacacatttccaggcctgctgttctaacaactgtcttcactctttgaaccctagcaaaaatatctggatgtttgcagcattaaaaagtaattgaggccgggcagggtggctcatgcctgtaatcctaacactttgggaggccaagacaggaggatcgtttgagcccaggagttcaagatcagcctgggcaacatagtgaaaccccgtctctactaaaaattagccaggcgtggtggcacacacctgtgatcccagctacttgggaggctgaggcacaagaatcacatgaacccgggagccagaggttgcagtgagctgagattgcactactgtactccagcctgggtgacagagtgagactttgtctcaagaaaaagagtcattagggactacaagatttataaaaacaaagttctcctcccttttcttttcacttttttagtctaatgcccctggggcaaccatttttatctattggcttcttatgatagatgacatcatctgatccccttacagagcacctccccctcagtcagacagacgtgtacccacatatcctccccattctcccagaagagtcaaatcacaatttggggttaaggtatttattattattatgagtttacaaatattcacagccgaaacacacagtattatgttattttttgtatagtttttttcccccttcttttttagtcattgtgttttttatatacctactactgattttcctcccaaactctttaccagaagtatatatcttctctcagtacctttagatacatgaggtttaatttttttatcttgggatccttctagaatcttctttcttcagttgcattgtggattggttgctctctatcctctggcagagttatcattctaagaccagtaccctgggaattccgttagcctctctgctgtgttggatctcatttattttcctctgtttgcctctcatttttgtttagaattttctagtgactttccgaaaaaggttatatgggaggtaaattttgaattctagcctgaacaagtcatccaacctttctggggctgatgacacccacctcagagcataataggaaggagtaaatgccatatgaagcacttasctcactgtcaggtccataatgtaggtattctgtgagcagtcatgatttctaattcccaactgtaatatccttgggagacatcattcgtgttctgtttatatttttgacagccttccacccagccccatccttgtgcagtgcctggcacatacatggtagaaacatggaaaatactcaattagtaacggggtggatrgatacatgggttagatatttarctggggacatttgggcacaagcttccaaaagtcaggaatggatgttcccagcctcccagcatctttcttcttggtgtatattctcttcatttttgctgttggctactttaggaccaaaagaagaaacggtgaatgatttctggcggatgatctgggaacaaaacacagccaccatcgtcatggttaccaacctgaaggagagaaaggaggtaagtggaaaaattggatgtgaacagcagaaggatcactctgcatataagctctgagtttaagcctggctgtctatcctttgtgggtgctgtaccagtagttcatccagaaagacacaggctgaagtctatcagactttgctatggcctggaagccccagatatgaacctcaggtgtgtgcctagagcacattccctgtatttggtagtcaaacaactcaccctggttccagaacagcctgaaagagactgacttgggccatcagctaaggaaaagccacagagrggttttttttgttgttgttttgttttgttttgttttgtttttttattgatcattcttgggtgtttctcatagagggggatttggcagggtcacaggacaatagtggagggaaggtcagcagataaacaagtgaacaaaggtctctggttttcctaggcagaggaccctgcggccttctgcagtgtttgtgtccctgggtacttgagattagggagtggtgatgactcttaacgagcmtgctgccttcaagcatctgtttaacaaagcacatcttgcaccgcccttaatccattcaaccctgagtggatacagcacatgtttcagagagcacagggttgggggtaaggtcacagatctacaggatcccaaggcagaagawtttttcttagtatagaacaaaatgaaaagtctcccatgtctacttctttccacacagacacrgcaaccatccgatttctcaatcttttccccacctttcccccctttctattccacaaaaccgccattgtcatcatggcccgttctcaatgagctgctgggcacacctcccagacggggtggtggccgggcagaggggctcctcacttcccagtaggggcggccgggcagaggcgcccctcacctcccggacrgggcggctggccgggcggggggctgatccccccacctccctcccggacggggtggctggccgggcagaggggctcctcacttcccagtaggggcggccgggcagaggcgcccctcacctcccggacggggcggctggccgggcagggggctgatcccccaacctccctcccggacagggcagctggccgggcgggggggctgacccccccacctcccggacggggcggctggccgggcagaggggctcctcacttcccagtaggggcggccgggcagaggcgcccctcacctcctggacggggcggctggccgggcggggggctgatcccccaacctccctcccggacggggcggccggccgggcgtggggctgacccccccacctccctcccggacggggcggctggccrggcggggggctgacccccccacctccctcccggacgaggtggctgccgggcagagacgctcctcacttcccagacggggtggctgctgggcggaggggctcctcacttctcagaccsggcggctgctgggcggaggggctcctcacttctcagacggggcggttgccaggcagagggtctcctcacttctcagacggggcggccaggcagagatgctcctcacatcccggacggggcggcagggcagaggtgctccccacatctcagacgatgggcggccgggcagagacgctcctcacttcctagatgggatggcggccgggcagagactctcctcactttccagactgggcagccaggcagaggggctcctcacatcccagacgatgggcggccgggcagagacgctcctcacttcccagacggggtggcggctgggcagaggctgcaatctcggcgctttgggaggccaaagcaggctgctgggaggtggaggttgtagcgagccaagatcaygccactgcactccagcctgggcaccattgagcactgagtgaacgagactccgtctgcaatcccggcacctcgggaggccgaggctggcagatcacttgcggttaggagctggagaccagcccggccaacacagcgaaaccccgtctccaccaaaaaaatacgaaaaccagtcaggcgtggcggcgcgcgcctgcaatcgcaggcactcggcaggctgaggcaggagaatcaggcagggaggttgcagtgagccgagatggcagcagtaccgtccagcttcggctcggcatcggagggagaccgtggaaagagagggagagggagaccgtggggagagggagagggagagctgttttgttttgttttttgagacggagtctcgctctgtcgcccaggctgaagggcagtggtgccatctcggctcactgcaagctccgcctcccgggttcacrccattcttctgcctcagcctccygagtaccacccgccaccacgcccrgctaattttttgtgttttttttagtagagacggggtttcactgtgttaggcaggatggtctcgatctcctgacctcgtgatccacccacctcggcctcccaaagtgctgggattataggcgtgagccaccacrcccggcccacagaggagcttttttcccctggtttctctagttccttatttccctggttttctgccccacctgctgaggcctttggtatatcctggatcagcagagggagctttatgaactgagaccctgcaagccaaagggaatttgaggccttggcctaatcctggaggcagcctcctaactgggccttttccttttgtggctaccaagtgcatgcctggcctaaccagctctatcactgggccacagccagagccaattctgggtcctggggtcgagccccagcgaggaatacctatttgttacygtstttctcaaggatggcccttgagtcaccttgatcctagggtatcgggtgtcatgatcaacagctccacagtggcatgggaagacagtgctagggctgggctttaggttagtttcctccaaccaaacctcttgctcttggaagctatccaaagctcaggcaacagaaaaagctctaggcctctcatggcaggtttacagtctgcatcagtctaccctggtggccccctcatagcagactgctggttcgaggggttcaaacaggctttctcctagagcatgacctgaaatgttgtgaaagtgcagattttgtaggtaagatggcttcagattcgccctgaaccaagggagtgtgggtgggaaacattgagaagtatggggctagggctgtgtgtaagttaggagactgtgctcaataggatggcggctaaggaacttgagaaaagggcaaatttgaataagtaagtgtgcaactgactgagatagagaagaggtcaaagggccttctgggggactttaatctgggctttgtgggctcttccttccaggccctttgcatctgccatgggcaggaggtctaaggtcagggaatgtatgtctttttctttccagtgcaagtgcgcccagtactggccagaccaaggctgctggacctatgggaatattcgggygtctgtagaggatgtgactgtcctggtggactacacagtacggaagttctgcatccagcaggtagtgtctcctctgtcctttctcagttcttatgttggatctgctgaccagtaagagggaacaggctggatcatcccgctgtggtcaggagttgctgagtatgcagtatgtgaattctgaaaccagatatccgggctcaggggaacttgtctgtcaaagctaaaggagcagtattttcatgactggtgaaaaattacctgttgagatgaagtctgatcatttagatatgaccaagcactgtggaaagggagcatggggaggcagtgcagtctcctaggtgcttgactcacctttctcctcctttcctactccaaagactcctgacatsaaggatgtgatgggcctgcccctggccctycaggcaaccctggagacctgagcaaaggtcaccttcagccaaggggcagtgtggtactgcgaaaagaggacttagctgggagcactgcattttagttctgaccctgccactgactagttgtgagaccttgtgtctgtggttaactaactcccctgggtacacttacttttccattgtcactgacaaccacagctgtcaccttccctcccctggtactgcccacccttgggtatcagggccaacacacaggatctcctcacttcacaggtgggcgacatgaccaacagaaagccacagcgcctcatcactcagttccactttaccagctggccagactttggggtgccttttaccccgatcggcatgctcaagttcctcaagaaggtgaaggcctgtaaccctcagtatgcaggggccatcgtggtccactgcaggtcagtgtggcctgacccttgtmcccccacccccacatttcgcccccatggccagagcaggggaacagcacaagggccctggctgaggaggctggcacagagtagatgacctactggggcaccagcgcaacagccagagactccaagttctagtgcagggyggagaatatgacttgaggaaggagggtagggcagtcctccaagattaggagttgggagaccctgctatgaagccaaaagactgggtcaagtgctggccatgtatttttgcagccttcggacccttctagctggaggtcaggattcaggacatactggagttgttggctcctggagagccccagctctaccccattcagaattaggatttagaccctgaaggaagagcccctgcctgtgttgcccctccctatctgctcccacaaggcaggctggccatccctataaccccctgctctctggctacagtgcaggtgtagggcgtacaggtacctttgtcgtcattgatgccatgctggacatgatgcatacagaacggaaggtggacgtgtatggctttgtgagccggatccgggcacagcgctgccagatggtgcaaaccgatgtgagtgatctgtgggtcaggtgagggtggggggttccaggactaaaacatctgcccacattgaggattcactcagtctcacaggttattgtaaatgattactatagagtgtgattgtgggggaaagaaagatagatcacactgttaccgtgtctatgtagaaaaaggaagacacgagaaactccattttgttctgtactaagaaaaattcttctgccttgagatgctgttaatctgtaaccctagccccaaccctgtgctcgcagaaacatgtgctgtattgactcaaggtttaatggatttagggctgtgcaggatgtgctttgttaaaaatgtgtttgcaggcagtatgcttggtaaaagtcatcgccgttctccagtctcaagcacccagggacacaatgcactgcggaaggccgcaggracctctgcccaagaaagcctgggtgttgtccaaagtttctccccactgagatagcctgagatatgccctcgtgggaagggaagggtctgtgctgaggaggattagtgaaagaggaaggcttctttgsagttaagataagaggaaggcatctgtctcctgctcgtccctgggaatggaatgtcttggtgtaaaacccgatcgtacattctatttactgagataggagaaaaccgccttatggctggaggtgagatatgctggcggcaatactgctctttactgcactgagatgtttgtgtaaagtcagacataaatctggcctacgtgcacatcaaggcacagcacctttccttaaacttatttatgacacagagtcctttgctcacatgtttttctgctgaccctctgcccaccattaccctatagtcctgccacatccccttagccgagatagtagagatagtgatcaataaatactgagggaactcagagacgagtgctggcgcatgtcctccgtatgctgagcaccggtcccctggcccactgttctttctctatactttgtctctgtgtcttctttctttcctcagtctctcgtcccacctgacgagaaacatccacaggtgtggaggggctagcccctttcatgtgatgaagggctcttataaattatgtattcaaagaaatcgagcacagaggaggttgtggtttcatgcctgggagagtcaggaaggcagatgacaggttactggacttcaaagattagggaacaggcagctgaaagagccagtgcccagagacatgatgaagctcggccacatctgggagcagcagtgagattggctctgcagttggggcatagcaccaggagggaggcagggaccagactatcacgggctttgggtgtctccagtttctgacagccccttcagactattaaatctgcactctcagaatgaacaggaattgagtttgtccttctctccaggcgtccaccacccccaagatagacctggacccttcttcccaagtaaagcacccccacagggactcctgcatttcaagtcccacttcactaaattgggataataagagggagtccttttattcctgctaggatcaaaggagaaatggactggagtgaagtgggggtgggaacaggtgatctggcatgagaactatgttgtatgtaaccaagaacttctgtgtcattcatgtttcagatgcagtatgtcttcatataccaagcccttctggagcattatctctatggagatacagaactggaagtgacctctctagaaacccacctgcagaaaatttacaacaaaatcccagggaccagcaacaatggattagaggaggagtttaaggtgagttggagctggataacctccttcagattgaaggatccttgtaatctggggaacatgggatgcctgactgtgcatttgccaacagtaaatccccttgtgaggcatgccagtggttaaggagatggtcctttcctcgtactctrgtaactctcaactcatcctgcacgttggaatcactttggttgtgttagagtagggagaagcaggcaacagtattttaaggcccctagccctccgaggtgattatgatacacagcaagagcagtttttttgtaagagccagataataaatattttaggctttgcagcccacatggtttctatccagctacttagtgctgtctttgtaacacaaaggcagccataaccaataggtaaatataatgagtgtggctgttttataaaactttatttgcaggcagcaggcagcaggccagatttggcctctggaccttagatcactgatagctcctatatgccactagacaatggttctcaacacacctaaggcatatgtcacactgtcatcagtaaaagtgctctcccaggctgggcacagtggctcacgcctgtaatcacagcactttgggaggctgagacaggtggatcatgaggtcaggagttccagaccagcctggccaatatggtgaaaccccgtctctactaaaaatacaaaaagtagccaggcatgatggcacatgcctgtagtcccagctactcaggaggctgaggcgagagaattgcttgaacccggaaggcagaggttgcagtgagccgaaatcatgccactgcactccagcctgggygacagagcgagactccatctcaaaaaaaaaaaaaaaaaaagtgctttctcagaagcaggagattctgggttggggtggggaggaccacttagagaagttcttctcaaatatagcatgtgcacagatttctttgggatcctgtcaagatgtgggttctgccaggcacggtggctaatgcctgtaatcccagcactttgggaggccaagtcaggcagatcacctgagctcaggagttcaagaccagcctgaccaacacggagaaactctgtctctattaaaaatacaaaattagccaggcatggtggcacatgcctgtaatcccagctacttgggaggctgaggcaggagaatcacttgaacccaggaggcagagattgcagtgagctgagattgtgccactgcactccagcctgggtgacagagcaagactctgtctcaaaaaaaaaaaaaaaaaagatattaggttctgattcagcaggtatgagttagagcttgagattctgcatttctttttttcttttctttttttttgagatggagtttcactcttgtcacccgggctggggtgcaatggcgcgatctcagctcactgcaacctctgcctcccgggttcaagggattcttctgtctcagcctcctaagtagctgggtctacaggcacgtgccactacccccggctaatttttagtagagacagggtttcaccatgttggccatgcgggtctcaaactcctaacctcagttgattgcccaccttggcctcccaaagtgctgggattacaggcatgagccaccacgcccggcttgagattctgcatttctaataaggtgaagccaacgctgctggtgtatgggctacactttgagtagcaaatgtcaagaaggagcctcaatcgggaagggaggatgcaattctgaataagtttttttgaagagccttaggcagcctctgggggtggaactgcagagtggacacactccctcctacgatgctggaatcccttgctccaggatcacaaaattccaagccaggagaatctcaagagagtccacaggagcctggaaggtagcatttcccaaacagtctcttggcttcagggttccagctgaacatawgggaacagaggtcagggccctggtgagaagagcartatggagccagagtggcctggaggtgcaggccaagggacaggcataatcttgtcaagttcagttactgggatcagtaatgtttcccctccccttcccaattcagaagttaacatcaatcaaaatccagaatgacaagatgcggactggaaaccttccagccaacatgaagaagaaccgtgttttacagatcattccatgtaagagccctcccgccactccaaagccttattgccccatccctcaattccctccaccccttccayttctcaggtactagttaatgattggcgtatagacaagaatcatggcattgcctcttgttgcacccacttaacaacatggcgttgccttttgttgcaccttagtggcttctggaaataacgtaaaagccaaaggctttctccctaatgagctaggaacagacatgtccttgcccagctgggattctgtctgcccagggcctgaggtggtgggagcaatgcaaggagagggagaggacaaatgatattggctagccataagccgctattcttcttacagatgaattcaacagagtgatcattccagttaagcggggcgaagagaatacagactatgtgaacgcatcctttattgatgtaagtggtgggtgtgacccctgagcccccaacaccccgtggagattcagccagcacttgcagtgcctccctcccatacctgctggggaggatcatgtttgaatcagtcaacaaatagtgaattgatactcacccacccactcaccctgtgcattaggtctgtccagctccatagagcagaaggtgggggaaaacagatggcatgcagtagtataatacctggaagaaaaagttcacagagcagaccacagccaagaggaacctggctgccccctgatctttcccattcctgccctcttcatcctagctctaatccctgttccacttccctgtctcttacagaaagcaaccagcttgtcagatagggtttcgtccttggccacaggggagctctgyatgggctgagtttgcctccgagcagtccccattcccttctagtggtctstcttctccactagtccctctgtgattaaaccatctcacccttgcaattaacctggcctgtgcagggctaccggcagaaggactcctatatcgccagccagggccctcttctccacacaattgaggacttctggcgaatgatctgggagtggaaatcctgytctatcgtgatgctaacagaactggaggagagaggccaggtgagttcaaaaggtcctgggtggtgagagacagagacagcatgaaaagatgtgtgtgtaaatggggacgttgggaaggcaagaaggtgtttggaccttgtctttgacttatacggtccaaagagtacgtttgcatagtataagtacatacttaaaggtatataaatacatatgcatttccaggattgcccagcccgttggtgtctaagcagtcattagcttctcccaagactagaaaagcaatgtgatctgagcctccatgttattcccagacagctcacacccttkcactttctcctgaatacagtccccctagcctagcctttgcacagtgccccaggcggggggggcaccctctccttcccagtgccccaggcagggcagataggtcaaggttctgaggtggacccaatatgagtgtccctaagaagggattgcctcattgctgactacataaaataaagcagtagaatttgagaaattatacaaacaagaaacttacagtctaatattcagtaataaggaaatcttttaaagaaaaaagccctcaggtctattaaaaagcagagctgtccggaaactcatactaaaaagggacactagcagtcccctaggtcaacttcctctcagtataggaaacctcctaatattgttcctgagtcagaatcatacagcctctactaagcacattcaatctcagggatatctccctcaccccccacattatggggggacccagtctgtgttctgacaatgcttattcttttaaaaattatttctgttgaggttgcacattgcagcaaatgagcggttcactatgtctggggtgtcacttagcagggatgagaatctagagaatgggcctggagagaagctagcaaggcctggtgagaaaattccttctaagccacagtgaagagtttggtcttcctaaagcaattgaagagcccttgacaacatcccatttgtgttttttaaaaaatccctctggcagcagtgagaaggactcattagaaatgcgraagctgtggcagtaatgctggtggcctggactcgggtggtgagagggtgctgtcccagaaagggtgaagtgaggaggaattaaggatggcacccactcatgactcattgaatttatagtcaaacatttaaaatacaaagtatgttttacattagttgtcycaagtcactagttgttccccatctgtacttgtgttaactttggtacaaggctttacacatattttctcaccctgatgtttcattacatcaggrtttttttttttttttggttttgtttgtttgtttgtttgtttktttgagagagggtctcactttgtcacccaggctggagtgcagtggcacgatcttggctcactgcagcctcaacctcccaggttcaagtgatcctcccacatagccctccaagtagcyaggactaaaggcacgtgccaccatgcccagctagtttttgtatttttttgtagagacagggtttcaccatgttgcccaggctggtcttgaactcctgggctcaattgatccacccacctggttgacccaaagtgctaggattacaggtttgaaccaccttgcccggcatttttttcaattttgatcagtcatttaactcattagctattcttcctagacttgtatcatgtacctaatcaacagacatactttgtaggtcttcatcatcttttttttttttttttttttttttttttttttgagacggagtctctgtcacccaggctggagtgcagtggcacaatatgggctcattgcaacctctgcctcccaggttctggcaattctcctgccacagcctccctagtaactgggattaaagacacccaccatcatgcctggctaatttttgtaggcacggggtttcaccatgttggccaggcttgtctcaaactcctgacctcaggttatctgcctgactcagcctcccaaagtgctgggattacaggcgtgagccactgcgcccagtgtcttcatcatcattaataacaatactgatgaggtgggaggttcggttaaggtgcttggctttgcactcaaggaagcacacacctgagtaacaaaagctgtttaggaaatgagccactgtgttctcaggagctaggtgcctgttcctgccgtctctgatcagtcgtgatggaacctgcagatcagaccagggccctacctgtggttccttctgcacccctgcccttcagatctgtgatgggcaggaccaaagagcaggccgaagagctggaaccacgagcacaaggrccatctcggcccactgccctgtgataaaatgtggcccagtgaacatctccgcctctgtccagtcagatgcaggctcttccatccttgaaaaggacctagtgagagtaaagggcagggggcaggaagcatttcatgtgtgtggcggtggggagaagagtcgtgcgcacacaaattctgctgcctgttgagtgaggcctctccctctrccttccactgtagcttatgctctgtcttcctaggccagtgaagcagacagtagtgcttgccctcaaaagcttctgagtggattggaacaggatgttagtgatgttctttacaaggcctcactggcccccaagttcactttctgttccattcatgttgtcaagtgtagctcccagaagtaattaacgcactaagcctaaatgatgcaatgraaggtgcctacayttatacagtgacactaccatcctcacctacaatattaagttcccagagaaaaaaattcgatcccataatataaattctgtacttacaaattaaaatctcgaaggaattaaaaatttttaattatctccctctgctttttttttttttttttttttttttttgagatggagtctcactctgtccaccagactggagtgcagtggcacaatctcagctcgctgcaacctccacctccagggttcaagtgattctcccacctcagcctcccgagtagctgggattacaggcatgcactaccatgcccagctaatttccatagtagagacagggtttcgtcatgttggccatgctggtctcaaactcctgaccccaagtgatccgcccgccttagcctcccagagtgctaagattacaggcatgagccattgcgcctggcctccttctgctctattttaatcaaaagggtccaccaggatgcctgggttccctcagcagctgcagcttggaccatcatcagcctgggcagacagagcagtgccaggaactcccatgctgggtcaaccctaggcctagcccaaccctaggcctcatcctgcttctctaaagcatagtgaaacctgatagcattagtcttcacaaagctgtgtgtccccatcaccatgtccgccttagacctcataagagacataagacataagagacttcatgctatctggtggaaagacaaagtaggagaaaagacagaaaaccttccctgtttcacttctttaagatgctattatctagaggccgtaacgtgaacacacaaatctgagatgaaactccagtccccagcttttcttctactggtcttgaatccccattccccatcttctgtccctcacccactgatgactttaacacctggcttactgctccttttgagcccctgttcctgactctgcttttggaggcatcagtcaccatgtggatgatccatctatcctcaatctttctattcctcagcttcctcagccacctgatcccatggtcaagtcaccatctgccctgtatctgcactgcccttggaatctcaacaaggcatccgccctgtttactgcctccttcctcccacctcagtattctcttttattccagtcatttttgtcttcatcaagtccttagagttattgatgcctccactttctcaacatcagtcacaccgaacatgtcctcaccttcctccttactctgtgtgtttttgagttctgtttttgagcgtttgagttttctgatttgagtttttgtggtatgtcattattacctttccttattccctcatgctttcttactttcatagcaaactctctagtaaaacccagttatatgcctctatctgatatagcaaacatcactgggcaaaaacacaaaacagtgccaaatgctctcacactgaactcatgaccacaaatctcatagaggtaattggtgccacctagcaatgctattgctctttcttttcttcctgaaacctccagcatctgctcttgcctgtcccatcatactcacaccttagcttgtgacctggcctcattcttctccaagaaatcagacaagaacactgtcatcctcccacccccaaacaacyagcctcttcaaatctgtaccaactctattctctcttgttacagtggaaaagggtttctgcatctctcaatccacctgtccactgtgctcttggccccattccgtcctgcctgctcagggatgttgctgctataaccatcttctctcccacctccatcagcagttcccctctttaaccactactctcatcagcctatacatgttacatttcctatcttttaaaaacaaaaaatctgctaatctcactttcccttccacctactatcctatttctctgcaccccttcccagcaaaactcctttaaagagttggctttcggccrggygcggtggctcacgcctgtaatcccagcactttgggaggccaaggtgggcggatcacaaagtcaggagatcgagaccagcctggccaacatggcaaaaccccatctctactaaaaatacaaaaattagctgggcgcgatggtgcatgcctgtgatcccagctactcgggaggctgaggcaggagaatcgtttgaaccagggagctgaaggttgcartgagccaagatcgcgccactgcattccagcctggtggcagagtgagactccatctcaaaaaaaaaaaaaaaagagttggctttctccctgcaagttctctgttcgctctgttccttccaggcttggccccactgggactgctttagtcaagatcaccagtgactgtcctcttgccaaatccaaaggtcatttctcttttctgatttttttttttttgtccttacagcagcatttgaaagagtcagtacctccctcctcttcctcagaacacttacttccgtagcatcaccccactcactaacctggcagctcctttgttatttctttgtgacctcctcctctaaaacattggagtatactagactcgggcgctagcccactctgttttcttttgacacactagcccttcaggatctcagccagtcctatggctttaagtacaacccatatgccagggatcctcaatctgcgtctctaggccagtcacctgtcccccttcccaatgtgggctcctgatttcctccttcccccgacaccagtccaccccactcttagccatctaaataaatagtaccaccttctgcccagttgctcatgtctaaaatccgggagttaccttccttcctcccctctcctcacccctcacatccagtctgccactgagtcctgatacaggcagagcctccccacttttctccagcgtaactgctgtcatctgaacaagccctcgtctctcactgcttgcccgtgggactgtgggcatgactcatatgcgcagcctcgtctgcagtggcctggcaactggtcctcctgctctcatcctaacccacttttagtttttcaaatggcagctgctgktccttttgaaaatataaatcattgtcactccttgtcttacaaatcctgtttgaggccaggtgcggcagctcacgcctgtaatcccagcactttgggaggccgaggcgggtggatcacctgaggtcgggagttcgagaccagcctgaccaacatggagaaaccccgtctctactaaaaatacaaaattagcgggcatggtgatgcatgcctgtaatctcagctactggggaggctgaggcaggagaatcacttgaacccgggagccggaggttgcagtgagccaagatcgcgccattgcactccagcgtgggcaataagagtgaagctccatctcaaaaaaaaaaaaaaaaaaatcctctttggtcttccagagatcttgagagaaaatccgcccatgtatacaaaatttagagacttttgatcagatgtggtggctcacgcctgtrtaatcctaccactttgggaggctgaggcaggtggatcacctgaggtcaagagtttgagaccagcctggccgacatggtgaaaccctgtctctactaaaaatacaaaaattagctaggcatggtggcgcacacttgtagtcccagctacttgggagtctggggtgggagaatcacttgaaactgggaggcggaggctgcagtaagtcaagatcatgccactgcactccagcctgggcgacagagcaagactctctcaaaaaagaaaaaaaaaatgagactcttagtgttgatacctagtccctagacttgatatgtatttctgtctgagagatcatgctcaattcctccagcacacacacactgtggctcacacccatggggaccttatggttctgatggttttaaaggcccagtcttcatcccagctgagacactgtgtaaagcagtgttgagaaggcactgtggtagcaaaatccattccacccaccagtgccataaaaactaatataatgcctgatcgaggtgagccttaatgagaatttttttttttttttggctgttctggttgaagagaggcccagggcaccgatccctgaggcatccccagggcttctagagaacatgggtggaaaagcactagtccagggcatgttcttgattcaacactttaataatcatgattttatttggactgtgagactattcacaatttctttttctacttaatttttttccaaatctttcaatgacattatatgtatggttgagaatttttcaattgccagtagtgaagaatctcagatcttacccccaaattctctaaagaaatgggcagcataactgtgtgatgttatatttatgtatttatgccttggcttgttctgcagacattgaacaaattcatttaccagatactgagagcctaccatgtgccaggcattgtgcaaggtgtggggaatacagagatgaaaagagacgcagccactcccacaaggagctgtagagggaagtgagccaggtgcaagcaaagacagacagtagaccacctcctgctcactagcaaggacagaaaggcgagtgctagcaacttgaaggtaccttgcagatcaaagagataaaggtaaaagggagaaaggatactgtggcctgggcggtggtgaagcccatggctgtgtgggaatgtgaattggttctgattttctgaattagcagtctggcggatgtaagcagcattaaatatgaaaacaccccatgggagaaaaagaaaggaattggaacaaagattttcactcgtcctcctctccctgcagccaccaagtattggataccctgtgagcctgtagtcagagtcctttacagaccccggcagtgttttagatggtctctggtgaggatcggaggttaattggaatgatgtgatataatgatcctgcaagttttcaataccttggggacgaagcgtatcagcgtaagaggtggctgtactgagaggggtcaggctgctcgtgggcagtgctgcttctacacatgtggtactctgagctcctcacctctccaacctgtctctccaggagaagtgtgcccagtactggccatctgatggactggtgtcctatggagatattacagtggaactgaagaaggaggaggaatgtgagagctacaccstccgagacctcctggtcaccaacaccagggtaagatgggtcgtgggtggactctgcccacaggaaaagcagggttacccctgcctccctgatccccttttttccaaaggagaataagagccggcagatccggcagttccacttccatggctggcctgaagtgggcatccccagtgacggaaagggcatgatcagcatcatcgccgccgtgcagaagcagcagcagcagtcagggaaccaccccatcaccgtgcactgcaggtatggctcacccttgccctcagcgggagagagaaagcgaggaggggcagataggggaagctgatgaccatgggtcagactgaagaaagccatacaagagcaagatattggtgagcacatagtagttgagattgatgccaagacaggattggatgctaagagagaggaccttggagcttgaacttggcacaataagtgctaggggactaatgttcagatagtgggcaggagagcagcaggggagactggcagtggagaccccggttgtgctatgaacagagggtgaaagagaagaggagtcaagggtrtctcccagstttgagcctgggttggtgtgaccagcagaagagagacagtaaagaggtttgtttgaggggaaaagttgaattttgtatggggcatgttgctggaggttacgttttagaaaaaatgcactcctttacttagaatcctaacaacagcttacaaggcccaatatgttctgaggggtccctggccagggccgggagaggatggtgtgcaccaygggctggctctgagcacactcctgccatgggcctgagatgccagtttcccaggcagccacagggctttgcccaagccttccctgagtaccctgccagaactcccactcctcttttctctttccttaccacacatcttcttgtctggggacattgctaaaccccacagtccctgcctcagagtaggcactcagtgtctggtgagtgaatcagctgatgacattgaatagggggatattgtcaaggtcagagtctggattccgtggatttgggaagaaagtgaaagacatggaaaggaatcagcagatacacaccagtgtagggagtggggtttgtcagaaaaagggaaagacaggactagagctagttctaactgagcgaacagcaggtcagaacaacctaggccagcatgtgcaggtggacagcaatggctctgtgctggtggggtgtgagtgaaggtcgtcccccacggtccaacaggtgagtccctccacagcacatggggccatgcaggaagggcacagggtacactgcctcccgacccagaacccctccaggctggkgggtccacagggcaaaggcgagcaccagctgcctgcccccacctcttctgccactcaccactgtcactcacccccttgcacagagggccatcacaggtgtggtaaatgtgtctgctctgttgcagcgccggggcaggaaggacggggaccttctgtgccctgagcaccgtcctggagcgtgtgaaagcagaggggattttggatgtcttccagactgtcaagagcctgcggctacagaggccacacatggtccagacactggtatgctgcccacatatttgtccctgccaccacaccacctgcagcccttctctcagggaggaggctcttcagaggggcccacccagtagtcagaagactgtctaaacacagacctgcccttgccctcccaaggtgccccaaatacacaggaaacattgggaggcaggatggcagcaatgggagcatagcccctgttgccagaggttgggccaggttagaaggggtgtctgggtgccccacagggctcatctgtacttctctgtgggtcttgggtaaggaagatccatgaagagtacctgcctttgggcttgggctccctgttaagaggtctgactttaataagccgcacatccacagaggttttcctgaatcccatggagctagaaatgtttggggggtaaagaaaagtgaatgttaggaggtttgggagacgaggttctgagagccagggtgcatgctagcctggcagccatggtaagcgtgggccatgctcagctgcactgtctcccagcccagcacatgcctgtctgacctctgtggggcctgggtcagctctggtcagctctgcttgtagaaggtctgctgcattcagcccggaaggggaatgctgtcagaactctggcaggcagatcagagctcaggtgaaagttcaaaaacattcagttcctcttgattttccatcttcaacaaaaaaatgagtctgttaggaattacaggtactgtgtgttcttcagtaaccctgactttttccctacctttcactctccaggaacagtatgagttctgctacaaggtggtgcaggagtatattgatgcattctcagattatgccaacttcaagtaagcrgcaacaagggtccgtggaccaggaggattgcctttaatattttgtaatattctgttttgttaatataccccaaattgtgtatatatcttataactgttttagaaattggtacataggcttctattacctattaggtggaaattttatatgtaaatgtgttagcactgatagtcctttttccaatgttttattggggaattaaatagtgtgatgtttggattgatatcgtgaaatcctcagccgagaaattgggctggattgygctttggttaatacatctttccctaaagaagataaacacaaaatccattccaggtagctcggcaccaactaagaaaaaaagcacaaagttctcagagctctcgaggaaagtggttgtccccgtaccaccatgcactgtaaatatccctcccctctctccctggtcccctcccccatccccaccactgatatcatggggagtaataggaccagagcggtatctctggcaccmcactagggactatcaggtaataaaagctttgactccctgaggaaatgtctctccctttgtctgggggtggggcagccatacaggctggggctctcctcggctgttcatggccctcctgttgctgttctctctgagttatctgagagaggccacagtcccccagctcctcctgtccaccaaacacagcccttccagttcttaggtgatctccaggaccctcctttcattcccagcacatctttggtttagtggtcctggccagcctccctcyctaggaaggtggccaggtcctcactgagtctccttaaggacaggggcacaggggagactagagctggctcagctttgggctgaggccagtctgacctctccagtctgtggtgctttgctacaaaactgtctggattgtgtcaccctatctaggataaatctttatgtccacatatattgtgttgaattgttcccattttctttcatacgtgtcctcatttctgggacagtgtgaatgtttctcagatctagaagtcagatggtgggagtcttagatccgaacttggttttgagtgacatgttagacaaaagtgttgaacttttgtttcttaaagaagctggatgttcatttatgtctcccgtaacagtctgtgctgtccagagacccagtatccttaggatattattctcatcctcatggttgaagctgggtcactgccatgtccataatccaccctgaggaaagagcatggagagccagcagcttcatttctaaggacaggaagccaaatctgcacttttcacttccactcataatccaccccgcattccactcatcagcttcacaagtaggttttcacctggtcatagctatgcctaactacagggagtgctggggaagtgtgatcttttgttgggggcacactgggagagtgggtctgtccactgcctcccagcctcagagcagctcaccacaggagcaggagagtgaactcgtggctgtggctgtcaggcagggcctttcttgagagccagcgcaggcctgggctcctcagaggcttctggagtgagagatggcacctcagcctggcccatggaggcatgttcagggatcagcactactgtgcttcttggaggaggtgggacttgagctggacccatgggaggctggaaatttagatgagtgaaaaggaggaaaggcgaagtagagccacattacagagggcctcagagtccagataaagcagttaacatgtagtggctccaggagggaagcctgtctgtgcaccacatacccaggatgtttgtgggaaggaaggagatgtgcggaagggacccaggagacctgcaggaggcaagggctgcaacagaccccctctggaagtttacaggaggtgagtgtgagtcattagagacattcagttctgtaggaactaacgaactcccaagaggcagtaaacttaaaactcagcagtctcgataagtatggataaattaggcaaagacagattctgaggaatttctggtgaggggtgccaagtttggggagcagcccctggctccttgcaagctacccttcagtgctctgtgtgaccaagtccaagtcgatgcaggagggcaggcactgggtcagcaagccactcagtgaatgtgcaggtgaggccgttcataggcgcttgtgtgcctcccagcaggctgcctgccattgccagggctggccttcagcagggtgcgccaccatggcctgagtggttttctgctgaagtccgtgctgatttggccagtggataggcatcacctgggtgcaaaaccattgtctccaggtaggaatgacctcagctgtttgctccgtgtctcgctcagcctgtagatgtgtccctcatcccttcatgcctccctcttcactcctcttttactttctactcggggcttgcatgtttacaagagaggtgaacccaacagaaactagtataggccaaaaggaaaatgtgctgaagctcacacagcacagtcgtgtggaaaaggcagcagtgactgcttcatccagtgcccttcccacagccagtcagttgcgacccaaggggcttagggtaggagtgtttctccataggggaagagtaacagcctgcacccaccacacacccaaagccctacatcctgccacactgagacctcacttcatttgggcgggtccctcctgggttgcagtttccttcattgctcccctgtcccaaatactcaagtctctctcattaaaaataaagagcaggccaggtgcagtggctcacacctgtaatcccacactttgggaggccaaggcgggtggatcacttgagcccaggattcgagaccaacctgggcaacatgacaagatcctgtctctacaaaaaataacaaaaatcatctgggcatggaggcacacgcctgtagtcccagctacttgggaggctgaggtggaaggatcacctgagcccatgaggtggaggctacagtgagctgtgatcatgccactgcactccagcctgggtcaaagagtgagaccctgtctcaaaaaaaaaaaaaaataggccgggcacagtggctaatgcctataatcccagcactttgggaggccaaggcggacggatcacctgaggtcaggagttcgagaccagcctggccaacatggtgaaaccatctctactaaaaatacaaaaattagccgggcgtggtggcacgtgcctgtaatcccagctaccggggaggctgaggcaagagaattgctggaacctgggaggcagaaactgcagtgagctgagatcacgccactgcactccagcctggatgacagcgagactccatctcaaaaaaaaaaaaagaaaaagaaaaagaattaattaattaattaaataaagagcatgtctcccaccccaggcctaagttcttccctctatgagagactacttgcagaaacctgtgttctcactcttcccccttcctcacttcattcccacacatttcttttccatccctgcgcaccaaggtcaccttggtgctaaacaccagggacccatggtctcttcccctttgtgtcacaggctgtcctctgcctcttatcctcaccctttagctgctcctccactgtctcctctctcagaggtcaggattctggatctgtctctgtggaccctcagctctcctccaatcccaagtcccccgcatcctggtcgcatgtcagggtggtccagagatgcctgcctcccactgcccacacccaggggcccgccctcctttcctctaaccttcccacatactctggccccatggatccacggcagttcctgctggcccttctccattttgttccttatgctgcacccctctgctgccactccctgcgtccgtgactccagctcactcgtctctgtccttcacccaggccgcctgctcagggtttgtgcctctctgtgctcctgcagcacctgagtgtttattcacctctgaacctctgctttcccacctgagtacacgcagctcctggctgcagtgacttcatatcctgaggactggagctccgtggtgaacagatggctttctatgttctaatgagagggatacaagagttccacagttctagtctggaaaggaccaaacatttcttaaaagctaagtatgttgccggaaaaaaaagggagcagagctttccccaggaagcttggctctggtttagatttttcaggaaaagccggaatcaaattacagaataaataaaggcaaccatcccccttttaaaggtacaccagccttggtgcatctttgaagaaagcattctgtaaaccccaaccagaactaaactagtacgtcgaactcagattcattttcactaaaccacaagcaaatgtttccctaaaaatcacccagttaacaaagtccgcatatttaagccaaaacaatttaactgaacaaatgggccacacgttgatttccggtccctgctaataagtcagtctggaagttcacaggtgtgcccatcctgccttggctgctgaagtccaggtgtctagggctgactgatgcccattatgcctcccctcccccatctttgtcacaggatttgacgcaccagctctccaaatgaccctggccctcccatttgctgttcagcccaagtgcggagattggctatgaaccctgtaaacaggcctctgacccccagaggctgatggctggccaaggaaagctgagctgctgacgcagactgggaagcaagagcccacttccagcagcccaggctagctgtgtccaaatccatgactggggaggggttagagccttgagggacaaaattattctacctacctagggagactgcactggcccaacagctgggccccatctcatgggcccgcttcttcgccaggagagaagccactccggggtaggtactgccccacccaaacccagccatctggagtgacccagccctggttcccaggtgtgtggatgtgaattgtcccacccaacccactctacagtgagcaaacggaagccctctgggagagtggtcacagcctcccctgtacctctgaacagcctgccaggctccctactcttaggcttccactgtccaccagggaaagccctgagctgggagttggggagcccccaggcattgcccctgcccaggacacaattctcttttgggatcagggaaggctgtgagggctttctaggtctcaagatcaggagcttgaagatgcagcctgggaagtgggaaggtgagaccaggacataggccagcctaaagcaagagtcctgggcctgaaggctcctgggaaggtggtggggagggagcatgtgtcggtggcctcagggcagcagctgcctggtgaatgttcatggactggatgctctgggaagcgggttgggtggtgagcttctctcttcccctctgaagacgtcactggagtctgggggtggagctgcctggtctataaatcctggggccatcaggctagggtcctgcagctgcctgaaggagccatctcatccacagctcttccttggtgagtggggagccttccctaagggctaggacacctggaccaagtttcatcctgggcgtatggtgtgctgctcctcttccccattcccaggtgcctccacccctgaaccatgccagagaagtccccttttcctctcctctccccaacagctctaccatctattcttgtgcttgttgcccctggcatgggagggataaggggtagaagcacttgcccccatcaataccactcatccattccacatccccaactactatggaagagatacagcaggccacggagaaaagggcagaaggcctgcaactctggttccctagcactggtgctccaaacacgcctacattgagaactcccctgaccatccatctatcctcccatccattggcctgaattcaggtctctgttcccctccaactttcttccacttctggaaactccttgaaggaaagatggatggacctggacaagtgggagggccctcagagctggcaaggcaggtagcctctgtgccccaggctcagggagaaggctcgtcccctggagcatcatcccctgctgggccaggatcccccaggatctggacccctgtatgcttgggatgaggagcggtggcagagagggaagggcataaggagataccaaagctgcccctgagatgccagttttccaaagtggccctggaggaagtagggggatgtgggggtgaggtaagtctccttgaatgctgtaccctgtccattagagcagccatggccagctccaggcgaggcctcctgctcctgctgctgctgactgcccaccttggaccctcagaggctcagcactggtcccatggctggtaccctggaggaaagcgagccctcagctcagcccaggatccccagaatgcccttaggcccccaggtgggtgtctcccagcctcatggggaggaagaaagtgatggccgggggctcccccaccctcctggagcctgaggtcggggtagggaggacagcatcagttcccttctaaggaagggccctggacactgcagcaggcagcccagtccagactgcccatggcctcccaagtgatgccctggctcccctggacgacagcatgccctgggagggcaggaccacggcccagtggtcccttcacaggaagcgacacctggcacggacactgctggtgagtagggtgagaggtccccagcatcaagaccagccactggtcatcagaggccattgtggcttagggttgggtgctgggagggtggggagaatgaaacaccactgagatgccccctgccacagcacccccagccatttctcagtgcccctactgcacacagcagggtgctgtctgctatccttcctatttcccaggaggattctagacaatttacaaagcacttgggttaaag

SEQ ID NO: 94674 - DNA, 15388 bp, Homo sapiens
aggttcttgaaaatcctctctaactccctgcattcagttttgatcagctttatcccatgacaggaaatgtggctgctgaaatctctcagagctttagccacgtagaaggggacagaatgtcattctcttattccaagtccagaactgcaagataagaagcttgttggtctgctggagttagggtcttcctcctgggagtcatttgtgctgaggaggtggcactgggctcatagggtgaaccctacagtaccatggaagtggataagagggggtagctctcttaggagagttgaagagaaaattttcttcaggggtctccaatgactgatagaagggtactaggcaaaaagtcccacaggtgtcaactacatgagagattttgtgaaaattggtgaaaagcaggttgattaattaatgcccaacctaaacaaccaaaaaataagaaaacatttaatccaaggggatatctgaaaattaagagaatccagtgaataatgaacaaagattagtattatatttttctgttaactcttatttgggtaagcaactatttcagaagggattggttcctttgctttatctcattaaatgggatgctattgcctgcagaccgcatcttcccacagtgaataaaatacttgtttacattcatgtagcaaaggtcctcttagccccttccccaccctctgcccaatgcctaagctgctgtgtgtgaagtttgaggtaagcctgttgaagagtcttgggggcaatggggtacaagtgccacatgttaatgaggacactcctggtttactctgcacaaagggtgcatgagtcaaaattctccacagaaacagccaacaagatgtgtgtacattcagagacagagacagagacagagatttattttagggagttaggtcatgtgattgcgcaggcctggtaaatccaaaatattcaggataggccagctgactggaaactcaggtaagagctgcagttacagtctgaaggccatctgctggcagaatcctatctccctgaaggatgtccacctttgatctattaaggccttcaactatgaggcccactcacattatggagggcactctgctttactcaaagtctactgacttaaatgttcatctcatcccaaacaccttctcaggaatattcagaagaacgtttgagtatctgggcatcgtggcccagccatatttacacataaaagtaacaaccatcacaaaggggaagtggcagaataccaggcaaggcatagaatggaactggaaagtagaaattcatcaacagtatcatgccagcctgagaagcagggcaagtggttcttcagacttctggagtctggaaatatttatagttacactggaagaaggaaagaaactgtgagagggagacagatggggaaggaagaacctcctaatggccgtagtaggaacatttcccaacatgacgatgggttcccatggtgggaagagtgaccatgtgggtatatgtggagaaatgacaaaagcctgagaggcaggagtggcagtggtaggggaggtgtcctcttcctgcctgtggcacacagtggtgtgcatctcttacagctcctccctgtggtctgttgcagtctgcatgtgaaatagaagcatgcaggctgactgtggcctttctgggctgtgcggcattgggccaggaaaacctttgcaatgattctctgaggccatgtaacaacataaacaatgtcagataacctaggaacgctctattctcaggcccagatggacactttcagggaggccaacaatttagtactctctcaaaccaatatttgaatgagacaattgtccaatcttttttgttattgttgttggcatgggaaggaactgaatttccatgaaaaattagataggctggtttattatgtttgctatcttcttctcaaaaacaaccatttgcataaggccaatagtaaacaatttggtgttagttgaggatttttgataggggaatagatgagggattaaaaaaaggtgatttcacatgcatacctagaagacagtttcttattaaatcttatgaataaatgtgtttcttcccttatgtctctctcgggaatcttggttgcgtctctttttttctctctggtgcttggtctttttgcctcctgcctgctctttcctgaatattcacctcccttcctccatgtctgtctttctgcctttctgacaaagagcagtttcacacccgtccagctctatctccgtccgagttacaactgggggaattggtttagtgaatgggctggactctagtgtataatccagaaacaactttttctttcctcaccactatcttcaaatgttgtggaatctcccttcccttcccctttggtgacaccacagattcccaacaaagaagtaagaagactatattccaacagaatggtgcaaatctgtcacaattgaaaaattacactgtgaacagagaagctgtggggagtaatctgctaaaagccactcaaaagtgagagagaagcgaggtatgcaaaagacaaaattccttttgcaaactgtgctgatctgtaactcaccagatgacatacctgcaaaattaggcactagctgcacagctccagtttccacagctagaattccagaggcatgggcttcattgttaatgaggttgacctttacccaataaatgaaggtattgatctatgaatgatttttgatttgggaaaaatagctttaatcattcatttgcttagatgtatgttcccttctctttatgtaacatcttacttccccatatccataggtttcaggcctctttcttgggattaatgaataaagagcttggtggtgaacactgatgcctgcagctctctgagcacagccccctctctctcactgatgtagatttggaaagcagaccaggccctaatcatgactgcaagctgactgcctgcatcagtggttcagggtgagaagttacaagagccagctttaaaaagtagctagttggctgagtgcagaggctcctgcctataatctcaacactttgggatgctgaggcaggaggatcgcttgagaccagcctgggcaacatagtgagaccccatctccacaaaagctttaaaaaattaactgggtgtggcagtacgcaccttggtctcagctacttgggcggctaaggcaggaggattgtttgagcccaggagttcaaggctgcagtgagctgtgatcgcaccaccgcactctagcctaggcggcagagcaggacgctgtctcaaagaaacagtgtctcattacattcccgctgttcccacttttgttttgtttgattgctcctatactctcatgacccacatcaaagagaaaaggcctttgctggctcctgtttcatgatgcagagaggtctgggctggggcacaaatggatttttgtgtaataataatacaagattctgaagatttaatgaaataatcttattaactgtaaagtattatgtaaatgtcactcgacttaattttaattttctgagctgctggcttacaagacttaggactattaatgtaattgagtacttataattaggtaattgagggcatttaatgacaactttaggtcactgcttagaacttatcaaaatgtatactttagaaaaagtgatgattttacatctatgtgtctgtgtctttcctaagtatgagttgcttatatgcatgcgtttatttgtaggcatactgtaatttcactcctgccatttgtgaaaacaaagagatttgaaaagctttgcaaagaagaagttgtaattgtgaagtttttaaaagattgactgcaaaatggaaatatattttattttcctttgattaggaaaatttttaaaagctcataaaaatctctagtaattgaagaagtaaaaagaaaatgttaataattacctataattctctggccattagttcttttaacatataaatatatggaatactctacataattaaatcacggacatatttctatttcaataaacataaaccttatacatcattttttataattcagtttgaaataatttcaaatttaaagaacaccatatccctttcacgcagatttccctatattaatattttaccacatttacttcttcatcctctccatttctctctctctctctctctctctgtgtgtgtgtgtacaatctccatcaccattagtatttttctgaatcatttttgacaaaaaggtacaaacatagtgccccatcatctttacatcctcctttgtgtacttcccccccacccccacacaaggacacttcctacatttctaccagtcaaccttcccaattgagaaattaacattgatcttacactaccctccaatctacagaccccatataagtttcctcagcagtctctgtaatgtctcttttccctttctttctttttttttttttttttactggtcaagtcttattctttttttttttttttttaatactttaagttttagggtacatgtgcacattgtgcaggttagttacatatgtatacatgtgccatgctggtgtgctgcacccactaacacgtcatctagcattaggtatatctcccaatgctatccctcccccctccccccaccccaccacagtccccagagtgtgatattccccttcctgtgtccatgtgatctcattgttcaattcccacctatgagtgagaatatgcggtgtttggttttttgttcttgtgatagtttactgagaatgatggtttccaatttcatccatgtccctacaaaggacatgaactcatcattttttatggctgcatagtattccatggtgtatatgtgccacattttcttaatccagtctatcattgttggacatttgggttggttccaagtctttgctattgtgaataatgccacaataaacatatgtgtgcatgtgtctttatagcagcatgatttatagtcatttgggtacatacccagtaatgggatggctgggtcaaatggtatttctagttctagatccctgaggaatcgccacactgacttccacaatggttgaactagtttacagtcccaccaacagtgtaaaagtgttcctatttctccacatcctctccagcacctgttgtttcctgactttttaatgattgccattctaactggtgtgagatgatatctcatagtggttttgatttgcatttctctgacggccagtgatgatgagcattttttcatgtgttttttggctgcataaatgtcgtcttttgagaagtgtctgttcatgtccttcgcccactttttgatggggttgtttgtttttttcttgtaaatttgtttgagttcattgtagattctggatattagccctttgtcagatgagtaggttgcgaaaattttctcccatgttgtaggttgcctgttcactctgatggtagtttcttttgctatgcagaagctcttgagtttaattagatcccatttgtcaattttggcttttgttgccattgcttttggtgttttggacatgaagtccttgcccacgcctatgtcctgaatggtaatgcctaggttttcttctagggtttttatggttttaggtctaacgtttaaatctttaatccatcttgaatggatttttgtataaggtgtaaggaagggatccagtttcagctttctacatatggctagccagttttcccagcaccatttattaaatagggaatcctttccccattgcttgtttttctcaggtttgtcaaagatcagatagttgtaggtatgcggcgttatttgagggctctgttctgttccattgatctatatctctgttttggtaccagtaccatgctgttttggttactgtagccttgtagtatagtttgaagtcaggtagtgtgatgcctccagctttgttcttttggcttaggattgacttggcgatgcgggctcttttttggttccatatgaactttaaagtagtttttccagatggaggtggcgggcggcacggagcgggcgtgctgagccccggcccccggcccggcatgggcgtctcccgcgggccctccgccggccggggctagggccggatggagccgcgggacggtagcccggaggcccggagcagcgactccgagtcggcttccacctcgtccagcggctccgagcgcgacgccggtccsgagccggacaaggcgccgcggcgactcaacaagcggcgcttcccggggctgcggctcttcgggcacaggaaagccatcaccaagtctggyctccagcacctggccccccctccgcccacccctggggcccggtgcagcgagtcagagcggcagatccggagtacagtggactggagcgagtcggcgacatatggggagcacatctggttcgagaccaacgtgtccagggacttctgctacgttggggagcagtactgtgtagccaggatgctgcagaagtcagtgtctcgaagaaagtgcgcagcctgcaagattgtggtgcacacgccctgcatcgagcagctggagaagataaatttcygctgtaagccrtccttccgtgaatcaggctccaggaatgtcctcgagccaacctttgtatggcaccactgggtacacagacgacgccaggacrgcaagtgtcggcactgtgggaagggattccagcagaagttcaccttccacagcaaggagattgtggccatcagctgctcgtggtgcaagcaggcataccacagcaaggtgtcctgcttcgtgctgcagcagatcgaggagccgtgctcgctgggggtccacgcagccgtggtcatcccgcccacctggatcctccgcgcccggaggccccagaatactctgaaagcaagcaagaagaagaagagggcatccttcaagaggaagtccagcaagaaagggcctgaggagggccgctggagacccttcatcatcaggcccaccccctcccccctcatgaagcccctgctggtgtttgtgaaccccaagagtgggggcaaccagggtgcaaagatcatccagtctttcctctggtatctcaatmcccgacaagtcttcgacctgagccagggagggcccaaggaggcgctggagatgtaccgcaaagtgcacaacctgcggatcctggcgtgcgggggcgacggcacggtgggctggatcctctccaccctggaccagctacgcctgaagccgccaccccctgttgccatcctgcccctgggtactggcaacgacttggcccgaaccctcaactggggtgggggctacacagatgagcctgtgtccaagatcctctcccacgtggaggaggggaacgtggtacagctggaccgctgggacctccacgctgagcccaaccccgaggcagggcctgaggaccgagatgaaggcgccaccgaccggttgcccctggatgtcttcaacaactacttcagcctgggctttgacgcccacgtcaccctggagttccacgagtctcgagaggccaacccagagaaattcaacagccgctttcggaataagatgttctaygccgggacagctttctctgacttcctgatgggcagctccaaggacctggccaagcacatccgagtggtgtgtgatggaatggacttgactcccaagatccaggacctgaaaccccagtgtgttgttttcctgaacatccccaggtactgtgcgggcaccatgccctgsggccaccctggggagcaccacgactttgagccccagcggcatgacgacggctacctcgaggtcattggcttcaccatgacgtcattggccgcrctgcaggtgggcggacacggcgagyggctgacgcagtgtcgcgaggtggtgctcaccacatccaaggccatcccggtgcaggtggatggcgagccctgcaagcttgcagcctcacgcatccgcattgccctgcgcaaccaggccaccatggtgcagaaggccaagcggcrgagcgccgcccccctgcacagcgaccagcagccggtgccagagcagttgcgcatccaggtgagacrcgtcagcatgcacgactatgaggccctgcactacgacaaggagcagctcaaggaggcctccgtgccgctgggcacygtggtggtcccaggagacagtgacctagagctctgccgtgcccacattgagagactccagcaggagcccgatggtgcwggagccaagtccccgacatgccagaaactgtcccccaagtggtgcttcctggacgccaccactgccagccgcttctacaggatcaaccgagcccaggagcayctcaactatgtgactgagatcgcacaggatgagatttatatcctggaccctgagctgctgggggcatcggcccggcctgacctcccaacccccacttcccctctccccacctcaccctgctcacccacgccccggtcactgcaaggggatgctgcaccccctcaaggtgaagagctrattgaggctgccaagaggaacgacttctgtaagctccargagctgcaccgagctgggggcgacatcatgcaccgagacaagcagagtcgcacgctcctgcaccacgcagtcagcactggcagcaaggatgtggtccgctacctgctggaccacgctcccccagagatccttgatgcggtggaggaaaacrgggagacctgtttgcaccaagcagcggccctgggccagcgcaccatctgccactacatcgtggaggccrgggccagaccagcagggcgacamtccccggyagcagsctgagaaggctcaggacaccgagctggcggcctacctggagaaccggcagcactaccagatgatccagcgggaggaccaggagacggctgtgtagcgggccgcccacgggcagcaggagggacaatgcggccaggggatgagcgccttccttgcccacctcactgccacattccagtgggacggccacggggggacctaggccccagggaaagagccccatgccgccccctaaggagccgcacagacctagggctggactcaggagctggggggcctcacctgttcccctgaggaccccgccggacccggaggctcacagggaacaagacacggctgggttggatatgcctttgccggggttctggggcagggcgctccctggccgcagcagatgccctcccaggagtggaggggctggagaggggaaggccttcgggaagaggcttcctgggccccctggtcttcggccgggtccccagcccccgctcctgccccaccccacctcccccgggcttcctcccggaaactcagtgcctgctgcacttgcctgccctgccttgcttggcacccgctccggcgaccctccccgctcctctgtcattccaattctgtgaagaaagtcattggtagcttgatggggatggcattgaatctgtaaattaccttgggcagtatggccattttcacgatattgattcttcctacccatgagcatggaatgttcttccatttgtttgtgttctcttttatttccttgagcagtggtttgtagttctccttgaagaggtccttcacatcccttgtaagttggattcctaggtattttattctctttgaagcaattgtgaatgggagttcactcatgatttggctctctgtttgtctgttgttggtgtataagaatgcttgtgatttttgtacattgattttgtatcctgagacttcgctgaagttgcttatcagcttaaggagattttgggctgagacgatggggttttctagataaacaatcatgtcgtctgcaaacagggacaatttgacttcctcttttcctaattgaataccctttatttccttctcctgcctgattgccctggccagaacttccaacactatgttgaacaggagcggtgagagagggcatacctgtcttgtgccagttttcaaagggaatgcttccagtttttgcccattcagtatgatattggctgtgggtttgtcacagatagctcttattattttgaaatacgtcccatcaatacctaatttattgagagtttttagcatgaagggttgttgaattttgtcaaaggctttttctgcatctattgagataatcatgtggtttttgtctttggctctgtttatatgctggattacatttattgatttgtgtatattgaaccagccttgcatcccagggatgaagcccacttgatcatggtggataagctttttgatgtgctgctggattcggtttgccagtattttattgaggatttttgcatcaatgttcatcaaggatattggtctaaaattctcttttttggttgtgtctctgcccggctttggtatcagaatgatgctggcctcataaaatgagttagggaggattccctctttttctattgattggaatagtttcagaaggaatggtaccagttcctcctcatacctctggtagaattcggctgtgaatccatctggtcctggactctttttggttggtaaactattgattattgccacaatttcagagcctgttattggtctattcagagattcaacttcttcctggtttagtcttgggagagtgtatgtgtcgaggaatgtatccatttcttctagattttctactttatttgcgtagaggtgtttgtagtattctctgatggtagtttgtatttctgtgggatcggtggtgatatcccctttatcattttttattgtgtctatttgattcttctctctttttttctttattagtcttgctagcgttctatcaattttgttgatcctttcaaaaaaccagctcctggattcattaattttttgaaaggttttttgtgtctctatttccttcagttctgctctgattttagttatttcttgccttctgctagcttttgaatgtgtttgctcttgcttttctagttcttttaattgtgatgttagggtgtcaattttggatctttcctgctttctcttgtgggcatttagtgctataaatttccctctacacactgctgtgaatgcatcccagagattctggtatgttgtgtgtttgttctcgttggtttcaaagaacatctttatttctgccttcatttcgttatgtacccagtagtcattcaggagcaggttgttcagtttccatgtagttgagcgtctttgagtgagattcttaatcctgagttctagtttgattgcactgtggtctgagagatagtttgttataatttctgttcttttacatttcctgaggagagctttacttccaactatgtggtcaattttggaataggtgtggtgtggtgctgaaaaaaatgtatattctgttgatttggggtggagagttctgtagatgtctattaggtccgcttggtgcagagctgagttcaattcctgggtatccttgttgactttctgtctcgttgatctgtctaatgttgacagtggggtgttaaagtctcccattattaatgtgtgggagtctaagtctctttgtaggtcactcaggacttgctttatgaatctgggtgctcctgtattgggtgcataaatatttaggatagttagctcctcttgttgaattgatccctttaccattatgtaatggccttctttgtctcttttgatctttgttggtttaaagtctgttttatcagagactaggattgcaacccctgcctttttttgttttccattggcttggtagatcttcctccatccttttattttgagcctatgtgtgtctctgcacgtgagatgggtttcctgaatacagcacactgatgggtcttgactctttatccaacttgccagtctgtgtcttttaattggagaatttagtccatttatatttaaagttaatattgttatgtgtgaatttgatcctgtcattatgatgttagctggtgattttgctcgttagttgatgcagtttcttcctagtctcgatggtctttacattttggcatgattttgcagcggctggtactggttgttcctttccatgtttagcgcttccttcaggagctcttttagggcaggcctggtggtgacaaaatctctcagcatttgcttgtctacaaagtattttatttctccttcacttatgaagcttagtttggctggatatgaaattctgggttgaaaattcttttatttaagaatgttgaatattggcccccactctcttctggcttgtagggtttctgccgagagatccgctgttagtctgatgggcttccctttgagggtaacccgacctttctctctggctgcccttaacattttttccttcatttcaactttggtgaatctgacaattatgtgtcttggagttgctcttctcgaggagtatctttgtggcattctctgtatttcctgaatctgaacgttggcctgccttgctagattggggaagttctcctggataatatcctgcagagtgttttccaacttggttccattctccacatcactttcaggtacaccaatcagacgtagatttggtcttttcacatagtcccatatttcttggaggctttgctcatttctttttattcttttttctctaaacttcccttctcgcttcatttcattcatttcatcttccattgctgataccctttcttccagttgatcgcatcagctcctgaggcttctgcattcttcacatagttctcgagccttggttttcagctccatcagctcctttaagcacttctctgtattggttattctagttatacattcttctaaatttttttcaaagttttcaacttctttgcctttggtttgaatgtcctcccgtagctcagagtaatttgatcgtctgaagccttcttctctcagctcatcaaaatcattctccatccagctttgttccgttgctggtgaggaactgcattcctttggaggaggagaggcactctgcgttttagagtttccagtttttctgttctgttttttccccatctttgtggttttacctacttttggtctttgatgatagtgatgtacagatgggttttcggtgtggatgtcctttctggttgttagttttccttctaacagacaggaccctcagctgcaggtctgttggaataccctgccgtgtgaggtgtcagtgtgcccctgctggggggtgcctcccagttaggctgctcgggggtcaggggtcagggacccacttgaggaggcagtctgccagttctcagatctccagctgcgtgctgggagaaccactgctcccttcaaagctgtcagacagggacatttaagtctgcagaggttactgctgtctttttgtttgtctgtgccctgcccccagaggtggagcctacagaggcaggcaggcctccttgagctgtggtgggctccacccagttcgagcttcccggctgctttgtttacctaagcaagcctgggcaatggcgggcccccctcccccagcctcgctgccgccttgcagtttgatctcagactgctgtgctagcaatcagcgagattccgtgggcgttaggaccctccgagccaggtgtgggatatagtctcgtggtgcgccgttttttaagccggtctgaaaagcgcaatattcgggtgggagtgacccgattttccaggtgcgtccgtcacccctttctttgactcggaaagggaactccctgaccccttgcgcttcccaggtgaggcaatgcctcgccctgctttggctcgcacacggtgcgcgcacacactggcctgcgcccactgtctggcactccctagtaagatgaacccggtacctcagatggaaatgcagaaatcacccatcttctgcgtcgctcacgctgggagctgtagaccagagctgttcctattcggccatcttggctcctcccctcttttccctttctgaacccaggccacactccagaatcaggtactgcgtctagttgtcatcccttcagttactttctatccaaaagagctcctcattctttccccatcttccatggccttgatgtgttaacttctgtactttgtctttaattctgtataatttccctctaggcctgggtctgtccagacccccatgcccagacccaggccatgcatccttggccgcaatgctgaagacacgatgctctgctcttctcagggcatcacatcagtggacagcatgattcagagtcgtcctacgtcaccatcctacaatcatgatgcaaagctcgatcacctcatgtagtggacgatctggcttccaaagatgtcctagacttaaacctagaaatctgcaaatatattaccttaaattgctaaaagggctttgcagatgtatctaagaccttgagaggaggaaatgatcctggattttccaggtgggtataatctggaatctttataatttgcataaagagcaaaacctttattaaaactacagagaactagagaggcagcaggatgagaaggactcagcccaccaatgctggctttgaagatagaggaagggggccatgagctggggaacaacggcagcctctagaagctggaaaaggcagagaaatggattctccccctccagtctcctgaaaaaaacagtcctgccaacaccttgatattagcccgataagacctgtgttggatgtccaaccttcagaactgtgaagataagtattgttaaagctgccaagcatgtggcataatttgttatggcagcaatttaaaattaatacacgtggtcaaatggtcaaaatgactggaagtcactgaaatggactgggtttatctgtccataaaagcttattagtagaacatcatgcttctcatgtgtctgatcataggcttgagaacaagggcttggcaattgtcagaaaccaagagagctctaaaatgccaagaaattggaactagaaaatatagtacagtaacagtttcattcttggactttaccccaccaaacctatacacaatggggaatggcaacttttcaaaaagttagggaggaggagaataagctagaacagcaaaacaacaaacaaccccaaataaattgaaggcaaaccaaaccaaaaacagatacacacctcaccaaaggagtttagattttatcctgaagacctcagagagattctggagagccttaagcatttgtaacttcactttgtaaaagtgaagttttccatccagcttctcccaaaatctgcacactagctttccattttaaaatatagcttctgattgtctcttggatcctaattccacactcaaactccagaccagtagcaaccctgattccttttgtatcctttccttcctttttttccctccttcctccttctctcccatttctctttctctttttccctccctccctcccttccttccttcctcactccc

SEQ ID NO: 94675 - DNA, 125868 bp, Homo sapiens
tcctgctcagacccccaaagtgttgggattacaggcatgagccaccatgcctggcctacatgaaatatatgcttatttggttttgatttttacacttttatgaagccaagatgaacccccattaccccccaaaaaggaacatcctactagcttcacattagaaatggaatatttacacaatataaacagagaaaactgagatggggtgattaggagatttaataagtcagagtaaatcttaaagggaaatacaatgaaatgtctaaggtaaaggcagaaattaatagaaatagtataataggatccataaagtcaaacactaattcatttaaaaaaactaataaatttctgtccagatttattttttaaaaaagctaagttttaaaaaggaccacagtatggctgtcaccttgattacagccttgtgagaccctgagcaggagactctcagaaactgtgagagttgctcacgtctgtaatcccagtgacttgggagggaaatggaaggattgcctaagcccaggaattggaggctgcagtgagctatgatcgtgccactgtactccatcctgagtgacagagcaagacctgtatctaaaaaaaatatttaaaatgtgaataactattgatgttgtaaagattaagagatttatttttaaagaagctattatgaacaatttcatggcaacaaatttgaaaatttcatgggcaaattactcaaaactatgttatcaaaataattttaaggaaaaactgaataatcattaaagaaatttgattggtattttaaaatcttcccagaaaacaaaccctaaactcagagaagttttcatgaatgttctactgaacattcaggaaaaaaataattccaatcttatataaattattccaaaacagaaaaagaggaagcactccccaattaatctcaatcatggagacaaatttgaaaaatccaaagcaagatagtaaagcaaattcagcaatgactagaaatcattatcaagttgagtttgttccacaatgtcagggtaatttaacaatggaggaaaaagatcacacattatctcaaaagatgcagaaaaaaaagtttggtaaaccttggcagccatttataattttttaaaaaataaatcttagaaaacttggagtagaagagaactttttaaacctgataagtggcatttacaaaaagcctacagcaaatatcttactttatgctgaagtactaaatgatttcctttaagattataaataagagcaggataatcactatcatgatttcagcattgtactgggggcctagcctatgcagtatagcaataaaaaaagtgattaggattggaaatccactctatagtaaccccaagtaaatcacaacctctctttgagtgtggatgagacctgagacatgcttacaacaacagaatatggctaaggtgatgggggtagtcactgctttgattggttcatgttatatggcaaaagtaatggaatagttactcttgtgattatgttatgttatagaagactgcttgttagcggactagagtgtgctatcatgttgtaagaaggcctgtgaatgagccacctggcaagaaaccttggggaccactaggagctgatggaaactcccagctgacagccagaacaaggcagggacctccatcccacagcttcagataactgaatcctgccaacaaccacctgagcttagaagaggacactaagttttaaaaaggaccacagtctggctgtcaccttgattacagccttgtgagaccctgagcaggagactctcagaaactgtgagaaaataagtgcatgttttaagccactaagtgtgaggttattcattatgcaccagtagacagctaataaaggaagaaagaaacaaacctgttattagagactagattacatagaaaacaaaagaatctatggttaaatcataagaattaacagaatttatttggcacttttgcagttgcatttctatatgctagcaacaaacatgtaaaaatataatttataaaaaacatttacagtagcatcaaaaatataaataaataaaatcttaataaaatatatgcaagaagattttgagtaagatgttttaaaactttaatgaaacacagattagtaataaaaataataaagagatatgggctgggtgcagtggctcatgactgtaatcccagcactttggaaagctgaagccaacagatcacctgaggtcaagagttcgagaccagactggccaacatggcgaaaccccatctctactaaaaatacaaaagttagttgggtgtggtggcacacgcctgtagtcacagctacttgagaggctggggtgggaggatcgcttgaacctgggaggttgaggttgcaatgagctgagattacgccgccactgcactgcagcctgggtgacagagctagactttgtcttaaaaaaaaccataataataataataataataataataatgagatttaattgggtagataagttctagaataaagagactcaatatcatgaagatgttaattctttccacattaatctctagatttaatgcagtttcatacaaaattccaataggatttattttattttattttttgagatggtgttttgctcttgctgctcaggctgtagtgcaatggcacaagctcagctcactgcaacctccacctcctgggttcaagtgattctcctgcctcagcctcccgagtagctgggattacaggtactcgcccccacacctggctaattttgcacttttagtagaggtagggtttcagcctgttggtctgactggtcttgaactcctgacctcaggtgattcacccactttggcttcccaaactgctgggattacaggcgtgagccaccatgcctggccccaatgggatttgttatggaacttcataaatgtattgtaaaatcatcatagggagaaacaaagaaccaagaagagccaaaatactcttgaaaaagaggacaaggtgagggagttgccctaatttggaagctattaagatttattataaagctataataattagacatgatacacacagatagttaaatggactggtggaacagaatagagaacacagaaatagaatattagtatatggaaatttgacacgtgataaaatcagtgctatggttttgtattagtccattttcatactgctatgaagaaatacccaagactgggtaatttataaagaaaaagaggtttaatggactcacagttccacatggctggggaggcctcacaatcagaaagcgaaggagaagcaaaggcacatcttacacagtggcaggcaagagagcgtgtgcaggggaactgccctttataaaaccatcagatctcataagacttactcactatcacaagaatagcatgggaaaaacccacccccatgattcagttacctcccatcaggtccctcccacttcatgtggggattatgggagctacaattcaaggtgagatttggatggggacacagccaaaccatatcaagtttgaatgtcccctccaaaactcatgttgacccttaatccccaatgtggcagtattgagaggtggggcctttaagagttgattggatcatgagggctctgccctcaatggattaatccacacatggattaatggattaatgggctatcatgggagggcactggtggctttataagagggagaatctagcatagcacctgagcatgctcagccacttcagaactctgtagagtccccaccagcaagaagtctctcaccagacatggccccttgaccttgacatctcagcttccataactaagaaatacattcatttctttataaattctctgcttcataccatacatacaaaaaatccaattctgtcggatttatgatttaaatgacaaacaagatttaaaatgtttgaagcaggctgggtgcattggctcatacctgtaatccaagcactttgggaggtcgaggtgggcggatcacttgaggtcaggagttcaagaccagcttagccaacatggtgaaaccctgtctccactaaaaatacaaaaaatttgccaggtgtggtaatcccagttattcgggaggctgaggcaggagaatcacttgaacctgggaggtggaggttgcagtgagccaagatcgcgccactgcactccatcctgggcaacagagggagactccatctcaaaaaataaagaaaaaagaaaaaaaaaggctgggcgtggtggctcatacctgtaatctcagcactttgggaggcgcaggcaggcacatcacgaggtcaggagactgagaccatcctggctaacacggtgaaaccctgtctctactaaaaatacaacaaattagccgggggtggtggcgggcrcctgtagtcccagctactcaggaggctgaggcaggagaatggcgtgaacccgggaggcggagcttgcagtgagccgagctggcgccactgcactccagcctgggtgacagagtgagactccgtctcaaaaagaaaaaaaaaagtttgaagcaaaatacaggagaatatctttatggctctggtgtaggcaaggatttaagatatcaaaagcataatctctgaataaatttgactatgttaaaatttagaacttcttttaagcaaaaaggcaaaaccaagagtgaaaagataagcatcaaacttggagaaatattcacatataatcactaaatggttagtattcagaaaatataaagaacttctgtagccaaaagtaccatttatgaatctacttattgatggatgttttctgaacttcttttgcccagaggaaaaatagtgcattaaaaagcttctgtccggccgggtatggtggctcacacctgtaatcccagcactttgggaggctgagataggtggatcacctgaggtcaggagtttgagaccagcctggccaacatggtgaaaccccatctctactaaaaatattaaaaacctagctgggcatggtcgtgggcacctgtaatcccagctactcaggaggctgaggcaggagaattgcttgaacccaggagacagaggttgcagtgagccaacacagtaccactgcactccagccttggcgacagagtgagactctggctcaaaaaaaaaacaaaaaacaaaaaaacacttctgtcccaaacaaacaaacaaacaaacaaacttctaaaaatcaaatagaaggtggcctgggcacagtggctcacgcctgtaatcccagcactttgggaggctgaagtgggcagatcacctgaggtcagaagtttgagaccagcctggctaacaaggtgaaaccctgtctctactaaaaataaaaatttagctgggcatggtggcaggtgcctgtaatcccagctacttgggaggctgaggcaggagaatagcttgaacctggcaagtggaggttgcagtgagccaagatcgcgccactgcactccagcctgggtgacaagagcaaaactccatctcaaaaaaaaaaaaaaaaatcaagtagaagacaaccccccaaaatagtgggcaaatgccatagcatttcatacatttcatagaagaaaaaatataagtggctaataaagatataaaataatgctcagggaaatgcaaattaaaaccatattgaggtagcatttgtaccccttagatgcataacccttagaaggccaaaaaatcaaaagttagctggtattactttcacactgttggtggcactgtaaattggcaacccctttttggaattacataattatatttataatatatgttctatataattatataacatttatttcatattcatattaaacaagtatattcatgaatatataaataattgtgtatatgtattgtatatatttatatatgtaattacataatttatgaaaatcaatcctgttcctggagaacatacccccccaaaaaaacctcttgcagataaggactgggaagcaagtacagaaatgatcgaagcagtacaaatcaggggagaacgtgcccaagacctggagaactgataataaattgtggtttatccttgcaatggaacactatatggaagtgaaaatgattgaaatagagctatacacatcatcacagacaaatttcagaaacaacgctgagtgaaaaagtaagttgcagcagaatacatgcaatataatagtattttataaaattcaaaagccaaattttgaatatactttcttagctataaatgtgataaaactataaagaaaagcacaggaatgatcaacataacacggtgattgaggagggacacacaggggcttcgacagtactgtctctgttcctcaagttggatggcaggttcacaggtggtcatttcctcatgctttcatgttatactcattatatgatgactatattataattatagtatatgttatgcatattatacattatattatacatattttgtatgtaacagtgtttcataatattttaaggaatgagtggaaatgagcacataatgtagacatgcagtgcctcgtcattagtagagtctcagaattatcagattccaagataattcctacacaaaaacaagcaaacaaagagcatgttatctagaatgaaaagaccatccatattctaataaactgagacaatcaaatagggaatccctcttttaaggttggcattcgttataygcttggaagtgatttgaagcagaaattagttgtgaataaatcttctccttattaataaaacagaagcttgtttttgatgtcatattatccctgccaagaaattaaaaatcctggaggtaggctgggcatggtggctcacacctgtaatcccagcactttgggaggccaaggcaggcagatcacttgaggccaggagttcgagaccaacctggccaacatagtgaaacctcatctctactaaaaatayaaaaaatagctgggcatgatggcaggcacctgtatgtagtcccagctacttggsaggctgaggcaggagaatcacttgaacctggtaggtggaagttgcagtgagctgaggtcacaccattgcactccagcctggtgacagagtgagactccgtctcaaaataaataaataaataaataaataaataaataaataagaaaatcctggagatagtattacttagaacctcagtcacttattaatcaatctaaatttaatccttgattttataatatctttctatagagttttgttttggttttgctttgtttttagaaaaggcaggtgcatttaccctcttaggggatgaccattggtrttttaaaaaataagacatttgctgagaattccttaaatttttctaattttcactagycagtgatgacattgtccctttttgtagatagctttggaagatgatgatacctccacagttgggmccatgttgttaaaaacatccttcgtttgactatttatacatttggttctaaagaaggtgttatccttagattcttggatctaaagaatatatatatattwtttttttgtttgtttgtttttttgagaaggaatctcactctgtcacccaggctagagtgcagtttgtgatctcagctcactgcaacctccgcctcctgggttccagtgattctcctgcctcagcctcctgagtagctgggactgcatgtgcccgccaccacgcctggctaatttctgtatttttggtagagatggggcttcacgatgttggccaggctggtctcgaactcctgacctcaagtgataacacccgtctcggcctcccgaagttctgagattgcaggcatgagccaccgtgcccagcaagagtatattatcttaagattcttgcctcgttactaytcttaaaattgctccaaaacttgcttaagtagtcagctttaaattatgtaaatatagacaacaaaactcttaatcctaaaggtgcttttaaaattcatgcatttatacatggcatgcaaattggctacaaattgggaagattttattctaagtaaccaaatcttaaggagctaaagcaatcctgctttataaaatacattaattcaaggactaagcaattcctgaaaacagactkatttactgtgcttcttaatatttcctcaaactagtatatgagtgatggtggtagagggaggaagtagctcatacttggaggaacaaacagytgctggaatatgcttgtggtttagagcttcttttaaaaatcctgttaactgcaaaagaaaggaaggactaatattttccatgatttcagtaacatctttatgaagatgctccttttgaatgtggtacagaaagttagaaaacccttaggcatggtatctggcatagtgcccccaagggagcgtttcatatacagacggtctggggcttatgatgctttgacttaaaatttttcaactttatgatggttccaaaggtgatgcacattcagtagaaaccatacttcaagtccccatacaactattctgtttctcatgttcaggatgttgttcccgtaaattacatgagctattcaacacttcataagaaaataggatttgtgttagatgattttgcccaactgtaggctgatgtagcgttgtatgtttaaggcaggctaggctaagctctgatgttcagtaggttaggtgtattaaaggcacttgacttacaatattttcccttcctaataaacccattgtaagtcaagaagcacctgtatctgatagaggtctacctttaccaatttaaatagacaaatttaatgtkcctgtcttgcttttaaattgaagagcaacagcagatytgaaataaataccgcagttagctttgcattcttgactatttattgaacagttcagagggcaaggaagcaaagagaaacgctctgagtgtgtctttgcttgccagctccttaattgtcaacaattctacagtggctttcctgtatttttctgtgcttttttctgttctctgctttggagtcagaaacttcagttcaaatccctgccatgacaacataacaatctatcagcctgtttcctccttcataaatgatgggtataatttccatctcacaggatttgtaagtgttagaattgaatgaggtaatgtattaatacatactacttgcttcaaaaatartatccgtctctttccacatgcttgtcagaactccagtgccacaatggacagagtgagccactktcttcactgtccaatatcaatttgggaatggcagcttgctgygtttgtattttcagatttagttaacataaccttccatcagtgaaatagaatacttaatctttattatatattcctctcattttccaatatctttaaagtcattttatcactattttaaaaatcaattttgtgaactcttgcttttgcatggagaaaaatgggattgatcaaacattgaaatgggatgattggttctctaatttctctgtatttagtcctacacctaatagcttcaagctgtctcctaggaagacaggactctgggtatgtccaaatgagtggacactcttaatgagttttctctgttgtatgctataatatctttttgagtgttccagagaactgaataaaagtagatctctccatattaactaaatgataatggctaacatctgtgtggtactttgcatatatagtgttttcacatataacactcattcattaatttgttaagcatttactgagctctgctatgtgctatgcctctactagacatcagagtatagtgtactgaagtactccttgaccttgaggtgtcatcataaattgacttcccaagaaagccttctcctcctgctttaagtcactctgcccttcttattgtcaagtacaatactctgtctcctttacaatattttctgtgctgatctccttaaaggtaggggttgtgtcagtttcggtcacttctgtgaggtcctgactgtaagacctagctattgctaggcccaagatgggcactcaataaaaccagttgagtgagtggaagaatggatgaaggcaacatgctcataggaaagagacaggctacagattcattgctacagaatgtgatgggtactaaggcagagaggtgggttgagggcattgtgttagtctgttttgagctgctataacagaataccacagactgggtaatgtataaagaacaagaatttgttttctcacaggtctggacgctaggaagtccaagatgaaggcactggcaggttcatttatctggtgagggtctagtctctgcttccaagatggcatcttgactgttgcatccttgaggagtgggggaagaatrctttgtcctcataacagaaggcagaagaaaaagagggatgaactccctctttcaagcccttttataagggcacctaatcccattcacaagataggagccctcatggcctcatcaccttttaaaggccccacctcttaataccatcacattagcaagacctaagttttggaggagacacattcaaaccatagcaggtataaaagacaagcatttaatcagactgtttgtcagytgataatttttccttccctgcaggagacctgtctatgagtggctgggaggcctgtttaattctggggtttagaattaaaatggccatctgcctgcaagtagagagaagctgcattctcccaaatcagctttgttcataataaaagtagcattttggcctccatatgccatactctttattgtctatttcttaaacagttgacaactcggttagagaagaggcaggctatgtattgccccatcctctacttttttttctttttttgaggtagagtcttgctctgtcaccaaggctggagtgcagtggcgcgatcttggctcactgcaacctctgcctcccaggttcaagcaattcttctgcctcagcctcccaggtagctgggattacaggtgtgtgccaccatgcctggctaatttttgtatttttagtagagatggggtttcaccatgttggctaggctggtcttgacctcctgacctcaggtgatctgtctgccttggcctcccaaagtgctgggattacaggtgtgagccactgcacctggcttactttttttttttaactaaatacctaattgttatgttattattttgtctattattgctctccttaacacatgtaaaaatagaccaaactgacatgatcatattttagaaaaatactattttctttctttgaaaaggaaacagaagaaaaaagataaatgacttaaattttctacttaacatagaattggaaatcccagtctttgtggctgccaaaaaaaaaaggataaatgaccaaaaaatgaaatcaaataaaaatctttcatgactcttttcctatgagtattaatacgaggaaacttaatagttctaaaaataaagatgtaaattgctgcagaatgtaaaacaggataaagtcacaatagccaaaatgtggaaacaactcaaatgttcatccatggatgaatggataaacaaaatgaggtatagatgtacaatggaatatgattcagccttgaaagargtacaattcttatatatgctacaacacagatgaaccttgaggacattatactaagtgaaataagccagtcacagaagaacaaatattatatgaatccacttatgtgagacacctagaataggcaaattcatagagacagaaactagtttccaggggataggggtaggggagaatagagacttagtgtttaatgggtatagactttctgtttgggataatttttttaaaagttcagagaatggatagtagagatggctacataacaatgcgaatgtacttcacaccactgaattgcacacttaaacatggttaagatggtacattttttgtgtattttaccataagaaaaaaaatttagggccgggcaaggtggcctacatctgtaatcccaacacattgggatgccgaggtgggaggatcacttgagcccaggagtttgagaccagcctgggcaacatagtgagaccccatctcttaaaaacaaatggtgtgcgcctatggtcccagctactcaggagrctgaggtgggaagatcacttgagcccatgagttcaaggcggcagtgatctgcgatcatgccactgcactccaacctggacaacagagtgagaccctgcctcaaaaaaaaattaatatgataragcacataccatgtatataataaagatacttcaacyatttgaaggagtgttstgttctcgagccaaagagagaagcacatattatccccaaaaaatgcacagttagcaaagcatccaggraagctgraagggctggtgtttggtggctgaggtcagtagatgtgactgctyggttttcggcaccccatgggtacttaccgtcatcttcgtagccaccactgacagggtcctgcttgacagactgactctgtgctgtgtatatcacatacattatcactgaatttttgaaacmccttataaagtagacattattccaatttataggaatttaatacctttctgaaatttgctaagtggtgcagccagcacttaaaccctagatcagcagactccaatagtgaagtactttcctcagtatatcccaaggatggcttttaagaataattgtatggataatctggagtaaaaggaatatgaatttcttcatttaggttcagcaagatgtgctgacaagatgaccacaaatgcaggaatgttggagtggtagttaatatttagatgagaaatcattaaagagtggaatagcaatgtgagtttctggggctacttcagtagggctttttggagctgattgagggggcaaaaattaaagccagaaagctcagtggagyaaatgtcatagtggccacagagaaacaaagtttcaaartgagatgctaagtgagaaacagcaactgaggagagaagtaatgtttccaggatcacaaagggcataaggagaattgttcttttagactctaggtgagcttgtagtaatccaaggattggtgatttaggccgctgaactctggctctgagtacatctctaatccctaaaccttcaccaagagggatcaggagaagaaagtrggggaagggagtcaggtatgccacatatctgctactgaaaaatgcctggatgggaaaggagtttgaaatgttgtcctaaaatgaagtttctgagttcgatgggctgaattttaccatgtgttcactattattactgtgtaaaatcaagagatttaaataagattaagatctaattagctttctgagatattgaaaactaagaacccagctgggcatggtggctcacgcctgtaatctcagcactttgggaggctgaggcgggcrgatcacctgaggtcaggagttggagaccagcctggctaacatggtgaaactctgtctctcttatcagtgggaaccaaacctgagtctgcaggcttagggcaggggcccagacaatgagaggggctcttctctttgagacttgtcatctagaactcattgtcactggaagacagagcctaaatgagcctatcagttgccttgggttacaagaacaagttttcattaattaattaattatttatttattttgagacagattcttgctgtgttgcccaggggctggagtacagtggcacgatcttggctcactgcaacccccgcctctgggttcaggtgattctcctgcctcagcttcccgagtagctggaactataggcacatgccaccacacctggctaatttttttatttttagtagagacagggttttgccatgtttccaggctggtcttgaactcctgacctcaggtgatccgcccacctcagcctcccaaagtgctgggattacaggcgtgagccaccacacccagccaagtctgagcttttactggggaagccaagtagcagttcagggacttgtggccaccaaccgtctctgagattcaaggtctgttctttctactggggactgagatgggtggataaccatgcagacttaaggaggagtcatatcaatgattcagcctcgaaggaagtctgagctagcgagaactggaggaataatttccctctgtaggaattcctgctctacctacttactacgggagtaaagtggtcatgatttaaacagtcytgtctatacctgttatgttataaggatgtgttcatggccctatctgctaagagtgagttgttcttataaataaaataaaaattagtaaatttatacacacactatttgttatgcaaatcctaagagtgatgttccaaaaaaacaaattttggaagtaaataagtatataaataggctttttttttttttgagatggagtttcgctcttgttgcctaggctggagtgcagtcatgcaatctcagctcactgcagcctccgcctcttggattcaagcgattctcctgcctcagcctcctcagtagctgggattacaggtgtctgtcaccacgcccagctaattttttatatttttttttagtagagaaggggtttcaccacataggataggctggtctcgaactcctgacctcaggtaatccacctgcctcagcctcccaaagtgctgagagtacaggtgtgagccaccgcacccggccaagaaaggtactttagatagtgccagagttgaggatttggcctgtgacttactgcagttgccacactgcagtttccacactgtggccttagaacagtcttatccagtcctgaaaccccagtgccttggaaacatcaggactggtcagaaggacagtaagtcctcaaggcgccagcccctgcttctccacacagattgagggctaagtattccaagctctctgcaggacccataacctggatgtggacaccaagtcctkctaggacctgctcccagwagagttgatcccagccatgaaactgccctgatgccttcatcctgtatcagccttgtgagtagccagtagctgggaccacaggggtgcaccaccacacctgcctaattttttttgttgagatgggttttgtcatgttgcccaggctggtctggaactcttgagctcaagtgatgtgcctgccttggtctcccaaagtgctgggattacaggcgtgagccaccacacgcagcccaatttgtgatcttttatgcattgtttctctcatgtagcatgttttcaaggtttatccaacttgcagtgtattaatgctgaataatactccattgtgtagatatactatatttttatgtttttaattttatttttaattggtacacracaaatatttgtacatatttatggggtacagatgatatgttkttacatgcatagaatgtgtaatgaccaatcagggtattaaaggtatctgccactttgagtatttgtcatttctgtatgttgggaacatttcaagtcctcttttagagctattttgaaatacacaatacatttttgttaactgtagtcaccctactctgctatagaacattagaacttattccttctgtctaactgtattaaccaaccactcttccctgccaaccgacacgcacttcccagcctctggtatctggtatttttgtagagatgcggttttgccatgttggccaggctggtcttgaactcctgacctcaggtgatccacctgctttagcctcccaaagtgctgggattacaggcatgagccaccacgcccggcctttttttaatgtttattccacattgtgtcagtcctcacaygtcttctgggatccatctgacatgtaatctgttggttttccagcagtaataatttcacgtaaaatcctaaatctgacctgaaatattttctcttctcttattgagaagagattacctwtacatcaatattaaccattttgatatactgagatataattcagttggttcatgactgtgccaatagctccatttttatatacaaatagacatgcctaaatccagttttttttgtatgcacattttatttaattaatttttaacttttattttaggttcaagggtacatgtgcaggtttgttatatatgtaaattttgtgtcatgggggtttgatgcacrgattgttttgtcactcaggtgataagcatagtacctgataggtagctttttgatactcaccatcctccagcctccaaccctcaagtaggccccaatgtctgttgttcccatatttgtgyycatgtgtactcaatgtttaactcccacttataagtgagaacatgaggtatttggtttcctgttcctgtgttagtttgcttagaataatttttaagctggagctggatggcctccaggcttttaggcttttagrctggattgctgcaaaggrcatgatcttgtttttattttatggctgcatagtattcyatggtatatgtgtgccacattttttawattcagttcaccattgatgggcacctagstaaattctgtgtctttgmyattgtgaatagtgctgcgatgaacatatgtgtgcatgtgtcttcatggtagaatgatatttatattcctgtgggtatatactcagtaatgggattgctgggtcacagggtaattctcaagttctttgagaaatcaccaaactgctttccataatggctgaactaatttacatayccascagtagtgtataagcattccctttcctctgtaactttgccagcatctattttttggctttttawtaatagctattctgactggtatgakatggtatctcattgtagttttgatttgcatttctctagtattagtgatgttgagcattttttcatgtttgttagctgtgtgtatgtcttttgagaagtgtctgttcctgtcctttgccccctcctttttttttagtgaggttgttttttgcttgtaaatttgtttcagttccttatagattctggatactagaaccttgtcagatgcataatctgtaaatattttttcccattctgtaggctgtctgttcaatctgttgatagtttcttttgctgtgcagaagctctttaattaggttccacttgtctgtttttgtttttgttgcaattgcttttggcatcttcatcatgaaatcttcataaggtcctatgtcagaatggtatttcctagcttatcttccagggattttatagttttaggttttacatttaagccttttatccatcatgggttgatttttgtttgtggtgaaaggaaggggtccagtttcaatcttctgcatatggctagtcagttatcccagcaccatttgttgagtaggaagtcctttctccattgcttgtttttgttggctttgtcgaagatcagatggttgtagctgtgcagctttatttctgggttctctaacctgttccattggcctgtgtgtctgtttttgtaccagtgccatgctgttttgctcactgtagccttgtagatggtttgaagtcaggtagtgtggcatctccagcttcattctttttgtgcaggattgctttggctatcctccacatagctagtcaatcacaagttgtactaattttttctgctgtttctcaaatctgtctctcctctcaattcttactaccaccctggtttttcaggccctcaacatctctcacctaagctgtgtagtagcctcctaactgatccctgaaacttcaatgttgccctctctcctcaccactgaaagacaggctacataaaacaaaattatcatgagacttccattcttaaaatccctttttgactctctattgcctatgaaataatgtctgtacttcttaatatactgtgcaggcatctcctgttactccctgctctacatttgttactgcagtaataggtaaatgtttataatttcccctgaagtccctctgctattcagtgcttccatgtatttgttcattatgatctttttctctgaaactcgctccccactttttctcctggtttattatttattgtccttcacgcccaagctcaagcatcatctttttcagaaaacctactttgaagttccagagtggaccaagggccacttttaatgctccccatagtgytgatctctattttttcactttaaacatacttttaaacctgcttcctgagtataaagtttgttataattttaatatttgtatttttctatgtctttttcttctctttatggtttctgttgactcctgcttatggcagtttgactcttcaactctgttaaattttagaaatagctcatatttgtataaactttaactttgggtatcctgagagacyggaattgagatgatttgcctggtttctgcttggttctggaagtactaccaatcaggaaccattctagtttgatttattggtttgaggtttcttggactatgaatatggtgtaaattcaaattccagcctaagagtaaagctggttagaaaacattagggaagacttaaaattattaatgttttaaaatctactgcctgcagactgatttgcttattggttcacttgtcatatccttccaactttgtcttttctactaaatatatagcagattttggtccytggatttatatggaggtctcagactcagttscctactttgtcaggtttaaatcctattagtcagttaaccagaaaaattctagatccccagcattgctgaacagattcccaggaatgtgtcagagcatttcaaagtcccctattgacatctcattcccagctttttaaaaaagaaagtattttgacgttcctattcattgccccgattcctatttgctaccgcaggcagccacaatgttaactaacaaagctctaggtttttggttttggcacacttccagggcatctctggcttctatgttgactgatgactttagtttcacctctagattgtgtgtgcatgtgtgtaatcattttgtacttccttcacattttgcgagttcagaaatatatttaaaagtgtatttggggctgggcatggtagctcatgcctgtaatccctttgggaggctgaggtgggacgataacctgaggtcaggagtttgagaccagcctgaccaacatggtgaaaccccgtctctactaaaaatacaaaacttagctgggcatggtggcatgcacctgtaatcccagctactagggaggctgaggcaggagaatcacttgaacttgggaggcagaggttgcagtgagccaagatcgcaccactgcactccagcatgggcaacagagcgagactctgtttcaaaaaaataaataaaaaataaaaataaaagtgtatttggaagtgatgtcactaaaaatggcaagctaggaaccttcaaaaattcctttattcataaaagcagctaggaaaaataaaagcaacttttcagatctctgaaaatatccaaaggcttgctgcaatcttgggagcatttattcaagaatgtaagctgaattttggtgggaatagtgagctttgtagtgttcttactttatgttcattatatccttccagctccatggtagccttgaaaaccaacatcctacaatcttggtgaaaaacaagctcctgggagccatagaaaggaacaaaatggggttgggactcattcaaagcyttattcccagagaaacgtcattacgtgacctgactaggaggtccaaggaagaccccatgcacaaggctatctttatttggcctgacttagagctcccccagcctttgttcatatttgttgaagacaatcagaggcaattgctgaacataatggctacctggggtatagataagttgagatacacaatatgctaacaaaaaatgtaaacaaaggctgggtgcagtggctcatgcctgtaattccagcactttgggaggctgaggcgggtggatcatgaggtcaggagatcgagaccatccttgctaatgtggtgaaaccctgtctctactaaaaaaaatacaaaaaaattagcttgacatggtggcgggtgcctgtagtcctagctactcgggaggctgaggcaggagaatggcgtgaacctgggaggcagagcttgtagtgagccgagatcacaccactgcacttcagcctgggtgatgtagcgagactccatctaaaagaaaaaaaaaaaaaaaagaaaaaaaaagtaaggaaaacaaaagaaaacaaagaaaaaaacaaatgctgagagtactaaacctgcttgctgtcagaagacatttctgttcatgtcttccacctacaaatttaatgtcttttccatctctactaagtacttatcatgcactgtagctgtaacttttgcagcttttgacagcaaaactggcacaaatttctttgttcttcttcacaattttgtgagtggaggatttttccttactgtaaatgttagcaacctcagcctataatatttttcttttcttattatgtcagagactttcaccttttcacttaaaggaagcacactgtggcttctctctggcatatccaaattgccaggataattaccattgcatattgggccaattatgaagtgaaataaggtttacttgtataccacccctgtgatgccatgacagttggtgtgataatcaagatggctactaagggtctaatgagacttattaatcaagaattctatatgtagcaaaaatatccttcaacattgaaggagaaacataaggcattaagtatcttaggacatttaagacattcctcggtaaacaaaactaaaaaaatttgttgcttgaagacatctctataagaaatactaatgggagtcatttagactgaaaggaaagaatactaggtagtaactcaaatccacatgaggaaataaagagctgagaaagataactatatgagtaaatataaaaggcagtataagcataaagcaattctcataaatgggttgatgaacatagagtatatgaagatatggtttataaggcattaacagcacaatggaagagagagggaatggagctacataggaaaaagtttatgtatactgttgtaattaagttggtattaatatgaactacatagttataaatcaacatgttaattgcaatatccagggcaaccactaagaaaacaactcaaaaacgtagtaaaagaaatgacaaagaaataaaaattgtacagtataaaactatttagcataaatcttactttatcaatgattgtattaaatgggaatttctctccatttaaaaggaagaaatttgcagaatgaattaaaggacatgatcctactctatgctgtctataagagacttgttttagaccaagatgcaaatagattaaaagtatagaaaaagatataacaagcaaacagtaaccaaaaaactaactaactaaataaagagatggaatcatgataaaaaagcagaaaaaaaaacagacttaaaggcaaaaatttttattaaaaacaaaggacattttataataataagaggatcaatccatcaaaaacatataacagagccccaaagtacatgaagaaaaaattgacagaattgaagggagaaacaattcaacaataatagttgaggacttcaattccccactttcattaatagctagacaattgggcagaaaatcaataagaaaatgtaagacttgaataatactataaaccaactagatttaacagatatctatagcattctccatcccccagcaacaacagagtatacagtctttataagtgcacatggaacattccccaggaaagaccatatgctaggcaataaaacaactctcaataaattttaaaagatttaaatcatacaaagcatgttctcaactacaataaaatgaggttagaatagtaagagaaggaaatttgggaaattcaccaatatatggaaatgaaacaatgtactcttaaataatcaattggtcatagaagaaatccaagagaaatcagaacatattttgagataaatgaaaacaaaaattccacatctcaaaacttatggaatgcagctaatgccatgcttaaagggaaatttataggtgtaaattcttacattaggatggaagaaagatctcaataaataatttaactttctacctaaagaaactagaagaagggcaaactgaaaccaaagcaagtaaagcaaggatataataaatgttagagtgaaaataaaatagcaagcagaaaaacaatagagaaaataaacaaaaccaaaagttatgtgaaaagatcaacaaaattgatagcttagctagcctgatcaagaaaaaaaagaaaagaactcaaaaatgtggtaaataacttaggtaaataacaacaacaacaacaaaaaacctaaactcttagataatctggtaaagattatgaaaaaccaacagctaacattaaacttagtggkgaaagttttacatcttttctcctaagatgagraacaagacaaggatacctgcttgctttttctgttcaacattgtactggagattctagccaggataattagacaaaaaacaaaacaaaacaaaaccaaccacagaaaagaaataaaaagcatctagattggaatggaaaaagtgaaactctatttttttgcagataaataatgttgtatatagaaaatctaaggaacccacaacaacaacaaacctgctggagcaacaattgagttcacaaaagatataagatcaatgtgcaaaaaattagttatatttagaaacattagcaatgagtaggctcaaaatgaaattaagaaagtaattttatttacaatagcattaaaaaataagaccaaaacaaaagaaatgtaagactacaaaacattattgaaagtgattaagacctaaataaatggatacacattctgtatttattgaatggaagacattactattaagatgacagcactccacaaattgatctacatattcaactcagttcctatcaaaatcctagcttctctttttgtagaaattgacttgctgatctaagattcatttgaaaatgcaagggactctgaataaccaaaacaatcttgaagaagaacagtgaagttgcagagtccacactttattatttcaaaacttactataaagctatagtggttaaaattgtgtagtactagaataaggatagatatgtagatcaatggaacagagttgagagtccagaagtaagtccgtacatttaaggtcaattgattttccacaagggtaccaagactattgagtggaaaaaacagtctcttcagcaagtggtgctggagcaactggatctccacatacaaatgaatgaagttagatctctttctcacatcatacagaaaaattaacttgaaatggaagaaatatctaaatgtaagatccaaaactatgctcttagacaaaaacataggtgtacattttttatgatattgaattagtaatgatttctttttttttcctttccttttatgtggaacaggaaagctagaggggtttagagttgtctcactggttttcccctatgtcagacaaggccctgatacagcagtttttctttagagcaggtctttcacacagagaatagaatgctctgggcatatttcaaaatggttgctatacccactcactctctctatcctccaattagggtatattttgaaatggttgcttttccctttgccttgtgtaaagagcctgaggaaattttcttcagccttcatcatgagaacctggtggggtttctgcaagtaaaattcatgaaagtataaggggcccccaagacgggactccaacaagtttttaactttcaagctagtccacactcagccaccagtaaatttattgattaccattgaagtgttcctaccaattactggctctgtggcttctgctctcaggtaaactgtgattttctatagtcacccatctctctagtttttgaggaagtggtttccctgtgacctctattcttggacagatctaagaaaagttgttgattttcagtttgattatctttttttccgttgtgaagatgggagtgatgacttccaagttctctacatgttggagtgggaactggaagacctaattaacttcttaagaaactgtcaaactgttttccaaagtggatctagcactttacattcctggcattgtatgagagtttcagtttctctctatctttgtcaacatrccatctttcaaattttagatattctaataggtatctaatggtttcttattgtagttttaatctgcatttctctaacagctagtgatgatgaacattttttcrtttgcttatttgccagttgcaaatcttcattagtgaagtatctgttcacatattttgcccattttttaaaagttgggttgttttcttacaattgaagtttattttttcttatactcaaaattttaattgacacataataaattgtacatatttatgaggtacaatgtgatgtttcagtacattttacattgcataatgatcaaatcatggtaattagcatatccattgccttaaacatttaccatttctttgatgtaagaatattcaaaatcctctcttctagctagaatatgagtgtattttaaatgtacaactatttgttttctcacaatcctataaaatgatagcttgagtcaatgaggtatccccccaagtcctatcaactttgtctattttagtgaattttaatattgtctagtaaacattaaacaaacatagttattcagagaggataactgagccctctggttattctctctaacccacaaaggaagctgaacacttgatgtaaacttcttcatcagagtaaataagaagaatcccctccatttcatataaaagaaaaaataactggagagataatctctgctctgaggttattatcctgtggtctttgattttggtacattctcccccaccccatgcccttctccctcatctttaatgagtatctgtatgtatggcagaacagtatgtttttaagtctctgcagtcttgggccaagctcgttctattccccactctacaacaatcacaaaagcaccaggattctgtttggggttgccatggacgcasagttcttattacagaactgacttattctcaatacgaggtaaaaacctagaggtgaggtctctgagcaagggagtcccatcccatcctctgccctctctgttggctaatgctgtcctctcatcctcatcaggagaattaaaatcatgtaaagttttggcgggggaactagatggtggtctctggggcccatagacaggaaagtttgcttatacccagctggraggaccactaactgacattcctttcccctcccagggaccttacagagtccccttaccctcagggtactggggsacamccagtgggtgtaaggccaaatagcaataaccttgttacttgccaggaattgggtcaagatttgatttaacaagcttggttttgggaactaaaaaatgaaaaaaggaaaagccataatcttgaaaggcaacaagtgagaaaactgctaacaggatcttgattaaatttctccctcwtagagaatgttgtaccaataacacaaaacctcagacktgtgttattstggcagccgaacagaccccaggctcttctgmctggcagtggcgctggaagcagtctsatstgtaggtaagcaggtccagggcttacagggagaaactcccagaaatccagctctgccttgggttgccctggttcacgtccaaagatgtgcttgggccacatctgtggagcacaaggtggtagactgagagctttgatatttctactcctactgcagatgagctggtataactccgaaggtatggaatttgctgttgtctgtgacccagcaaataaaaatagaaaaataattagatagaaaaatagtagaaatagaaaaaatttaaaaaacaaaccaagcctcattctatgcctgttaatgtccttaaaaatacgacattttaggcagtgtgataatatgcatatactggtcactttaatctttcctacaggggcggctggttgccctaatggtgaatgctctgttcaaggatggtgagctagtgttcagctcaggaagccactccacagagatggccaccaaaagggccccagtggtcccattgcaattaacacctgaaacattgttaattattacagtgaagatcacaaatgggtttttattagtgaaattggtggcttacaaagcagcatgatggatgttacaattatatgacmttttaagatctgtgaatcaactaaagtgttttggagacagcccacccttgcataaacaggataaaggtgtatggtggtggcctcatatttagagwtgacacccaatgcttgatcctcatatgatcctatctccaggaaggtttaagaagattttggcctctgaaacattaggaatctgttgagaatgaagctttcatgcttggagcacctaaagtgcagaaagcttgcagaagcttatgtactgtgcctgcttgctactgaatgttttgttaaatgaataactgtatgtgtggcagatttggtcggagacgtacttttcattataacctggtagcatgattataaaggtgtagctaacctccacctaactcaaacttctgtggttgctcctatctaccaaaaagcatttaagaattctgcatgaccacttcagtttaggacagtttgcaattctcaccttccttagagggcaatttagctagctacttagtcatgtcccatgagggaagtcattctgtgccccaaagcagcttatcaaagtattatttcagacttcatgcaatactctccctgaaaggagttcacatctatggatgtctcatgccctttttggagattagtttcccaaggaacttgcttagcaatcctggcttgtcacctgaatctggagtaatttgaatgtcttccagttctcttcctcagtagaggatgtctgaaaaatctagtaatcatttaataaggctgcttatgtcagaaactcaaattcttacctttttggtgttttgaacattttcccttgttatgatttattcatgtattcttcataaacaatccaattattcatcctgctgaaaagtagcggatgcctatagatgcctttcttcttgtaaaaggtattgtttttccygagacctggatgaatttccaggagccattcaaggacatgagaacacccacttagaacttgaaaggttcccctcatggctctcagaccaggctaacgagatttggtcatttgaactctggcactcctttccccacaggctgaaagattagcacaatattaatgtctatctgtgcttaaaggtttgagctattgatcagagtccaaaattagtttgtgtaggagaacttttcttaaagacataaaaagataccatttaatatattgtttccaaaatgtgtttctcacacatttccattgtgagaaagaggttctgtggtcaaataagttaagaaacctcagcacactcttagagaatcccagtttttatcagcagcaaaaaaatgtatgtgatcagtttcttaaacttatttaaacgtttgaaaagttagaaaattgtggcaaagagcattaattcttgagtcttgggagtgtattaccttgaggagaatgtttgtgtatttgaaactaaaaatatgtatgttcatattgccacatactgatttttatggcataatatacggtgtasagagcaggttgtctaaaaaccaatattggcaaaatgctgaatattcagcatggttttatgaagttgacagatgtggagtgtattttgcmtgtgtcttaacttacagatgaagaaataaagttgcagagagattaaattagccaagccaggggtttcggtgctaggaagtcttgatattgtaaaatatagccatataactttaaaaaaatgaatccagacaaaragaaaacaaaatcattgtaaacacataatccactttaagttcacaaaatgttttaaacataattaaggctatgcttgacttacctacttgtttatttcctaccaagggtgaccgggaactagccattgatatagaaacattcattattcttacattttctttcttttttctgtgtcctttctctctctctctcacacacagacacacacacacacacacacacacacacactctcagaagtactggtgctgtatcctgaaattgtttctttagttcttgtcaaaattcctccgattttattttttgtgtcctgaaatactgttgagattaacatcctgattgccttccaaaatatctgactttattttttgtatgggctttttactctttggtagagttatggattcactaacagattctactatatgctctgacaactatgaccacaatgggtgagttgactgatctaagtggtgaaaaatactgggagcatcaatggcaataacagctttcaatcagagactttaagcatctttggtaacattgtttttgaaccagagtggrgaaaataagatcaggtcagaagagggatgcttggtactcaaagattgtttgtgaccccaagtaattagcagccaaaaccttaggaaactatcagaatgcctgtgtatgatactctctcaagagtgrtccaagagagkagagaatcctgcttggagaaagaaggtggtagcattggacaggcagcaaaggagccctcagcagmaagaaaggagctaagagaccctgtatctgtccctcacccttcagagctggtgccccaaactcaaagccatcatcacattggatggagcccctgcctcaggtttagtcacttgatcctatttgaggggaagcaaagatatctgtgactcatgaagagcatgaaggtggtggagggacttgataattaggaaatcaaaatgggcaagaataacgtgtgcctacaaatgggaatgaatttgaagcaaatttaagttaaatttgctgccacacatgatctggttcagtaataaagaattgtatttaaatcctgattcattaaacttttttgagagtcctaaacaatttttattaccaacacataaagacttctttccagagaaaaatgaagtaccaggtgccaaataatagatttacatgagaatttttagggacaacacattgtaatttgtagcgcaatcatagccaatttgaacaacaacaacaaaaaaagtcgtgtatrcatttatgttgtttcttrctatttacctttcaatcctttgcactgaccccaatgaattgacatcagaaatctgtgctggagtcaacaatgaaaggkgatgwcataatakatactggagatgggaggaattcaggtttgtgaaattcagtctcagaattattcatgggaaaatagttttctggacactgattctaaaattctttctaaaaagttaggtyttaagtaagctaagtcatatttaccatatcttttagattcaaggaattttgttgttcaaataaattggtcatatcaccactccatgtggcaaatctctaatatatttttgcatttgatgtttgaagtaaaatacagcaaccttacatagagctttataataagcttcatgtgttcaaatataattggtacttttataaccgatgctgtktgtgttatactcagaaagttatttcttatcgtaagattaccaatatagtcaccaaaattttttttatagtttgaattaattttctacatttaaataaaacaaghgctgctgctgttgttactattcccttttaacatctccccaaattagtgttttattctgtacactttatgagatgccagcttaacaatacccttaatatggcccaaggattytacaaaaggaaatgctggtgtgtttgtcaaaagtgttttctggctgggcatggtggctgaagcctgtaatcccagcactttgggaggctgaggcaggtggaccacgaggtcaggagttcaagaccagcctagccaatatggtaaaaccctgtctctactaaaaatacaaaaattagctgggcatggtggtgcatgcctgtagtcccagctactcgggaggctgaggcagaaggatcacttgaatccaggaggcagaggttgcagtgagctgagacagcgccactgcactgcagcctggacaacagagcaaaactctgtctcaaaaaaaaaaaaaatgtttcctgtgcagattatctattcaccacttgcagatttgaagtttactaagcatgtgtgatatctaaaagttcatttgaagrataagtttcaatgccaaaaatgtttaaaagtgggatataggaagatgatgtaaagatggaatctcccaacatttccattttcaccaggaggacttaatagaatgtctaacagctacttttagatatttttgaagtgtgagaggggtgagttagttaacaaaaagtagactatgagattaaaatgtctattcactctaaaatctcagcattcactttcttattgtcaagttattcatcagactcttttcagagacaacctaaatgcaagctcttagaatattacaacgtcttttatatgagatgacaggaaataatttcatggccttttaaagggtagatgagggatttgaataccactttcagattaagtaactcctctattgaatattacactgttttatggttcatatctctattgtggttgagaggtattgccagatttattcactaacaagtaaatattattcagtttctaattaatatccactttggggggagatactttcagtctatgttagaactatyttcaatgttcagtatcctgttccacataaaactttcatgcactagttttagcattcattgatttttatgtgaatcagtttaactgtgatcattacaaaatggtgattttttttttwwwaaagtggtttttctgtgtttaataagtatcattctattataaggagagctattcctacccctatttattcactattactatgaacttataaattcttacattatttcaatgaattacaatccttcctgtcattatttattttgatgtttaaaaggtcycatatttggccagtgggacyccctaaaagctagcccctgtgttcctttggcttgacatgttcccatcactttttgagcatttccccagccctggaatcagccgtttacccaaagaacctgatgccctttagaaaccaatattytgcatttggtatgctcattgccattggctcattgctayttgtaggcctttttaatacctagatgagagtacagatatacatattgacatatacagatatatgcatatatgcaacaattttcatatgtttaatatacagtatatacatttatatgtgttctgtaaactatgtattgttgttttgcctatatgtttttaaatttacttaaatggtattaagttrtatctcattttgttagttttttgcttagtaacataagattattcttcttgtgcataccttttgttgttgcttttaactggtatgaaaaattccacagcatgcatcccctagtgaggaacacatatattgcttcctaccatttgccttcgcaaagactgccgccaaatkattatccttatgccagacccctatagacctgtttgagtagttctgtaggaatatgaaacaggacttgatgggccatgagactgcacattttraatttgactgaatactgcctattgctctcccaatggttacaccagtctgcatctcrtcagtaatgcatgatggttcctacacatacacattcacaacaacacttgacataatcaaactttccaatttatataatcaatctaatagatggtaacatattgcattatgttttactttgaatttatgtgataacttatgaatttgagcatcattttatgttcttatagcatttgggatttcttctgtaatggtccattcatgaacttagcccatttttccactagtgttcctgtctttgtcttgttaatttacatgtgttgtttttgaatattttatattttagaataagttcatcaaatttcttttaaaattatgtttaattttcaaagtgattatgttacatttgtaaacaatatagcaagaattcactctttttagtaacattaaaaacgtggtgctattgtttggaggtttgtacccccaaaccgcatgttgaaatttgatccccaatgttggaggtggggcctaatggaaggtgtttggaagatgaatagattaattccctccctgggagtgagggtgagtgagtactcagtctattagttcttgcaagagctgttggtttaaaaagagaccagtggyttcccccaccttgctttccctcttgccatttgatctctgcacgtgtcagttccccttcgtctatcttccaccataaatgggagcagcctcagaagcagatgttggcatcaggcttcttgtgcagcacacaactgtgagccaaataaacctcttttctttataaattacccagcctcakgtatcccttatggcaacactaaacagactcagatgcatggaatcccattcaaaagtttggactatcgctttatgtattcaaatcatccttcatgtcagttttagacattgaagttatgttctccaataggtcatctgcctgttagctttggcattgttgttcttcattctcttcatgacagaactttttgccttattattttacttttgaagtttgaaattttcccactttcagtctacaaaggtaatttctaatcctcatagttttaatttacacatttaatgcttttaatctactyagagtttacccttaaatatggtgttaggtrgggatttggtttcatttttctcccartggtaggctgattttccaaataccacctatgaaacagttcatcctttttccttgtttatataatcatcatcaatgacatatatcyacataggtttatctctgagctcaatattttgctccattgatacttatggcatccctacacctttttttattaccrcaattagttattaatggagcctttrtatgttgacatagattttgtagtaagtatgtcaatattctaaaaaattttgaaaaatacctatgtgggccctgtggtgtttgggagagggaaagcctttaaatactaggttgatttctttgttacttgagtattctatttctatataaatatattttcttgcactaatgttagtgttttatatttgtctaggaatttttccattccatccaagttttcacatttattaacatataattgaataatctcattttaaaaamttttagttgtgttatagttatgctcccttcttgtacattgtatttggatattcactctgtttgttcttgattattattgccacaggtctattgtagtaatcttttcaaagagacacacttttgttttgttaatcttctccacrgttttttcttctccagttcagtgacttatgcttacctccttatgttttgcttccttattactccatagactttgccctgtgcttcttttccaacctttctacttaaatgtgtactctttgcttttaaccatcttgacttcttattaatgcttatatatcagtaaattttcttctaaatattgcttcattgtatcctacaaactttgtcatgttattatcaatcagttcttagtatttaaaatatttcgtgatttcccttttaacataagaggtattcagtaatgtataatttagtttcaaatgtgggtttttttaaaaaagctaatcatattacaatatattcagagaacagcaatatgatattgatcctgtggactttatcctgtggaagctttctttatggtacggagagctatgatgttggtctgtccttgtgccctcataggtcttttgctstttctagaaggtgttagaattttctctttgtctccattagatacttaaagctgatttatttcttctttcttgaattytgggaaatttatcatcataaattttcacattttgcagttttagttttcatttcttcttagatttccatattctagatgttagatagctgtttttatcctccataacattcttcttttctttagtatgttctctttattcttttctactattttctgggtaagttcctcaatyttctcaatctaaccttctaactctaaattaattagcttttcacatgtatccaaactactatttatccctcaacaatttatattttttgacagtcatacttttacagttaaggctttctcttttattttttcttacractcccattctcatttcatgtttcaacatcttcctttgtgtcctcttatcctkaagaatatttgtcatgcttactttaaaatcttggtcagtgtgttccagtagttttgctacagttggtatgctgttgttcagcttgttgtatttctttttcagtagttgtattcctcaggtatctaatcatgttggtttgtgaactcarattttgtgtggttgttggctactctgtctggtcatttgtactggrgaaggactgaaggacaaagtctgctgctgttcttgcaacataattattaatagcacccactttttcctttcaaaagtgtcctggtttgggcaggaattatatagtcagtctcactgaaatctaggacgtaagccgtgtcattgtcagtaagtttaaaatgaagagaagtgatgtgccccagggtagagagtctcaggaaccatgaaacactgaccaggcaactcctctgggttgtgaaaaggaaaaactttagacaaggyaaatttaacagagtttaatagtgcaagaatgattcgtgagttgggaagcttttagaacgagaacaagttctgagaactgcaagctggcaaaagctggcaatgtggccagacagcattatggacagaaaacggaagtgaggtccagaaacagctttgttggttacaactgggtacagctggatgtttcgtcttatttgaatcagtcagccacccgcaattgactgaagctcagctgctgtaattgactgagacacagctatctgttacaagtgtatattctattcataatyrtgctgttagtttacacactgggttagcttgcagtttgttgcataaggactcaagcacagaggcaacctcagggaaaatttcgtttaattaaacaactatatcaccctgaagctcctgaacaaagcagcattggaggagacaatctctctggtttgtaacctggactttggagatggaggcaggtggaggagtgaaggcccaaggatggctcttcagcccttccctgttttcatcagccagcctaatgctctcctaattttactgtaactactcctgggtagttgctgttgttgtctatggagacaggcagggatggtcactattgtttccaaatggctaaattgcatgtgttttttttttttttttttttttagaacagctagtttattagttgtagggttattgtagctaatttgaataaaaattaagcctacaaattcacatggtatttgattrtgtacaatttagtttaattctttagctctgacccaaatgaagtgatatcactatcacatgatggagtcctcagtgatagtgaaatgatatcactagcctataatggagtcatcagcaaaaggtgttgtgtgtgtgtatgttcataaagatacacgcaaatgttaaatatagactttcttggacactgtttctaaagtactggtagtttcagcttctgtatgtaacatccttttctttttgggtctagttggatacaagataaatagatcacaagaagtctacttcttcttcctagctgagttgactagtagccaaaacttttagaaaactgttggattgcctgtgtatgagattctaccaggttgggctatattagtttctagggctgctttaacaaagtatcacaaaccaagtggcttaaacaaaaattaatcatctcatagtcctagagactagaaatctgaaattgaggttgtcagtagggttggctttttatgaaggctataaggaagaatctgcttgatacctctttgctagcttttgctggttgttggcaatctttggcattccttggcaggtagactcatgtctagagtaactgcagctatttgaccaaaagtgtaagtccaaattatgtttgtatctgaataatatgcttttataattcctcagcccacagccaattgagttgatggtagtaacctatgagagagccacccatgaaatgtgagttaaaaacaaagatttaggccaggtgcggtggctcacgcctgtaatcccagcactttgggaggccaaggcgggcggatcacgaggtcaggagatcgagaccatcccggctaaaacggtgaaaccctgtctctactaaaaatacaaaaaaaattagccgggcgtagtggcgggcgcctgtagtcccagctacttgggaggctgaggcaggagaatggcgtgaacctgggaggtggagcttgcagtgagccgagatcccgccactgcactccagcctgggcgacagagcgagactccgtctcaaaaaaaaaaaaaaaaaaaaaaaaaaaaaaaaaaaaagatttatatacacgtaagtgtatatatacatatatacacataacatacactcatgcatacacatacacacacagaaacataaaacaatgacagagaaagagaagctgatatttgtaaaattcactgtcaggcatatccttggaaatacagagtatctttgacactatgtctaaatcttctcactgtaggatctatagataaccttctatttttttttttcagaccaaattggataaaagaggacgaagtcatgaaagggatgcttcttcctcttagtatatttgtcactctaagttggtggtatccaatcccttaggaacgaacctctgaggttttccatttatgagactctcctactactagagtgggccaaagggagagagaatcctatttggagcaatgaggaggtaacaggtaacagggaggagtgaagcactcagcaaaaagaacagagttcatgaaaccttaatgggttcctcaccctctagagttctaccaccatgtgaggctggtgccccaaacsaaacccaaacccacaatcattttgtagggagttctgactcagggctacagctacatggtcatatcttctgggcaggaaagacagccatgatgggtgaaagtaaagaagtgacagaaggacttaggaatcaagaatttagatggggtaagaggcatgtttccttacagactgcagttacattagaaataaatgccactggccaggcatggtgactcatatctgtaatcccagcactttgggaggccaagacagctagatcacttgaggccaggaatttgagaccagcctgaccaacatgtcaaaactctgtctctactaaaaatacaaaaattcgccaggtgtggtggtgcatgcctgtaatcccatctactcaggaggctgaggaaggagaattgcttgaacctgggaggtggaggttgcagtgagccaagatcgcatcactgcactccagcctcggtgagagtgagaatccgcctaaaaaaaaggatacayctagtttgaattagtgatatacacatgaatatttaaatatcaaccagatagtacattatagagtaactgtagctgtttgatccaaaaagtaagtttagaattatatgtgtgtccaactatctacttttatattcctttagcctgcatacagaattgacatcaatgamctgtgatagaaccaccaatgaaatgtgaattataaaatatgtgtacacaaatatgtaaagaaatgtatgtgcagatatactacttctgtctatctagacacacaaacacagggagagagagaaagggagagaaagagaaaagagagagagaaacaacagaaagagrgatgaagattatgtgctttactctcaggatcatccatggccatacagaatgtcttttacaccatttataaatctcctcactataggccctgcaggtctcttatccaactttttgattaaattggataaaaaaggaacagggcaaaaaagggaaacttcttgttattgtcttgtcacccttagtagcaggcacatacttaggaaagtcagatttcctgtgtatgagacatactagagtggaccaarggaagaaaaycctatgcagagcaacaagcgagtagcagtggacagggagcagyggagccctcggggaaaamaaacagagctaatggccctggcagggttcctcacacccagagctctaccaccatgtgaggctaacactacaagcccacacccatcatcacattgtatggggcagtttcttgaccctgtgtgagagcagagaagacacccatgatggtgaaaagaaggcactgatgaagggattttagtgtcaggaaatgagatgaggtcaaggggatttgtacatagaaactgcagctgaatttgaaataaaccaycaaatgcttagtttgtgcttccttcaattgtaaagaactaaacatcgcttgtgagtaattcaaaccagaaagtgaagtctaggatgtcatattggtgttggacgatacatatatatatttaaattctgtagcgctgccaagtctaaattcaaatcagtaccctggagtggagctatcagtgaactgtgagacataaataaatcaatatagaggccgggcgtggtggctcatgcctgtaatcccagcactttgggaggccgaggcgggtggatcacgagatcaggagatcgagcccatcctggctaacacggtgaaaccccatctctactaaaaatacaaaaaattagccgggcgtggtggcgggcgcctgtagtcccaggtactcaggaggctgaggcaggagaatggcgtgaacccgggaggcagaactcctcaggagaagagaaaaaagctaacaaccctagaaatgtttttgaccctgcagaactctgccacaatatagggtggtactccaaaccccaaataccatcatattggattgtgtccttgactcagacctgcagttactttaccctacttgtggaccaagagagacaatcaaatgaagaagtaatggagggctttcaaggcagcacatttagtggaataagagggctgactacctccacacaaaagtttagtttgaaataactgccaccacaaaggctgtcacgcattgggactgaggtcataataaagaggtttatttaaatctgaaagtattactattttccccagcctaagatgttggttgccatcttgttggttgcctcctttctaataaaaaaatgacatttcagaccaaatagtgctatacacatgaatagtcaaaacttaactggtttatgtgcagagtaatgaaagctagttttacgagaaaagtaaattttgaattrtgtctcctgtctgactgtattcttttgtcatcctctagtccacccacaaatgaattatcaggagtgaacccagaggcacgtatgaatgaaaggtgagttatgcatacatgtgtctttatttatctaattataactgagcatagaagtattcacacacacaggcacataaacaaatatatccatccatgcatccatgcatccatccatacacacttctcccaaacacatccactaacccatgcacacagtggaaacatacaaggagacagatggacggacatttgtggagtttattctgagaagcttttaacagggtttccaattcttttcaatgtagcctttgtaggtaacattgcatccttttctaatggagtcataggaaaaggagcaggtcacaggagggctgctgcttcctgttagtgtatttgtcacccttagttcctagtaagcagcttctttttttttttttggcttcaacaagagagatttatttttatttttatttttattttttaaaattatactttaagttttagggtacatgtgcacattgtgcaggttagttacatatgtatacatgtgccatgctggtgcgctgcacccactaactcatcatctagcattaggtatatctcccagtgctatccctcccccctccccctacccyacaacagtccccagagtgtgatattccccttcctgtgtccatgtgatctcattgttcaattcccacctatgagtgagaatatgtggtgtttggttttttgttcttgcgatagtttactgagaatgatgttttccaatttcatccatgtccctacaaaggacatgaactcatcattttttatggctgcatagtattccatggtgtatatgtgccacattttcttaatccagtctatcactgttggacatttgggttggttccaagtctctgctattgtgaataatgccacaataaatatacgtgtgcatgtgtctttatagcagcatgattgatagtcctttgggtatatacccagtaatgggatggctgggtcaaatggtatttccagttctagatccctgaggaatcgccacactgacttccacaatggttgaactagtttacagtcccaccaacagtgtaaaagtgttcctatttctccacgtcctctccagcacctgttgtttcctgactttttaatgattgccattctaactggtgtgagatggtatctcatagtggttttgatttgcatttctctgatggccagtgatgatgagcattttttcatgtgttttttggctgcataaatgtcttcttttgagaagtgtctgttcatgtccttcgcccactttttgatggggttgtttatttttttcttgtaaatttgtttgagttcattgtagattctggatattagccctttatcagatgagtaggttgcgaaaattttctcccattttgtaggttgcctgttcactctgatgatagtttcttttgctgtgcagaagctctttaattagatcccatttgtcaattttggcttttcttgccattgcttttggtgttttagacatgaagtccttgcccatgcctatgtcctgaatggtaatgcctaggttttcttctagggtttttatggttttaggtctaatgtttaagtctttaatccatcttgaattgatttttgtataaggtgtaaggaagggatccagtttctgctttctacttatggctagccagttttcccagcaccatttattaaatagggaatcctttccccattgcttgtttttctcaggtttgtcaaagatcagatagttgtagatatgcggcattatttctgagggctctgttctgttccattgatctatatctctgttttggtgccagtaccatgctgttttggttactgtagccttgtagtatagtttgaagtcaggtagtgtgatgcctccagctttgttcttttggcttaggattgacttggcgatgtgggctcttttttggttccatatgaactttaaagtagttttttccaattctgtgaagaaaggcattggtagcttgatggggatggcattgaatctstaaattaccttgggcagtatggccattttcacgatattgattcttcctacccatgagcatggaatgttcttccatttgtttgtatcctcttttatttccttgagcagtggtttgtagttctccttgaagaggtccttcacatcccttgtaagttggattcctaggtattttattctctttgaagcaattgtgaatgggagttcactcatgatttggctctctgtttgtctgttgttggtgtataagaatgcttgtgatttttgtacattgattttgcatcctgagactttgctgaagttgcttatcagcttaaggagattttgggctgagacaatggggttttctagatatacaatcatgtcttctgcaaacagggacaatttgacttcctcttttcctacttgaataccctttatttccttctcctgcctaattgccctggccagaacttccaacactatgttgaataggagtggtgagagagggcatccctgtcttgtgccagttttcaaagggaatgcttccagtttttgcccattcagtatgatattggctgtgggtttgtcataaatagctcttattattttgaaatacatcccatcaatacctaatttattgagagtttttaccatgaagggatgttgaattttgtcaaaggctttttctgcatctattgagataatcatgtggtttttgtctttggctctgtttatatgctggatgacatttattgatttgcgtatattgaaccagccttgcatcccagggatgaagcccacttgatcatggtggataagctttttgatgtgctgctggattcggtttgccagtattgtattgaggatttttgcatcaatgttcatcaaggatattggtctaaaattctctttttttgttgtgtctctgcctggctttggtatcagaatgatgctggcctcataaaatgagttagggaggattccctctttttctattgattggaatagtttcagaaggaatggtaccagttcctccttgtacctctggtagaattcagctgtgaatccatctggtcctggactctttttggttggtaaactattgattattgccacaatttcagatcctgttattggtctattcagagactcaacttcttcctggtttagtcttgggagagtgtatgtgtcgaggaatttatccatttcttctagattttctagtttatttgcgtagaggtgtttgtagtattctctgatggtagtttgtatttctgtgggattggtggtgatatcccctttatcattttttattgcatgtatttgattcttctctctttttttctttattagtcttgctagtggtctatcaattttgttgatcctttcaaaaatccagctcctggattcattaattttttgaagggttttttgtgtctctatttccttcagctctgctctgattttagttatttcttgccttctgctagcttttgaatgtgtttgctcttgcttttctagttcttttaattgtgatgttagggtgtcaattttggatctttcctgctttctcttgtgggcatttagtgctataaatttccctctacacactgctttgaatgcgtcccagagattctggtatgttgtgtctttgttctcattggtttcaaagaacatctttatttctgccttcatttcgttatatacccagtagtcattcaggagcaggttgttcagtttccatgtagttgagcggttttgagtgagattcttaatcctgagttctagtttgattgcactgtggtctgagagatagtttgttataatttctgttcttttacatttgctgaggagagctttacttccaagtatgtggtcaattttggaataggtgtggtgtggtgctgagaagaatgtatattctgttgatttggggtggagagttctgtagatgtctattaggtctgcttggtgcagagctgagttcaattcctgggtatcgttgttgactttctgtctcgttgatctgtctaatgttgacagtggggtgttaaagtgtcccattattaatgtgtgggagtctaagtgtctttgtaggtcactcaggacttgctttatgagtcttggtgctcctgtattgggtgcatatatatttaggatagttagctcttcttgttgaattgatccctttaccattatgtaatggccttctttgtctcttttgatctttgttggtttaaagtctgttttatcagagactagtattgcaacccctgcctttttttgttttccatttgcttggtagatcttcctccatccttttattttgagcctatgtgtgtctctgcatgtgagatgggttttctgaatacagcacactgatgggtcttgactctttatccaatttgccagtctgtgtcttttgattggagcatttagtccatttacatttaaagttaatattgttatgtgtgaatttgatcctgtcattatgatgttagctggtttttttgcgcgttagttgatgcagtttcttcctagtctcgatggtctttacgttttggcatgattttgcagtggctggtaccggttgttcctttccatatttagcgcttccttcaggagctcttttagggtaggcctggtggtgacaaaatctctcagcatttgcttgtctgtaaagtattttatttctccttcgcttatgaagcttagtttggctggatatgaaattctgggttgaaaattcttttctttaagaatgttgaatattggcccccactctcttctggcttgtagggtttctgccgagagatctgctgttagtctgatgggcttctgtttgagggtaacccgacctttctttctggctgccctgaacattttttccttcatttcaactttggtgaatctgacaattatgtgtcttggagttgctcttctcgaggagtatctttgtggcgttctctgtatttcctgaatctgaacgttggcctgccttgctagattggggaagttctcctggataatatcctgcagtgttttttccaacttggttccattctccccatcactttcaggcacaccaatgagacgtagatttggtcttttcatagtcccatatttcttggaggctttgctcatttctttttattcttttttctctaaacttcccttctcgcttcatttcattcatttcatcttccattgctgataccctttcttccagttgatcgcatcggctcctgaggcttctgcattcttcacgtagttctcgagccttggttttcagctccgtcagctcctttaagcacttctctgtattggttattctagttataccttcttctaaatttttttcaaagttttcaacttctttgcctttggtttgaatgtcctcccgtagctcagagtaatttgatcgtctgaagccttcttctctcagcttgtcaaagtcattctccatccagctttgttccgttgctggtgaggaactgcgttcctttggaggaggagaggcgctctgctttctagagtttccagtttttctgttctgttttttccccatctttgtggttttatctacttttggtctttgatcatggtgatgtacagatgggtttttggtgtggatgtcctttctgtttgttagttttctttctaacagacaggaccctcagctgcaggtctgttggaataccctgccatgtgaggtgtcagtgtgcccctgctggggggtgcctcccagttaggctgctcaggggtcaggggtcagggacccacttgaggaggcagtctgcccgttctcagatctccagctgcgtgctgggagaaccactgctctcttcaaagctgtcagacagggacatttaagtctgcagaggttactgctgtctttttgtttgtctgtgccctgcccccagaggtggagcctacagaggcaggcaggcctccttgagctgtggtgggctccgcccagttcgagcttcccggctgctttgtttacctaatcaagcctgggcaatggcgggcgcccctcccccagcctcrctgccgccttgcagtttgatctcagactgctgtgctagcaatcagcgagactccgtgggcgtaggaccctccaagacaggtgcgggatataatctcgcggtgcaccgttttttaagcccctcagaaaagcgcaatattcgggtgggagtgacccgattttccaggtgccgtctgtcacccctttctttgactcggaaagggaactccctgaccccttgcacttcccaagtgaggcaatgcctcgccctgcttcggctcgcgcacggtgcgcgcacccastgacctgcgcccactgtctggcactccctagtgagwtgaacccagtacctcagatggaaatgcagaaatcactgtcttccgcgtmgctcacgctgggagctgtagaayggagctgttcctgttyggccatcttggctcctcctccgagatttcgcagcttcttaaaggactcagatttcctgagtttgagagcgtaccagattgacagaagggaggagaaaatcctatttgcaatatggaggagatagcagctgacaaggagcagggaagccctgggcagaaaagaacagagctaatggaacatggacttgtccctcacacttcagagctctgtcaacatatgaggttggtgctaaaacacaaacacaagcacagcacctcattggatgcagaccttccttagacccacagctactagcctgtgtcccatggacaggaaagactagcatgatgggtgaaaggaaagacgtgatggagagatccaggaagtgggccatagttgggattaggaggaggaatgcctacacagtagagttgaatttaaaagaaattcacccacaaaaggctgtcgtgcattggccagctccagtggtagagagttttggtgaactcttgagtcagtgagtcttagataggtgtgaagtatgtgttgcagtcatataaagtatgatgtgtagggtaaatggcatggcagattccaaagaaccaaatacacacatgacttctgtaagggtaaggcaatttacaggttgaaaagtagttggaaggtcgggtgcggtggctcaggcctgtagtcccagcactttgggaggccagggtgggtggataacgagatcagtagttcaaggccagcctggccaacatggtgaaaccccatctctactaaaaatacaaaattagctgggtgtggtggcgggcacctgtagtccctgctagttgggaggctgaggcaggagaattgcttgaacctgggaggcagaggttgcagtgagctgagatcatgccactgcactccagcttgggtgacagagtgagactctgtctcaaaaaacaaacaacagcaacaaacaacaacaacaaaaaaaacaaaacaaaagcaattggaattattttgaactgaaaatcttaagtctaggaagttacatgttgtcttactatgtacatgttaagttctttggcagtgccctgtgtatgaattgagagtatcttctagtaggctggtcaatgcaccatgcgatatcaaggaatacagttatacatgtatctatgcatatacaaacacatacatacatgcattcatacacacaagagagagttgggctattgagtgtgacaagcatccatgggaacaaggagttcccttgaaactatttctagagtcctctcagaatgagctytgtatgcaatgtkcttttgttttttggatrgaggtaggaaaatggggaggaactcacagagggaggctttttatgttagtgtttgtcacattaccattcagtgagaatgagactgtgctaktagtgtggaccaagggagaarcgaatcctgcttgcagcgagaaggagataggagtggacaaagatcagaaaaatccyagccaaaacaaagaacagagctaataaccctggaattatttcaccccctccagagctctgcctttatgtgaggctgactgcctttgcccatacccaccctcacatgggatggagcccttgcttgaggcctccagctacttggccgcaacttttgggcaggaaagacaactaggatgggtgaaaagtgaggaggtgattggaggtgatakagaatgaggaactcagatgggattatacgaagcgggacttagaaagtaaatttgaactagaattaaatgctctccaaaaatgctgttacacattgaggtgtagayacccttacttaatctggatgcatcactatgttcacagmctaaaatgctcactgttggcatakgaaacctcatttctaataaaaagacaaatgccatcccasgtcaatttagtgatatacgtacatgtgrataattaaagtgtaactagggaatgacacatagactaactgtagctatttattgcaaaacattagaattacgcattgtgtctgactctgcccatatttgtcctttagtcctgatccgaatgccctggcgggagtcatcattgagagagcccccagtgacaggtgaattataaaagatgtacacatggccaggtgcaatggttcacacctgtaatctgagcactttggaaggctgaagcaggcagatgccctgagatcaggtgttcaagaccaggctggcaaacatcgtgaaaccctgtctctactaaaactacaagaactagccaggtgtggtggcaggtgcctctaatcccagctcctcaggagggtgaggcaggagaatcgattgaaccttgggaagtggagtttgcagtgagctgagaacatgccgctgcattccaccctgggcagcaggagcgaaactttgttgcaaaaaagaaaaaaaagaaaaaacaaaagatgtacacacacacacaaaacagtgacagagaaagagaccgagattagtgggattcactcttagatgtgttcacgataatacagtgtttctttgacacaggttctttatcatctcactgtatcgtgtataaataacttccacattttaacattgtttagaaaaaaagaaactgactatagagagaggcttccatctgttactgtcttgtcgcccttagtaagtagcaggcaaatgctttggaaaagcagattttctgtgtaccagacatagcagagtaggctgagggaagagagaatcctgtttggagtgaggagraagtaggagtacttggggaactgtgcagccttcagcagaaagcaacagagctaagagccttggaggtgttctccaccctccagaactctgccaccacggaggcaggtgctccaaacctcaaatcctattggattgtgcccctgtgtcagacctctagttacctgaccctttttgtgggrcatgagaaaccaccatgctgggtgaatgtaaggagctaatggagggccttttaagcaggacattgaatggaataagagggctgcctacctacaaactggagttgagtttgaaataattgccaccagaaaatctgtcacacattgggactgaggtcataataaagaggtttacttaaatcgggaagcattacaattttccccagcctaagattttggttgtcgtcatatacatcctcatttctaataaagaaaaatasacattccaggttccaatagtgctgtatacatgaatagtcagaaattaattggtttctgtctagagtaatgaaaggtaatttttccaaaatataaattcagaattatgtctcctctctgactgtattctcttatcatccgctagtccacagacaaacgaatttaaaggaacaaccgaggaggcacctgcgaaagaaaggtaagtaataaatagttaaataaagtcacccgtcagcataagtgtgcatagaactatacacacacacaggcatatgagcaaatatatccatccatccatccatccacacttctcttcaacacgcgtacacaaactaatccatgcacatgatggaaacatagaccaaggagaaaggagactgatggaggtttgtgaaatttactctcaggagcctgcatggccatagagatttttttttttttgtaacagagtttccaattcgtctcattgtagcatttgttagtaactttgcatccttctttggtggagttgtataaaaaggagcaggtcataggagayttgcttcttcctgttagtgtaattgccacccttagttcctactaagcagtatttttatgggactcagatttctgacagaaattaattggtttctgtctagagtaataaaagctaattttccaaaaaagtaaatttagaatcgtgtctcctatctgactgtattcttttatcatcctctagcccacacacaagtgaatttaaaggagcagccctggtgtcacctatcagtaaaaggtgagttataaatacatgaagacacacgtatgcataagagtgcatagagctgtacacacaccaagcacatacacaaatatatccatccatcttcatccatacacacttttgtcaacacatttacacaaacaaacccatgcacaaagtggaaacaccaaacacggagacagatggacatttgtggaatttactctcaggagccttcatggccatacagagtattttttaacaaggtttccaattcttctcattgyagcatttgcaggtaactttgcatccttttttgaaggagttgtataaggaggtcagttcgtaggagagctgcttcttcctgttagtgtatttgtcaccctcaatttctagtaggtaattttttaagggattcaggtttcctgagtttgagaccctaccatagtgttccaagaaaggagagaatcctatttgcaacatggatgagatagcagccaataaggagtagtgaagccctgggaaaaaaagaacagagctaatggaacgtggacttgtcccacaccctcgagagctctgtccacatgtgaggttggtgcctagacccarcccaaacccaccacctcattggatgccgctttcctcaggtgygcgggtacttcactgtgtctcatgggcaggagagactagcatgatcagtgaaaggaaggagatggtggagggttttcccagtcatgtgaaaacctctcctggaaataaatcataaaggtgtaagtaatacggaaaacctgattcaagttaattatagtgtaatgctcaagaaaccttgcaaaatgaatgagattttacagaaggaataaaaggattgtgtttaatcagtggctgattaagggaacatctaggtaagaattctgtagttgctcattaagcaatagcatgtgagttttgtatgtagcattgatttttaagccaataaataaatttttaaaagaatttattttataggacgttggacgcatgggcaaattaaaatgtatttctattattattattattttttgagatgaagtctcgctgttgcccaagctggagtgcagtggcgcgatctcggctccckgtaacctccatctcccgggttcaagcgattttcctgcctcagcctcctgagtagctgggactgcagtcatgtgccaccatgcccgtctaattttttgtatttttggtaggggcggggtttcactatattggccaggctggtcttgaactcctgccctcgtgatccacccgccttagcctcccaaactgctgggtttacagtcatgagccactgcrcctggctaaaatgtatttttaatatgtacataggtttaatttatataaatttaattaatctctgattaactgaccattggtaaatgagtctttgttaactgttgaattttacttactgggcttatgtggtaggatttgcataccctcacttattatatatgtatgtatttcatatttatggaaaatctactccttttggtgcaaaaaatgtatttgctaatagtgtcaaaaagagaaattcattatatgtctatgtacctttttactccatcagcactgtcttcagtgaaatgacaacagtaacacatgaagggaccttccacaaaatttgaggtttaagtaaataaaaagctagatgtaaacatatatatgtaaatacacacatagacacacacaaaagtatacatgtagaaaggagagattcagatttgggaagttcattgtatggagcatccataacaatacagagtgttttagacactgttttctaaagtcttatttctgtagtatctgcaggtacctttctttcttcgatctagttggataaaagaggaataggtcttaagaggaatgcttcttattcctattccattggtcacccttatttagcagcaccctgaaaccttaggaaaatatgagaatgtgtgtaktgtatgacactctactagagtgagccaaaagaggcaacagtcctatttggtgcaaggaggaggtaacagtgggcagggagctgaggagctctcaacagaaaagagcaaagctaatagacccctggtctcttcgtctgttaccacatgaggctactgccccaaaggtaaacccaccatcagatcgtatgcaggccctgccttgggtctgtagttacttaaccctatctgaggggcaggaaagacatccatgattggtgaagagttactgttggtatttgagaaggcagaaaattacaagggcaagcaaggtgggtatttacaaactgaagttgattttatgtaaattttgccagaaacagtaacttggggatgaggtttaggagtaaagaaatgtatataaacttgattcattaagtttttttcacaggctgaaaaattccattacagacatctaaaacctcatttccagagaaaaattaaacaccatgtttcaaagaaataactgattaatgtccrtttttcagggtaactagattataaattgtagaataattattgctaatttgtrtcagaaaattaagtctaggataacatgtggagtcttgctatgttcatttttaatcctttagctattgaattaaaaagagcaatgagtggtagagtcatcaatgatgggtgagatttcaaaatatggagagaaagaagagagggatatattaagattggtaaaattcactcacaaatgaagtaataaagaactgcacttaagttgtgattcattagattgtttgttaaggcccaagagcacctttacataatataagcttttcttctaggaaaaaatgatatattaatagtagattccaaatcattgacatatacattttcagagttcaaccagtttataaatgtagagcaawtgtacataacttcaaccagaaaagtatgtctctgaagtcacttgacctgatgtgtacatttttaatccttagcactggcccggataaaatgacatcagtagtctttcactactttgatatatctttgatataactcacctttcagtggtggtgtcactgaaaactactgatgttattaatttgagtcagtgctaaaggatatatctacacacacacacacatataacacacatgtatatatgtgtgtgtgtatatatatatacagatatatcttttagctatatatgtagtatatatagatatataaatatgtatttgtgtatatagatatacacatatctatatacatatgtctacatatgtgcatatttaaatgtgtgtatatatatatctatatatacatatctatgtatagrtatattctttagcactgacccaaattaataacatcagtagtcwtatatatatcctctaatatatatatgagcatgtgtatatatatgtaaacatatatgtatatatcctttagcatatatatgtatatatacacatatatagtttacatatacatatatgtgtgtgtatatgcaggtatatcttgttttattgtgctttactttattgcccctcagatattacttttttataaactgaaggtttgtagcaaccctgcattgagcaagtctcctgattttatttttccaacagcatgttctcaccttgtgtctctgtcacattttaataattcttgcaatattccaaactttttattatcrtatctgttatgctgatmtgtgatcagtgatctttgttgttactattgtaattgttttggggcaacacgaaccatgcccatattaaggtgacaagcctaatcaatgacatgtttgttccgactgctccactgactagccattcccccatctttctccttctccttgggcctccctattccctgagtcacaacaatattgaaagtaggccatttaataagcctatgatggtctctgagtgtcctagtgaaaggaagagtcacatggctctcactttaaaccaaaagctagaaatgattgtgagcaaggctagacttcttgtagcagttcagccaagttgtgaatgtaaaacaaaaacaaaaacaaaacaaaacagaaaagmcaaaaaacttcttgaagaaaattaagactgctgctccactgaacatacaaatgatgagaaagcaaaacagtctgattgctaatctggagaatgtkttagtggtctggataaatgatcaaaccagccacagcattcccttaagccaaagcctaatccaggacaaggccctcactctcttcgattcaatgaagcctgggagaggtaaggaagctgcasaagaaaagcttgaagctaaaagcttggttcatgaggtwtaaggaaagaagccatctctataacataaaagtgcaaggcaaacagcaagtgctgatgcasaagcagcagcaagttatccagaagatctagctgagataattgatgaaggtggccaaactaaacaacagattttcaatgtagacaagatagtcttttattggaagaagatgccatctaggacttttatatttagagaggagaagtcaacgcatgctttcaaatcttcaaagcagaggccaattctcttgttaggggctaatgaagctggtgactttaagttgaagccagcaatcattgactattccgaaaatcctagggcccttacgaattatgctaaatcaagcaagatgggtgaatagagatgcctggtgctcatctcccctacgagaaaaaaccgaggcaacaaatacacgtctaagatttgattagartatcaaaggcatagtcctggagtgcagcaaaggagtgcagacacatctgtggtgactggaagttgccacagyatggaagcactcakcctgtgcagccccttctgccccatctggattgaattggcccagagacaggagggacttctcattgcagggtgaaggtaagcagaagatcccyrycaccccactgccatcacaaacacaamgtctttacaacaggagaatctcacagtctttgcaagccctgaggccagtttggagtactgccaagaattgacaaagctgcatgtcctggactaggagtacaaggtgaagacttcccacccccagagacttaagctgcagcaacacagcaccatcttgagaccagagtcatctcttgagtgtgccctcctctgggggccagtagccactgtgcctctccagcactggagctttatcttcagtawaccaagcccacatgggtgggttaaagccacaatcccagctgtgtggaggttggtcccaggactggctgtaactcaagtaatgcagagcagggaaatcaacccccaccaccacacttccagacagaggaayaatctgcagtcccatccagggtaaactcactcttaagacagccaaaccactgcaagccctctcccaagtgggagaggcccctaagcctctgagcagctgatacacccccaggtcaacagagtgactatgagcccatgctcaggacctgagaaacagccttgcaggccccatccaccacagacatgctcctggcctgcccaggagccctctgcctttgataagggcctgagaaacagtcccacaggctgcccctagcaggcacaccaccgagtgggccttgcacctgtgtctcagacctgagagacaagcagctgtgtatgcccaagtctcagggccgagaaagaaccctgggagcttactctggccagcagactgtcaggccaactaagcagccacatacctatgtcccagcttgaggaacagccctttaggccaccccccacagaaayactcccaggccaactaagcagctgtgcaaccttgcacgagcctgagaaatagtcctgtatccattcccagcagatgcacctccagactagccaatcagccatgaatgcccatgtcctggacctaagaaagagctccatgggctacttccagaagacatgcccctaggccagccgagcagcctcgtgtccacatcctggcttatagaagcagtcccctgggcttcccctggcaggcaccacccaggccagctgagcagcagtgtgcccacatcctgagctagaatagctctatrgactaccccyagcagaaacacatccaggacagctgagaagtcatttgactgtatcccaggcctgagaaacaccccctcttggccagccctggcaaagatatcttcagtccagcttaggagctatgcagctgtatatttggcccatgagtttcccccagcagactggctgcaggccagatgagcagctgtgtacccacataccaggtaggggaaacagcccttcaggccactcctggagtgcatgcttccaggccaggcaaacagctgtgtgcctgcgtcctgggcctgagaaactgtcctgcaaagcacatctggcagtcatgccctggttgagcaactgcatccccatgctcctggctagagtgacagcaccatggccagccgcataaggccatactccaagttttctgacccagtgtatgcctgcacacacccctaccctgagaaacagcccagtgagcccacccctggcaaggctgcaccaccatcaccacaaacttccttagcckaggccactgagtaacttgcaaatgttactagtgtagatcacagctgaataaactacatggagactacacttactgcatccatgtagaaccaaggccagtataccccaatgaactgacatccgagacctattcatagaartaaattcatacaagtaaacctactccataaaattggaaaaggtgactttttcaccagaygcatagaaatcaatttagaaacacagcaaccgtgaaaatgcaagaaaacatgtcatctacaaagggaaataataattatccagtaatagaacccaatcataaacataagagatgacagaaaaaagaataatcttaaggaaactcagtgagatataaggtaatacagatagacaagtcaatgaaatcaggaamacatgatttgaaagagaaattcagtaaagatacagataycataaaaatamccaaacagaagccctaagagctamacagttcaatggatgaaatgaaaaaatacaatcaatggctttacagacaagaacaagcagaagaaataatttctgaacttgaagacaagtcttttgaaataacacaggcaggcaaaaaaggataaaaaagaatgaaaaaagcctacaggatttatgggacaccattaatttgatcaaatattcatattatgggcattccagaaggaaaagtgaagagaaaatatgaggaaaacatatttaataaaatgagagcataaaacttcctaactcttgagagagagctagacatctagttccaggaagatcaaagaaccccaaatacattcaacccagacattatagtyaaattgtgaaaaatcaaagacaaagattttttaaaatagcaagagaaaagtaacacatttataatggaatccccattagactaacagctgatttcccagcagaaaccttaggctagaagagaatgggatgatatattcgaagttctgaaagaaaaaaaaaactttcagctgagaatattatacccagcacagctatcctttacaaatgaagaagacataaaatctgtcatagataaasaaaaaccaagataattcatcaccactagaccagccttacaagaaatgctcaagggagtcttacatctggaagtaaaaagatgataaccaccatcataaaaacatgcaaaactttaaaagttactgrtagagtcaatgcataaaggagaaagagaaaggaatgaagccttatcactatagaaaactacccaacttcaaaagtaaacaggaagaaaggaataaaacatatacaaaacaaccagaaaacaataaaatgttggaagtaactcctcacctaccaataataactttgaatgttaatagattaaataccccatgaaggatatagacttactgagtggattaaaaaataagacctaactatattttatctaaaagaaactcatcttaccggtaaagaaacacatagactgataatgaagggatgcaaaaagatattctatgcaaatggaagccaaaagtgagcagggatagctatacttgtatcagacaaaacagagttcaagttaaaaaccataaaaatggacaaacaagattattttgtaataataaagggttcarttcagcaagaaatataattgtaatatgtgtataattktaaatatgtatgcactcaaacaccagagcacctagatatataaagtgaatattaatagatctaaagagggagatagaccccattacaataagagttgggcacttccatatcccactctcagcattgggcaaatcatctagacagaaaatcaacaaagaaacatcagacttaaactccaccatagaccaaatggmcataaataacaaacatatacagaacatctcacctaacagctgcagaatacacattcttttcatcagcacatgaaacattatccaagatagaccatttgttaggttacaaaacaagtctcaacaaatttttaaaaattgaaattctatcaggtatcttatcttaccacagtggaataaaactagacattcataacaagaggaacattcaaaactatacagacatatggaaattaaacaacatgcccttgagttacaatgagtgaagaaagaaattaacaatgaaatttaagaattcyttgaaacaaatgtaactagaaacacaatataccaaaacaggagacacagcaaaagcagttattgagaagtatgtttttagcttcatccatgtccctacaaaggacatgaactcatcattttttcagcaacctatcgcaaggacaaaacaccaaacatcacatgttctcactcataggtgggaatagaacaatgagaacacttggacacgggaagggggatatcacacactggggcctgattgggtagggggaggggggagggatagcattagaagatatacctaatgtaaatgacgagttaatgggcacagcacaccaacatggcacatgtatacatatgtaacaaacctgcacattgtgcacatgtaccctagaacttaaagtataaaaaaaaagaagtatgtttttagcaataaatgcctggatcaaaaaatctagaaaactttcaaataaaccactgaacaattctacctcaagaaactagaatagtaagaacaaaccaaaccccaaattgttaaaaggaaataaataatgaagaccaaacagaaataaacagatttgaggcaaaaattacaaaaggttaacaacaaaaagcaggtttaaaaaatatcaacaaaccattagctagactaattaagaaaaagggaagaaccaaataagtaaaatcagaaacaaaaaaagagacctcatgacagatatgacagaaataaaaagaattattagagactattatgagcaactctacaataaatttgaaaacctagaggaagtggacaaaattcttgaccatacgacctaccaagactaaccaagaagaaatagaaaacctgaacaaaccaaaaacaagtaatgagattgaatcagtaataaaaaggctttcaacaaagtccaggacctgatggcttcaccacttaatcctcacttgtgaaaggaagagtcatttgccacagcaaacttcattttcctattttaagaaattgcctcagccactccaaccattggcaaccaccactctgatcagtcagcagccatgaacatggaggcaacgccctccaccagcaaaaagactgtgacttgctaaaggcttaggtgatcattagcattttttaaccaataaagtagtttttaattaaagtatgtacataagttttttgaacataatgccattgcaaacttaacaggctacagtgtagggtaaacataacttttatatgcacaggggaaccaaaacatttgtgtgagttgcttaatgcagtttttgctttattgcagtggtctggaatgaaacccacaatgtctttgatatatgtctatacctatattatttatatattatatatctgtatacatattcttttatatatctttatatacatatatatagaaagggacagagagagaaaagaagataaaaatatgcaaaattaagtgttgggagtatccatgaggaaagagtttctggttaatgattgtaattttctttcttaaatattaggtcttccagtgagctaagtcatgtttactatatcctttagattcatgggatycttgttattcaaatatatttttcatcactattttgtgtagcaaatatctaatgatatatttttgcatttttttttggtggctaaagtatgttagaacgactttccaagtttgaagttgaagatgctgaaaatgttgcttcatatgagtaagtcagtttgaagtttgaaaggagggagccattgatggatctcttacctttagtgaaacagggcttccgctaaggcaagaaggaaaaagggaaactatggaaagatatcaaaatgtatggtgggagggtacaccgtatttactccagttgaattcttagacaagtattattttgaaaaaaaaattccatccattcagaaataaatgttcttctagcttgaaaatgtaaaaagtattcttagaggaaattaattccattaaaagtttttttttaaaaaacaggaatgcagaatgctacttaactcatcaatagtgaacgtttctcatttttactggatatggtgtgattcccaattttgtagattttgcctatgagcaaatagtattgatagcaaaagcaaacatgttttgctgactaaagacctctttatgctcattgggattttattcttatttgtttctaatctcactagagtacttcctgttgcactgacctgaaggcattttatcatgtactcactgtaatgaaacaatacattcttaaactggcttgtgtctgaactgcagacatattcaggagatttttcttctgcttctttcttgcccagttgtataaccattcaccagcttgtgtcaatgctggagaggaagtactgccatagaggaagttaactcaccatggttgtaagctgttggtgtctaaacaaagattggaaacaaagagggcaaatacaagtagtttttcaaattgccctgaatttgccactgaattaaactgtgtgtctgcaaattagctatacgttttctgtaatggagctgcccagggccgaaacaaaattagacagattaagcaaggcaagcatttccttctttccccactccaaacaaaataaagcaggttttcattttattttatttttaaattacaaagtctcattacatagatataggaggaatttgcagtrgtccctgtgagaaatgctggtgtttcataccagggggatgatattggatttatagtaaaagctggaatcagtgcttggctttgacatcatatattcattcacctgatactcagcaagtcactaaccctctttaactttcagattattcaaatgtaaactggctatgatgcaatctatgtactggatattgtattgtaaaaaattagtaataaaacgaaaataacatgcaaaaatactttgaaaactctgtagttctgtaaataggttttattctaaaaactgaaaataatgtaagagttcattaaaggaaaatctgaaaatacaatcaacaaatctaaccacatayagtcattcttaaactttgatgcatgcacttctaagttctttaggcatatacttttttgtttrcagatatgagaccatacttattcttttgtaaataaccttattacttaatgacatcatgrctatatttttttgttaatatatattcatgtgcacttacaacattatttgcaacagttgtgtaatatttcatggtgtagatgagctataattcatttaatagtcagatattgctgaacaattaagttttttacaagtttttaactgttacaaaaatgaatatatttgaggctaaatgtctatattgttggttatttgcttgttataaattctcagaagtggaaattctgtgtcaaagggaatgattgtgacgctattgatattgatatgtgctttaacatcaagatgcraagtgtacatttctcccccccacacttaacactagccatcattgrtttctctgatattagtaaatatatttgttctaatgcacattctttgacacaccttcatttatccttttctgtctttggactgaaaagttaaatctattgatcctttttctattttatgtaatataagcaatttctcccaggttgtcttgcttttcactatataaaagcatttaatcctcatgtaatcaaatgtatctgttcctttctttgtgattttgcctttaatgttattctcagaaagtccttcttaccccaagattttaaatatattcaycaaaatttctgttttgaatttattttcttcatttaaataaaatatctgccctgaatttactttgtcttaaggtataaagtgtagaaatttacttttctcctaagtgactcatagttttctcagcatgaaaatgtcatccccctatattgtccttaccctgttttagtgatctagagygagcaggaagaccagagtcactacagtgtttttcatgctttacatcatggccacctccctacccccagagtctgtaccagagaaaaacgtgtccagtgggagagatagcacctgccttcaatacaaatcccatttcattaaacatggtcttgttagtgtcatrtagcttccaccttctattgataaaaratgagtcatgttcatagttaatatttgtgcttttaattcaactttgatattaatattggaacttttagtgttttaaggtttagtatctcatatctttttctatctcttttttttttttttgagccggagtctcgctctgtcaccaggctggagtgcagtgacaccactcagctcactgcaaccttggcctcccaggttcaagcgattctcctgcctcagcctcctgagtagctgggactacagtcacgcaccaccacgcccagctaattttttgtatttttagtagagatggagtttcaccaygttggccaggatggtctcaatctcttgacctcatgatccgcccaccttggccacccaaagtgctgggattacaggcgtgagccaccgcgcctggcctctatctctttatttttgaattgtcatttaaatttagtttttgtcacatgtaatgcctttaatttcaaagttatctgagagtatttctcaatatgcaatatgagagtaatatgtttgtatttatgatttctggtatgtttggttttatttatcatctttttctttattaaaaatactttgatattttctttgtaaatttgtctatattttgctattawttgatttgtttttatcccttgcattttttattgatatgcaagtcagaagcccatttctagtctatcaatgtttatatttaaatgcttagaaaacataattataccattttttccatcaatatcgagatgtacctgtgaaagataagaaatgcaacctgcctttacttctgtcttcttccacaccttgaatcctagtgtaagaatgcctaaaaattcaaatcaatactattattcatgattttatattatttatctttacttttagaatcatttatttacattttcacctgctacatttttttattattatactttaagttctagggtacatgtgcacaatgtgcaggtttgttacatatttatgcatgtgccatgttggtgtgctgtacccattaattcgtcatttacattaggtgtatctcctaatgctatccctccccawtccccccaccccatgacaggccccggtgtgtgatgttccccttcctttgtccaagggttctcattgttcarttcccacctatgagtgagaacatgcagtgtttggttttctgaccttgcgatagtttgcgagaatgatggtttccagcttcatccatgtccctacaaaggacatgaactcatccttttttatggctgcatagtattccatggtgtatatgtgccacattttcttaatccagtctatcattgttggacatttggcttggttccaagtctttgctattgtgaatagtgccacaataaacatacatgtgcatgtgtctttatagcagcatgatttataatcctttgggtatatacccagtaatgggatggctgggtcaaatggtatttctagttttagatccttgaggaatcaccacactgtcttccacaatggttgaactagtttacagtcccaccaacagtgtaaaagtgttcaatttctccacatcctctccagcacctgttgtttcttgactttttaattatcgccattctaactggtgtgagatrgtatgtcattgtggttttgatttgcattgctctgatggccagtgatggtgagcaatttttcatgtgtctgttggctgcataaatgtcttcttttgagaagtgtctgttcatatcctttgcccactttttgatggggttgtttgtttttttcttgtaaatttgtttgagttctttgtagattctggatattagccctttgtcagatgagtagattgcaaaaattttctcccattctgtaggttgcctgttcactctgatggtagtttcttttgctgtgcagaagctctttagtttaattagatcctgtttgtcaattttggcttttgttgccattgcttttgttcacctgctacatttttatgctacattaacaattattatttagacttacctaattttgagtttatattatttaccatcttttctctgtaagtcatcttccttatttctgtgttcttcattttgattcattgctcagctgactcaagcactttgagtaattgtttttaggaaaggtacatggaggctatgcttcgtgttgcttcatgttggagtgtctgtctgttgctcccgagtgtgaacagtacttttcctggatatggatttactgagtcatagttatttccctgcaaactctgcacataactgcttgaagctgcatttacatagtacactttttttaaccaaaaaagtctcaattgtgtatttacttggtatagtttcagggaacactgaaacagattaaggggctaaagccacccaagccacttcttcrtgccttcataatctgtcagacttggttctgtatggtgacattgtcaagtgagttcagatttatgacatttccttgatacctggagatccagtagactgtgtgggatcagaggttcttgtagtaagggcatggcaacttgaggagagaattcacctcttttggccaattgatcctccatctacatcagccttaactctccaagcctgggcggaggtggtgggtccaggtggagaggggaagattagacggattggggatttcctttatctcaggttaacctaacatcattcatcaaaggccaattttattttttttaacttttattttaggtttggaggtacacgtggggtttgttatgtaggtaaacttgtgtcagggaggttttttttttttaacatattatttcatcatccaggtattaaactcagtactcaaatagttatcttttctgctcctctctctcctcctaccctccccacttaagtagaccccagtgtctatttccttctttgtgttcatccgtccttatgatttagctaccactgataggtgagaacattcagtatttggttttctgtttctgcactagtttgctaaggataagagcctccagatccatycatgttcccacaaaatacatgatctcattctttttttatggctgcatagtattccatggtatatatgtaccacattttctttatccagtctgtcattgatgggtacctaggttgattccatgtctttgctattgtaaatagtgctgcagtgaacattcatatgcatgtatctttatagtagaatgatttatattcctctgggtatctactcagtaatgggattgctcagtcaaatagttctgcttttagctcttcaaggtattgctatactgctttttacagtggttgaactaatttacactcccaccaacaatgtataagtgttcccttttctctgcaaccttgcctgcatctgttattttttgactttttagtaatagccattctgactggtgtgaaatggtatctcattgtggttttgatttgcatttctctaaaatctgtgatattgagcttttcttcgtatgcttgttggccacatgcatgtcttcttttgagaaatgtctgttcatgtcaaaggccaattgtcagtgccccagttctgctcagtatctgccctctttgttctccagtcttaggcacaggctgtgagcattgtcttaggattaatggctctcggggtggaatttgagtcctgtgttggaggcttcagtatgacagaaacttcctgaagacttctyctactgaagtctcctgtgttggaggcttctcctcctgaagagcctccaacacaggaggcttcagtaggacaaaaaaaattgttcctcatcagctactttgtctccagccataaggtaaaatgaggcattattggaggctctatcaaacaggttctccttcctttgattaatggaaggagcccagtctttcgggtgtttgtcctttgaagtatatcttactaaaatgtcttacctctgaagttcatttgcaacctcatatgtgactcttgctcatgtgtatctgttcactaggtgtctagttkgaggagatgacaagagcatcatttactctccctatgctyattcctgaaacaccttattttattgcagtkgaaactgagatctggccaaagtttgatgatttgcccaggctggcattaaaatacggttctcttctaccaaccttttctgtcttcatgctatactccttgagttgatgaccacaagtttaagtttagtattgccataaagttggggttggggctttgcatgcaatggaaatgttactaaacatccaaagtttactgtcttctggatagcatagtaaacaagtaaaatactcatggagcaggaagaataaaattttagctattagtaaaaagcattttgttatacaacttctgaataattttcttttaaaattatatttataaaggcctttgttttttggttaaatttacaayataagaagaaatctggttaattttatttttacttctttttgcagcagcaagattaagaaaattgtgcattcaattgtatcatcctttgcatttgggtatgtgagacatagaaaacaccatgtattaaatatatctgagacttggctgggtgcagtggctcacgcctgtaatcccagcactctggggggctgaggcgggcagatcacatgragtcaggagttcaagaccagcctggctaacatggtgaaaccccatctctactaaaaatacaaaaattagccaagcataatggcaggtgcctgtaatcccagctactcaggaggctgaggcagaagaatcgcttggaccgaggaggcataggttgcagtgagctgaaattgcaccattgcactgcagccttggcgacacagcaagactccatgtaaaaaaaaaaaagaaaaaaaaatatatgagtctcatatgcatcyatayatacatatatatgagacttaatacttcaatgagaaacactgaaataaaataacaaaagagcatttccactgtccatcagttgctaagtagccatgtgccccatctaatgtaatgtaatttatcatggaattttggtttaagctggacattaagaattgcaaataaatggcttttgcctaagattaatagtaacatattaatattgtttttcttccatctgcaaaagtaacattaatgaaaatcaaatgttaaaattctataattattagtaaagtgttttattaagtaccttatacatctggaattactcyttagttctggaaayaatttacttagactcttctctacataagagtacgatttcatacyatgatatagatttatrcratataattgtttccttttgaattaataatatttgaatttgagctgcaagtttttaaaaaagtacttcaaaggctaattcatcttyatggaywaggcaaatagtctaatcaatttatggagaatgtatttggaatatgtaacagcaagtggcaggaagtactttagagttcaagactcatgtgcccatcactatgctagaagcacccataaatatggaatcatggacttgttgaaaatgtcactgatgaaaaatcttggtcttttaagagcttatgttactcatgctttcatttggtttttattaataaattctttagaattatccagattaatgagggtttattttttatgagaaattggtrtaaacttcttatgaaattctgaaattttaggaagagtttgtaaacagacacaggtgattttaattcagttttgcttttctctcttgaggtgttggtctgatgtgtctactataaaaggccatgatatcttgtgaagtggtttggtgagaattttgtttattaagaactgcttctattgggtgaaaacagtgatttttctgagattccaagacattacagtttttcctgccactgggcagcttaatactaaataataacattttggtacctgatcagtggcttaaatatagtatagctatagggacaaatgcccctttatctttgyatttatttatttatttatttatttatttatttatttatttattttagaatatttggagttttcctggtcttactggatgtcactctcctccttgccgacctaattttcactgacagcaaactttatattcctttggagtatcgttctatttctctagctattggcttattttttctcatggatgttcttcttcgagtatttgtagaagggtaagtttgattatttttataatgcattaagctattttgtacttttataagaagcactttgggaggctgaggtgggaggatcccaaggtcaggagttcgacacratcctggccaacatggtgaaaccccgtctctattaaaaatacaaaaattagctgggcatggtggtggttgcctgtaatcccagctacttgggaggctgaggcaggagaattgtttgaacctgggaggcagaagttgcgttgagctgagatcacgccattgcactctagcctgggtgacagggcgagactccatctcaaaraaaaaaaaaaaaagcattttaaaataattaacaggagaattcaccrcaaactgacttaagagcctttgggccttatgagaacattggtggtagtctggcagtaccscchatgkcctgtgtttgaggtggccatggattgatgctcctctgcctttggacaggggtggaaagagtgggagggactgcatcttgtggtttgagtgacagctcagccgtagcacaataaaacactaggtagacttttaaagtttttgatctaggccctgattcccagacagcacctttggatccacctggaggctaggacaacttgccatcctgaagggawggacacaggcctggctgtttttaccatgtgatgactgtagagccccagggccttcagcaaacttctgcaatagctaaggagtggttacagcaggtcttgggcaagacccagtgctgtgctggcctcaggtctgacccaatgcagtcacagtattggtggccacaggggtgcttgtgtcactcaaccccaagctttaggtgcctcagaacagagagagagagagactctttgtttgggagaatgtaagggaagaaaacaagagtctccttttggtaatgcagagaattatcctggatcttgtccaagaccattaaggcagtaccactataagtctgcaagaaccacagagtttaggaggcttggggtgccgcctagagcagatrgagcttagatcacaatatccaagttctttcaaatatctggaaagccttcccaagaaagatgggtacaaacaagccctgacagtgaaaactacaataaatacagtgaaaactacaataaatgcagtgaaaactacaataaatacctaactcttcaatgcctagacaccaaagaacatctgctagcatcaacactatccaggaaaacatgacctcaccaaatgaactaaataagacaccaggagccaatcctgtagaaacagatatatgtgaccttttagacaaagaaatcaaaatagctgtgttgagggaactcaaagaaattcaagataagacagagaaggaattcataattctattagataagtttaacaaagaaattaaataatttaaaagaatcaagcagaaattctggagccaaaaaatgtaattggcacaccaaagaatgcattagagtcttttaatagcagaattgataaaccagaagaaagaattaatgagcttgaagacaggctatttcaaaatacatagaggagacaaaggaaagaataaaaaacaaygatgcatgcctacaggatctagaaaatagcctcaaaaggacaaatctaagtggtattggccttaaagaggaggtggggagtgtagaaagtttattcaaagggatagtaacagaacgtcccaaacctacagaaagatatcaatatccaagtacaagaaagttataaaacaccgagcagatgtaactcaaagaagactacctcaaggaatttaataatcacagtcccaaagatcaaggataaagaaaggatcttaaaagcagcaagagaaaagaaaccaataatatacgatrgygctacaatatatctggcagcagactctttagtagaaacgtttcaggccaggagagagtggyatgacatattgaaagtgctgaaggaaaaaaacatttaccctagaacagtgtatccagtgaaaatatccttcaaagtgaaggggaaataaagacttttccacacaaaagctgagggattttgtcaacaccagacctgtcctagaagaaatgctaaagggagtatttcaatcagaaagataaggacattaatgagcaataagtaacaacctgaaggtataaaactcactggtaatagtaggtatacagaaaaatgcagaatgtyataacattgtaactatgatgtataaactactcttattctaagtagagagactaaactatgagccaatsaaaaatattaactacaacttttcaagacatagatggtataataagatataaatagaaataacaaaaagttaaataatagcgagacaaatttaagttgtagggtttttattagtttcctttttacttgtttgtttatgaaaactgttataagattaaaataatggattataagatagtatttacaagcctcatggtaacctcaaaccaaaaaacataacagtggatacatgaaaaataaaaaacaagaaactaaaycatatcaccagagaaaattaccttcactattggaagacaggaaggaaagaaggaagagaagaccccaaaacaaccagaaaacaaataacaaaatagcaggaktgagttcttacttatcaatgataacactgagtgtcagcagactaagcttttcagtcaaaagacagagtggatgaatggatgaaagaacaagacacatccaggtgtggtggttcacgcctgtaatcccagcagtttgggaggccaaggcaggcagatcatgaggtcaagagctagagaccatcctggcaaacatggtgaaaccctgtctctactaaaaatacaaaaattagcagggtgtggtggtgcacacctgtagtcccagctactcaggaggctgaggcaggagaatcacttgaacccgggaggcagaggttgcagtgagctgagatggtgccactgcactccagcctggtgacagagcaagactccatctcaaaaataaataaataaataaataaataaataaataaawaaaataaaaagatccattgatctgttgcctacaggaaatactcttctcccataaagacacaggtaggctggaagtggtggctcacttctataatcccagcactttgggaggcagaggcgggtggtttactggaggtcaggagttcaagaccagcctggccaatatggtgaaaccccgtctgtactaaaaatacaaaaattagctgggtgtggtgctgggtgcctgtaatttcagctactcatgaggctgaggcaggagaatcacttgaacctgggaggcagaggttgcagtgagctgagatcacaccactgcactccagcctgggtgacagagtgagactcagtctcaaaaaaaataaaaataaaaataaacaaatgaaaaaacccaaaaaccaaaaccaaaaccaaaaacatgctaatatatctgataaatattgatgcaaaaatcctcaacaagatactggaaaactgaattcaacaatatatgggaaagatcattcatcatgacaagtgggatgtgtctctgggatgcaaggatggttcaacatttgcaaatcaatcaatgcgatacattatatccacacaataaaggataaaaaccgtaagatcatttcagttgatgccaaaaatgcatttgataaaattcaacatcccttcatagtaaacaccctaaaaaaactgggtatagaagtarcacacctaaacataataaaaaccatatatgacagacccacagtcagtaccgtactgaatggggaaaaaatgaaaagcttttctctgtgatctagaacacaatgaggatgcccacttttaccactgttgttcaacatagtacyggaagtcctagctagagccattatagaagagaaagaaagggaataaaaaaagaaatccaaattgggatggaagaagtaaaattatccttgtgtttgcagatgatacattttatttggaaaatactaaagactccacaaagaaaactattagaactgataaattcagtaaagttgcaggatacaaaatcaatatacaaaaatcagtagcatttctatatgtcaaccgtgaaccatttggaaaggacatttaaaaagtggtcctatatgcaatagccacaaataarattaaatacctagaaattaacctaaccaaagaagtgtaagatctttataatgaaaatgataaaacactgatgaaagaaattgaagaggacaccaagaaatggaaagagattccatttcatggattggaagaatcaatattgttaaaatgtccatactatccaaagcaatttacagattcaatgcactccttgtcaaaatatgaatgacattcttcacagaaatagaagaaacaatcttaaaatttatatggagcctcaaaagacccagaatagccaaaactattctaagcaaaaagaacaaagctggaggaatcacattacctgacttcaaattatactacagaactatataaccaaaacaccatggcactggcataaaaacagacacatagaccactggaacagaatagagaacccagaaacaaatccacacacacttacagtgaactcatttttagtaaatgtgccaagagcrtacattgaacaaaagacgtctcttcaacaaacggttctggggaaaactggatatacacatacagaagaatgcacctagacccctacctctcaccgtatacaaaaatcaaatcaacatggattaaagacttaaatctaagacctcaatgaaactactatactacaagagaacattgggaagaatctccaggacattggtctgagcaaaaattacttgggctatacctgacaagcacaggcaaccaaagcaaaaatgggcaaatgggatcacatcaagttaaaaaactgcttcgtagcagaagaaacaattagcaaagtgaagaggcagcccacagaatgggagaaaatatttgcaaactaccgatctgaaaagggattaataaccagaatatgtaaggagctcaaacaactctctaggaaaaaatctaataatctwattttttaaatgagcataagrtttgaataggcatttctcagaagaaaacatamagatggtaaacaggcatatcaagagatgcttaacatcattgatcattagagaaattcgcagtgtagaaaactaccatgagatatcrtctcaccccagctaaaatggtttatatccaaaagtcaggcaataacaaatcctgccaaagatgtgaagataagagaaccctcatacactgttcatggaaatgtaaattagtagaatcaattggagaacagtttgcaggttcctcaaaaaactaaaaatagaactaccatatgatccagcaatcccactgctgggtagatacccacaagaaaggaaatcagtatatagaagagatatctgcattccctgtttgttgcagcactgttcataatggctaagatttggaagcagcctaagtgtccatcaacagatgaatggataaagaaaatatagtacatatacacaagagagtattatttagccataaaaaacaataagatccyggccaagtgcaatggctcatgcctgtaatcccagcactttgggaggctgaggtgggcagatcacctgaagtcgggagttcgagactagcctgaccaacatggagaaaccccatctctactaaaaatacaaaaattagctgggtgtggtgtcggtcgcctgtaatcccagctactcgtgaggctgaggcaggagaatcgcttgaacctgggaggtggaggttgcagtgagccgagatcacgccattgcactccagcctgggcagctgagtgaaactccatctcaaaaaaaaaaaaaaaaaaaaaaaaaaaaaaaaagagatcctgtcatttggaacaacatggatggaactagagatcactatgtttgttaagtgaaataagccaggcacagaaggataaacatcacatgttctcacttattatggggctctaaaaaaaaaaaaaaagcaattgaattcatagacctagagagtagaaagatgatcatcagaggctgggaatggtagtaggggcttgggggtggggaggtggggatggctaatgggtacaaaaaaatagaatgagtaacgcctactatttgatagcacaacagattgaccatagtcaacaataacttgattgtatatttttaaatgactgaaagagtgtaattggattgtttgtaacgtgaatgataaatgcttgaggggatagataccccattgtccacaataagggtgattattacacatttagttatatctcttattatgtttgaattgccatgttggtgttttagtcacatataaatgtcaaatgatgaatataattttattgtttgaaaacttcccatgaatgttatgtttttcccttagtctactctagaaaatacattttaaataattcatgatagtagaattcttaatggggatgagtcartagtttgtggtctttaaatattcctgtctcttcttgcagagggaaatgaactttttttttttttttttatattacaggagacagcagtatttttctgacttatttaacattttagatactgccattattgtgattcctctgctggttgatgtcatttacattttttttgacattaagttgcttaggaatattcccaggtatgaaacataagacttacctctcttaaagtttttcattamttttagcattttctgkggcttttattctatataatcttttcaacttcaaatgttctcatctataccaaatacattgctttaaaatgaaatgtttgggtaaatgcccacatactttgaaactaaaagattgtgatatttagggaccagtgaagaatatacacgctawgtaccattaatggaataaagaagatggcagtacccaaagaaggacttttactcttgtactaactttaacttctctacattttgaagttctcatcgaattcccatttgtatcattttttggccttttggctaagatcaagtataatattcttatcagtttaatatctgctatatcaaaaaaacttatattgaaaacaattcccctctgtgcttcaactacaratcccttacacataatgttctgtctggatttttcctacagccaagagggaatttatttgagcatatgcaaaatttgagtgatttcaatcatgagtttctaaaaaatagcaaacagaacagaaactaggagatgacacatgtagcaacacaatagtagagttttgcagtatagttgtggtagaaacaaagaaagcttaggcaaagttagaactgttagggattaggaaaactwaacagtgtatgaggccctggtgactctttttctttttttactgtgacaatgaggaaaatgaaagagcaaatgtatactgggatgtagatggtggcttcctaagcttgttcatgggtcaaatagctgatttctttttgtaccctagcttccctggactacagctcaggccccaactaaaagcatgttaagtgattggcttttggagttatttgaaaataacctcagccaatgtggttctctgactagaaacctcagcatcacttgacagcttgctagaaatataagaagaaaaataccttaggccccaccctggacccactgaatcagtatctstgggacccagcaatctgcagcttaacaagcttttccaggtggctcttattgacatgtgcccaaatcagagaagcactagtccagaccatcagttctctgctttggtggttctgatggcaggagagataccagctagcacactttggaagtatctcaatctgttgcctgcctgatgtgcattagcagctgtagtgaacatctgttactcatgggaataacaaagatgaacaagaataatcgatttgttttgatgtggaaaaattgaaaatgctagtcttaaatcccaaaattaaatttacaaatgctaagagtctatcgtatcactatttctctagaccagaatttctcagcctcagcattaccaacattttgggccagatsattgtcataagagggtggtgagcagttatattaattgtagggtgtttagcaaaattcctggcctctattcactagwtgtaagtaacacacagacacaaacacacatgcacrcacgcmagtkgtgaaaacctaaatgcctccagacattgccaaatatcccccaggtaggtrattggggagaggagggaaaattgcctctggttaacaactgctgctctagacatagtttatattgataaaattctgtttctgaagcaaaaatggatcktttaaatttattgttagatggacacatttagttcracttctacgacttattattctgataagaatttttcrtctgcttcatcaaaaaagacaacttgaaaagctgatgagaaggctggtaagtgggcaaaacatgcttatgattcagaaaaatattttgtgttttgggacccattggcaagggttgatatctatactgtataatgttttttatttttatgttgatgaatgtttcacaaactaatgatgattttaaactctcaggtttcagaaaacaaaaggygatacacaagggatggatttgacctagacctcacttacgttacaggtttgtgacacttaatggttgatttacttgtattacttcactttttcttgtaattgtatttttttgcctcatctaagacacattcattcaaaatattctttattcwtragratatatgcyactgtgatagtgtgacatatttgtggtttagccctggcaatggaagatctrcatgtcttctcaattcaggactactcagttgcagcataggaacttgaatggattttcagctgactccatttgagtttcaatttattaacctctygtagttatttctgagtcccaaggatcccacagagacctcttctyatcctagaaccccagagaatgaggtcagtgytttgtagatctcaggttttctgagtcagagggctgyaaagcaccttgggagttcccaccgtcactggtgcccagaaatcttggattttctctggtatttaagataagaaataaattctaagaacagggggaacttcagactgaggccatcataagtacayggcatacagttagaactagtggagacttaagaactccatgscagtttaatggtcattgtgttggataatttaatatgttatttgattatcctgagtattagctcttttctgtcaacctyaattttaaaagttttttttctgtgaaaatggartctgatcatgtataaattawttttttttgtgttatatgaaatctataataatgtttgtaatagtgatgattttgactttcagaacrtattattgctatgtcrtttccatcttctggaaggcagtctttctatagaaatccaattgaggtaagggtctttatctgacaaatactcatttctcagtgaatgtagactgtgtagtcataagtttaatattgacccagatatggcagtattcttttaaaaatgtactctttcaagtaaaaaaatcataatrgattgataccagttayaattgtgccagtggttacaaaccaccccaaaacttactggcttataacagcaactatttatttggctcatgatactgtggtttgtgaatttggtatgggcttaactgtccaattcaggtgcttgcagaaaggatttcctgtctcaactaagctcattcatgtrtctgtgggcagctactgggtcatctgaggactggctagtctaaaatggcttggctaccctcaactgacagagccactgcatgctacgtgcacccccccgaggcccaaggcccatcccatctggcacccactgctgccaacagccccacccccttcaccagcagagccaccatatgctgcatgcacttctaaggcactgaggactggcctacctggtgcccaccctgctgttggcaataccccayagctagcaaagccactgcagctagcatgcatatgcctaaggcctgagaactaatctgaatgatggctctcataccaagaaaagccataccactgtctccacaaaccctcaccatcaggccactgaggcagtcacagacaccactgaatgctgattacagccaaaaaagtcacctgaagattatattactgcacccacccagaaccaaagtcaaagcaccctactcaatgaacactataggagacaactattggaaaaagtatttctctatgaaagctctctaacattggaagaggcaacagtttccccagatgtgcaaaaatcagtttagggccacaagaaacatgaaaagcaaggaaacattayacctccaaagaaatacaataattccccattaacagaccctaaatttaaagagtatatcaaatggctaagaaggaattcaaaataatgatcttcaggaaactatgagatacagagaatacagatagacaaatcaatgaaattagaaaaacaatttatgatcttatgggaaattcaacaaggatatatatgtcattaaaaaccagacagagattgtggagctgaagaatttaaggaataaaataaaaatacaatcaagagtccaggtgcagtggttcacacctgttatcccagcactttgggaggccaaggcagtggatcacttgaggccaggagttcaagacaagcctgatgaacatggcaaaatcctgtctctaaaaaatacaaaaattgggtttggtggtgcatgcttgccatccaagctacktgggaggctgagacacgagaattgcttgaatccaggaggtagaggttgcagtgagccaagattgtgccactgcactccagcctgggtggcagagtgataccctgtctgaaaaaaaaaaatacaatcaagagctttaaaaacagacatgggagagatatggccaaaatctaggaagctcgaaggttctcaaatagattcaacccaaaaaggtcttctctgaggtgcatagtagtcaaactgtcaaaagtcaaaaagagggaatattcgtcaggtgcagtggctcacacctgtaatcccagcactttgggaggctgaggagggtggatmacttgaggccaggagttcaaggcgagcatggccaacatgaagaaaccacatttctacaaacaatagaaaaaaattagctaggtgtggtggcgtgaacctgtagttccagttacttgggaggctaaatmacgagaattgcttaaacccaggaggtggaggttgcagtgggccaagatcacaccactgcactacagcctgggtgacagagcaagattgtatccaaaaaaattaaaaaaaaaaaaaaggaaatgttaaaaacagcaagaaaaaagcatcaagtcacatataagagaaactccatttgattaacagtggatttcccagtggaaactttacaggtcagtagacaataagatgggatgatatattcacaaagtacygaaggaaaaaaaaaactgtcaaccaagaatacratacctmgtagagctatcccctagaaatgagggagaaataaagtatttcctagrcaagcaaaaactgaaggaattcattcccactagactgacctttcaaggactgctttaaggtggttctacatctggaagcaagaggatgattaccattgtcaaaacacacaaaartataaaactcactggtagtacagayatacacmtgagaaagagaaaggaatcaaactttgttgctacagaaaatgaccaaaccacaaagattaaaaaaaaataggtgaagaaaagaacaaaggatatacaaaacaaccagaaaaaaatgaacaaaatgacaggataaagcctcatctattaatagtaaccttgaatgtaatgtaaacagatcaaattcccaattaaaagatatagagttggctgccaagatttaaaaaaaaaaaaaaaagacccaactgtatgctgcctacaagaaactaacttcacctgtaaaggttcatacagactggaagtgaagggatagaagaaaatattccaggcaaacagaaaccaaaagcgagcagaggtagccatacttatcagataaaaacagactttaagtcaaactgtatgaagagacaaagaaagtcattttataataataaagagatcaacttagcaataagayataataattgtaaatatatatgtacccaacactagagcactcagataaacaaggcaaatatttttaggtcaaaagggaaagatagactccaatgcaataacagttggggcctttaacaccccactcttaccaccggacagatcatctagacagaaaatcaacaaagaaatatgagatttaagcttacagataggaaaaagttctggtgttctgtagtgctgtagggtgactatagttaacaataatttattgtatatttttacrtagagaggatgttgagtgttcccaacacaaagaatgataaatatttgaggtgacagatatgctgactatcctgatttgatcattacacattgtatgcaagtattgagatatccctgtgtacctcataaatatgaacaagtattatgtgtcagttaaaaatatttttaaagaatgaaggaaacagattttttaaatgaaaggaaagaaaattacctgacttggctgaatggccccatgtggtctctcattctccagtaggctacttcaggcctgttcacgtgacggcagaggcaagagtcccaggagcggcaacaaaacaatgcaaatcctcttcaggcccaggctcaaaattatatattacttctaccccattttattggacaatgcaaattacactaccagtctggattcaaggagtagaaaataaactccaactcttgatggaaggaactataaagaattgtggcrgtttttgatagtctaccatagggargaaagatggggatgctataacccaaaatgtgtattcttaggttgagatcctaaattatagtcagggcatatggctttaggctctgtkgatgactaaattaatttcaaacatataatgccgtttactgtgaaatgccagctgaaaggatcattgtttaatttaatataaattacaatacttattatacctcaataaaaatataactatcaagggctggcatcagttgcygagaggtggaaggagtacctctctgcagtttgttagctcarttctgaacaggacaggcctgcaagttcagctacttcccakaaaatgtcctggatccctggcctgagtcatcatcccatgactagagaacatggatggattattttrtcaagaaactrgtgataaaccaagggctataggaattaagaactagggctaaaaaagaaatgtttagagtgatgcaagatggccaattagaagcagctgcagtctgccgcgctcacaaagargaatgaaaaggggcgagggaattcagcaccttcaactgagataaccaggttstcacattgggactgactggatgaacaggtcgaccaatggagaatgaagacaagcaggcagagggtgcgatggcccagcygggggcggcatggagccaaaggaamcccgactcccagccaagggaagcagtgagtgtgcagtcctgcccrggaaaccatgyttctctcayggatctttgcaagccatggatcaagagatccccttgtgagcccatgycaccagggctgcgggtctgatacacagacctgtatggagtctgggcacatcagctgctcaggcacacacagaaacccaggagttttacacactstagccggggatcttcagcacagtgggaaatctgtccatatgtatctctgggaagtgggctgaatccagggagccaggcagcatcattctgcaggccccrtttccatggcacctcacaagttaagacccactggcttggaatactagcctgccaacagcagcrggttggaatccacctcagatgggtctgagttcccggggaggtggggagaggcagccagcatcactgtggttcatagactcagccactccagcctgccagctatggagaatacagacaatcyggacaagkaagagttccccacaacacagcacagctggcttgccagatcatgaccagactgcttctttaagcaggaccccaatccattcctcctcactgggcaggaatccccgcgggggctttaaccactgcagcaacggttctatggacagagctttgatctctccctgaaatggagctcctggcgggaggggcagctgccatctytgcagtttggtcaactcagccactccaacctgctggctttggagaatacaggtggtccggaggaggaaggatcccccacaatgcagcacacctgctctaccccaaagcagccagactgcttctttggatgggtccctgatccaatgcctcctgatggtgggaatgcscaacgggggtctccagccacctcctgcaggtatgtgcgggctggctacaggtcagtatccccctgggatgaagcttccaaaggaaggagctggctgccatctttgctgtttctcaggcttcaccggcagtatctcattcagagtctatgaggaacttaaatttacaagaaaaaaacagccccattaaaaagtgggcaaaggatctgaacagacacttcccaaaagagacatgcatgcagtcaacaaaaatatgaaaaaaartctcaacatcactgatcattaaagaaatgcaaacaaaaccacaatgagataccatctcatgccagtcagaatggctattattaaaaagccaaaaaataacagatgctgggaaggttgtggagaaaaaggaatgcttttacactgttggtgggtgtgtaaattagttcgacccatgtggaagacagtgtggcaattcctcaaagacctagaggcagaaataccatcagacccagcaatcccattatggggtatatacccaaaggaatataaatcattgtcttataaaaatacatgcatgcacacatatgttcattgcagcagtattcacaatagtaaagacatggaatcaacctaaatgccagtcgatgatagattggataaagaaaatatggtacatagagtgggatgtctggcttctgagcgggaatctttgtagtgccagtgatgaaagagagaattaaatatgggtgatgttgagaaaggcaagaaaatttttgttcagaagtgtgcccagtgccacaccgtggaaaagggaggcaagcaaaagactgggcctaatctccatggtctcttcaggtggaagacaggtcaggccattggattatcttacacagagactgataagaacaaaggcatcacctggggagaggaaacactgatagagtattttgagaatcccaggaagtacattcctggaacaaaaatgatctttgccagcattaagaacaatgcagaaagggcagacttgatagcttatctcaaaaaagctactagtgagtaataattggccactgccttataccttatattacaaaacagaaatgtctcatgacttttttatgtgtcctatgatataatagatctcatacaccagaattcagattatgaatgactgtcagaatattttttgggcagtcctgatttaaaactaagactggcttgtggttaaatgaataagtttggtttttgaatattaatagtaattccaattcagtgaatgctatcactgtttactccttctaaagatatgattagactttgttaataatgttcaacttttcacaaagatggtgagtaccatcttaaaacttattgaagattggttttatatttatatttatattggtttatatttagatttatatgactggttatgtgaatatatttaaatactggggaaattccttcactgtctcagaaccaagcaagatrcacctgtattttgtgtttatttgcctcttaaaggcaagggttgaagataaggtagcaatgtcttctttgtatttttggccttaactatgccaatgtaattagaattccttgtatttaagatggttccttttacttattcaaaggcattttgtgtggtttatgtgtaatatcaaataaagattatttaacacttaaaaaaacaacaacaaaaaaagaaaatgtgatacataaataccatggaaaactgtgcagccataaaaaggaacaagattacatcctttccagggacatggatggagctggaagctgatatcctcagcaaactaacacagggacagaaaaccaaacatcgcatgttctcacttacatgcgggagctgacaatgagaacacatgagcacacaatggggaacaacacacactggggcctgtggggagggaggggatgggggaaggagagcatcaggaagaatagctaatggatgctgggcttaatacmtagggatgggatgatctgtgcagcaaaccaccatggcacacatttamctgtgtaacacacctgcacatcctmcacatgtaccactgaacctaaaataaaagttgaagtaaattatctgtatatacatatgccctgatgtacatacgtatacattatatatgcatgcatctataaccacatgtttattgaggtataacacatatggtaggttgcactactcaagtatatatcttgatgatattatacctgagtatatatgcatgtaaccaacacctctgtcaatatattggtctatgactgacctccaattaattgttgtaaagatataaagtatcaagtttcatgtttttcacatagctctcaattcctcctgtaccatttattgtaaagagcatgatttcccccaatgaattgcagaggtgcgtttattgcaaataaagtgaacatatacgtataggtctgtttctgggctttttgtccttttgttatgactgtctatacttaagtccagaccatagttttaattattatggccttatagtgactcttgagaacttgkgtataagtcctccaactttgtacttctttgtttaaaaactatcttggctctcttagattttttgaatttccatataaattttagaatcatcttggcaatttacatacacacacacacwctcaaacccacacaaacacacccccacaccytsttagtattttgacttgggcattgactacacagcttaatttggagagacttgacatgtaaaaatattaagatttccaactcatgaacataatacatctctctactgatgtcttctttgatttcttttagcaatgtttgcagtgtacaggttttacaacttttgttagttttatttctatgtagttgataagtttttgtgctattttaaatgatatttgaagaycttcattttctaaatatttgctcttggtatgtaggaacataactaatttttgtatattgacttttgtttatttgtttgtcttaagacagggccttgctctgtcaccacaggctggagtgcagtggcacctgggctcaagcatttctcccacctcagtctcccacatagctgggactacaagcaggcatcaccacacttggctaatttttttaattaatttttgtagagaaggagtctctctggtctcactgacccaagctggtcttgaactcctggattcaagcaaccctcccrcctcagcctcccaaagtgctgggattaaaggtgtgagccaccacacctggccttgtatgttgactttacatctagcatccttcataaattcacatattcattttaataatgaatatgtagattccctgggatttttaaaatgtatgcaatcatataaagttactactttcttcccactttttatacttttttctttctttattgaattatctaggactttcacggtaatattgaatagaaatggtaagaggaggcaaccttgccctgttcccaaacccacgtggaaagaatttcatgcttcactatttgaaatgatgtttgctataggcttttgtagtcattctttactagattaagacagtccattttatttctagtttgctaaaagttttgaatcatgaattggtgttgaatatatcagatattttttctgcatctatcaagataataaaaatgtttttctgttattccattaatgagattttcaaatgttaaaccaaccttttttatttttggaataaactccttttggtcttaatgtattttttatgtatcactagattctatttgctaatattttatttagaacttttcatctgtgttcatgagggatatgtagttttctttcctgaaatgtctttatcagctggtctrcaattaccttagcttaggtgtcttgggtaactcctatctactcaacttatcttcatcctccatctggatgaatatgatgggtatgtttcaaggtcatggcaaaaggaaagagctagagtggaatcttacaaatgcttttgcaagcctctcctttgtggcatcccagtgaccaaatcaactcacataatggaacacaaaattagagagaaggggcactacgaggtgaaatgtgagggcttggattcaggaaaagttgaagaattgagaccattgatggaatgattctaccttattctcaggcagggaagcatttttatacatgcagatagttcacaagaaataactgctctatagtcagagactaragacttcagcagttgtataaaaatacatttgtaaatacctaaagaccttgaagagaagggtctgaaccacatctcacccaggttatgctattgatggctaagacatgactctaccactcccttggccaattttgaaaattgtttcaaactatttatttgaggtggaagtactttctgttgctccgaatgggcacagtcatggagtaatgtgaccagggtccactggatgggtcatggcacttgagggcagccatccaaaaatttccaaattccatctttatggggaaaacatctcttgattgctaatattgttttttaaagcaggttaagttaatgactgtgagttaattatagcatgtctaaattgagcccattttcttttagtagatttggtggtgactaatataaatttggcaacacttaatattagctggggtgtttttaaaaagccaaaaacttttagcatgtaaatcaagacaaagacattactatttttttctggggtgatctctagactcttggtttctatcagttattaaactgttatctccttggggcattgacaaagtactaataagtcattgattccttaaccatttttaatcagagtatcccaaaaggaggtaatcatgtgttttaataaattccacaaatcataaaccactcaaaaagcaaatctaccatccatattaatatttaatctttcatctttgccagagtgcagccccaaatctaagctactagttcagctacctgggcaggctgggaatcaggccatggagcccttcagtgattgcatgttcagtgataacagcatgtcctgcactgggagtgtctctgtcatatttgagaagtatctacaaagtatattaaatcaaggttgactaaaagggagaagattcaaatccaggcatacttaactcctgagaggatgctaaacagtcatgtgattcccctttattcttaaaagggaatcaagttgcagggttacattttgaacaacagcgaatragcaaagcagacaytacaatttcataagtggtaaatttgctagtggagaagtgtcagatgctgccttgaagtagcaaaaactttagagaagcaggacccatagagttagtggagaaacaagcactacggtggaagcatcaacaagtttggccactgctaccacctcatgcaagtacggaaggtatacttttgcctccaaatcaaggaatgtactaagataggcagagagaagagtatggtagatttaggaraacccaaaggtggaggttgttgcaagaggctttctaagaggagacagcattttttacttttgcatcacaaggaagagtttcagaaattataaacttagtaagccatgcaaaggctgagctattgagaaaaatcaggtatacaattacctacattcctacaatcttagccatcttttaatttctgttcttggtagaattgaatgcactttattctggctgaaaacagaaactgtccatctggtgacagattgtgaccagaaaaatgtagattcttggcagagttgaattttttctagattctttatgtcctttttcacctaatttggataagaggtatttgcagtcttcggtaaactacttagatcagaaaacacagcagtaaatcatctaaatggtgagttgctatatatatatatatatatatatatatgattataaaatgatatatatatatcattttttaggcattgagagaactaggaagtggatttggaaaaatccctaaagcttaactgtccagttatatttgtttccccatgaaaaagcaaatattgactgtttttctatatatgtatactaaggaaggctgcacataaattaccagtgtgagatatttacttgttgagagaatgaaggacagggatgggcacggtggctcacacctataattccagcactttgggaggccgaggagggtggatcacctgaggtcaggagttcaaaaccagcctggccagcatggtgaaaccctgtctctactaaaaatacaaaaaattatccaggcgtggtggcaggcacctgtaatcccagctactcagaaggctgaggcaggagaattgcttgaacctggaaggcagaggttgcagtgaactgatattgcacctttgcactccagcctgggcaacaagagtgaaactccatctcaaaataaaataaaataaaataacataaaataaaataaaataaaataaaataaataaataaaataaaataaaataaaataaaataaaaaaatatgaaggacaggacagtattctaaatgttgcatgatatttcattagtgctatgattaacctctaatgttggacatttaagtgtcactataatcaacaatacagcaacagacatctttgcgcataaggctttttctgtatagattgctaggagtgaaattacctagctaagagtatgaatatttttagggttcttaatatatattgccaattccgagagcaattgtattcttgtatccacaataaatcaaagttttaaatttcatgccttattttgccagcattggattttctcattaaaagagaaagggctaatttcatgggtgcaaatggcatttcattgttgttttgactttgttattggtgacactgaatgtttacgtaggttgttaatcagttagattttctcttttatggattatttgtgtccttagcccatttatctataaggtgagtgagtaatatttaagttgttgttaatgaattattaatttatcatactaggcatagtccccattcagtcaatttttctgaaaaatcgtttcccctgttattcattaatagcatttttaagcagaaatttcagatttttatgaagtcaaacctaagcctattgaycttccattgattcaacacctttagttcttcctcatccaaagaattgattaaaatttgcttaaatttctcatagatatttatagtttttatatgtgatttctaaacccgtgtggattttatgtaagaaattccatgaattctgaagtatgtaaaactatttatccttgcctcccccactatgcagattcagagtgttcatctttttgacttattatttcctcctaacagagatagccagtttaataaatggatgactttgaaaattttatttttctcaatattaagcctgtaaacatcgctctgagggtaccatactaatcagttttaaaattttgtgtcatttttgttgttgcacagagatatatacgtatgtgtgtgcatgtttcagaaagatatatttactgaaagttggattcatatagtggtattgattgtattttaaataataactactatttgtttttcattttaaaggttatacatatatwyayacacacacacacacacacacacacacacacacttataggtacacatatatcttcatttaaaaaaataaagagaacaaatgagccaaaaaagtctccatattgttaccagttatttaaaatttgatatgtttatctttttctatcacacatacacacaatcatrctatatactttttgcatttatttgtttccatagtgcttagatagactgtaatatgcagatcactctctaaagatgtayctattcagaattaaattgaaataagaaccaatatgaattagatttaaacaagaaccatattaactgtgaattaatgatttagaacaaattacttaaagttagttaaccagctaatttacttatgtgatagctttaaacagtgtgtatttacaatagagactcatctgagtagccaaacacactttgtggactatttgaaaaatcacagtggattagaacttgaagtttgcataccctcttattccctgaatctccmctagaagatgctagtgagagacaaattaataaaagtaataaccattttaggttccccctaggaaatagcttgtgttgrtgccatgtaaatatgtaagatatgtgtttgycttttttaggaagttgtgcggtttctagataagaaacatcgaaaccactatcgagtctacaatctmtgcagtatgtacattactctatattttgctactgtaggtagaaaacagattactgcacgtaagaagatgattttgctttttagattgcatttaatcataagtatttggtagtggcaaggaatgaatttaaaaatccccatcttggactggccccatttagtagagggagttagccyagcagcacaaggtaccgtatgaaggatgtggctttggcaggaccaatgaggctggagtggaagcaaaccattttagggaagatctgttctggycatattaggtttaggaaaatctttctgtttttcctgccagattgtgttatraggacatagacaatttaacaaatgagccctctgacccatcagcagtggcatgtgatgagagcaaggctctagatgggaaaaaagcaaaagactctgtagaaaataggttgtaacccagtttaataccctgtctctcttgattttttcctctacctgtatactcaatagacattttcagggggcaaacattttggtcagctacatttgcctcttgtgtggtttctaactaccctgaaataatataatgaataggctgctagaaagttaaaaattatacctattaaacaaaaataagttgagtttaggttacatgagatggataaaccactaccatccttaygtttttgaaatrcttgcgtttattttagagtggcaggagcaacttggaaagctctttttgaagatagataaggaattctaataagatatgttaacttattcataacttcatcatttatcatgttattccctatagagatatgacatacatattatttattttaggtgaaagagcttatgatcctaagcacttccataatagggtcagtagaatcatgattgatgatcataatgtccccactctacagtaagttttatgctaaattgactatcagaagagggctaaatatattgggcttgattttttgaaaatattttaactaaaaatcttaaacttgaaatcagtgagatggtggttttcaccaaggaagtaaatgagtggatggctcaagatcttgaaaacatcgtagcgattcactgtaaaggaggcaaaggtaataacattttccttttyatttttccmtttctaaagacatgtaaatatagataaagtasaagaacaagatacgtattgctattaatatgtattaataattgttagcatttttaaatattagctccaagactgaaagaagggaaggagaaaggaaagaggagaggaggaagggtaggagatagggagaggataaggaatggaagaaagtaggaaaaaagaactaaggaaggttgagcatattttcccttgttttcctagtatttggattttttrtttttggtttgccagtttatatctctcaaaatacaaacagtctttaattttagaatatcagagtacttttattttatttaaggctgatcttttttatttttaaattaacaaaaaaatcaatatatttatggtgtacaacatgatgttttgatatasataaacattgtgaaatggctaartcaagctaattaacatatgtattactccacatatttttgtgtgagaacatttaaaatctactgtctcagcaattttcaagtatacattattattaactgtggtcactatgttgtacaataaatttcctgaacttattcttcctgtctaactgaaattttgcatcctttaatcaacatctcaggctgggcacagtggctcacacctgtaatcccagcactttgggaggctgaggcaggtggatcacatggtgaagccccatctctactaaaaatacaaaacattagccggatgtggtggcatgcacctgtaatcccagctactcgggaggctgaggcagaagaatcgcttgaacctgggaggcagaggttgcagtgagctgagatcgcaccattgtactccagcctgagcaacaagaacaaaactccatctaaaaaaataacaataataataaagtaaaaaccaacatcttcacaatccccccagttttgtctccccagccccggtaaccaccattctactctctgcttctatgaatttgacttttttagattccacaaataagtgagacatgcagtatttgtctttctatgcctggcttatttcacttagcataatgttctccaggttcatccatattatcttgtgacaggatatcctctaaggctgaatagtatgcctttatttatatataccacatattctttattcattcatccactgatgacatttagattgactccatagsttgggtattatgaataatgctgcagtgaacacgggagtgcagatttcatttcctttggatatatacccagaagtggaatctccaaatcatatggtagttctatttttgtttttttgaggaatctcagtgctgttttccacaataactactaatttacattcacaccaacagtgtacaagggagggtcccttttctcttcatcctcaccaactcttcttttgtctttttgttaatgaccatcctaacaggtgtgaggatatctctttgtggttttaaattgcttttccctgatgattaatgatgtttagcagtttctcattatacctcttggccatttccgttgggaaatatcttttcaggttctttgcccattttctagagaagtaacatgttctcttgctattgtgttgtctgagttctttttttaaaaaatctgttaacctattatcgaatgtatgctttgtagatatttctcccattctgtaggttctctctttactctataaatgtttcctttgctgtgcaaaagtgttttagtttgatacagtatcatttgtctactttttcttttgttgcctatgcttttcagtcatatccaaaaatatcttggcccagaccaatgtcaagaagattttcacctatcttttcttctagtagttttccaatttcacgtttcacagttaagcatttactttgagttgatttttgtatattgggtgagataggttgcaatttcatttttcygcmagtggatattcagtttccccagtatcgtttattgaagagactgtcctttccccatcttggattcttggcacctttgttgaacatcagctgagtataaatgcatggattttttctgggctgtctattctgttccattggtctatatgtctgtttttgttccagtaatatttaaggttgttcttaaactttgtgagaaccttttagattaagggagccaacagagaygctatttcaaaaattatgctggaatttttatagtgtaatgatacgaagaagttgacattggtggggttaaaatggggraaaaaagccatttgtaaatccaaccaatttaagtttagttagattttctctcattcaggtttaggctttaaataatcatctaagcatatttcacaaattttgccaaacataaataattacatttttagtgggctctaaatgaatttttatatcaaattccaggaaaacrtagcaccgtaaactgacttatataattcagtaaaatcaagttttagtcttattgactagtttcaagcccattagttaatatacaggttctgtgtttagctgtatattagttmatatacaggttctgtgtttagctctacaggttggaatattgtatataaactggmaatttacartaccatagttaagaatatagaggttgaatcatttgaaattgccagtttttaaccatcttttgctttaaaaatggccatttcacattryccaacctaaaatgttattattaaagaagttagcatcagctttctattaactaatgctaattccttgcttgaaggaaaacawtcatttcaaatttgactttttttcttttktgctgagagrgggtttacattattctgtattcacataatattttgwtgattttgttaaagtttgtttagagggctaatattcagctggtatgtaccagagcagcctcttttttatgtgttcattcatattagtcttgctatcttctggttggttgctgcctgcaggttaccagtagtatcatgatagtaaaaatattttayatcgatttataggagttctttaaagaatctgratgccaatttttcttagtattgtaattatattctccscacatgttgcctttaaatttgatggtgatttattttgttgtacaaaagtttgtaaatttttgttttgttttgagacatgatctcgctctgtcactcaggctggagtgcagtggcatgatctcagctcattgcagcctgaacctcctggggctcaagcgatcctcccatctcagcccctctgagtaggtgggactacaggtgagcatcaccatgcctggctaatttttgtattttttatagagacagggtctcactgtgttgcccagactggtcttgaactcctggactcaagtgatccacccacctcagcttcccaaagtgctgggattacaggcatgagccatcatkcccggagagaagtttgtaattttgaatatagtraaatttgtttttctatgtgtgtgtatgtatttcatgcttttctgtcatgtttatgaaattcacccctatactgatatagtaaagatattccacatttcctcaaaaatattcaagttccatttttagtatttgggtctttaatctaattggaagttgggggrgaagtattttttttcatatagatagccaattgtcctaacaccatcaattgcatgctattttgttctccattaatttgtagtccctctcagtaatataccaagtttctataaatattcaagactgttcctaagttctctctaccacacttttgtaattattgtagctttataatatggtttgataaaggcagaattgtcttgctcttcttggaactttattattacattcaattttaaaatcattttgtgaagtgccataatggaacacttttaggatttttattggaactacattgaatttacagattaacttgagagaactgacaactttgagatattgagttgtacatgtgaatcatcttgttcattctttaataatattttatactttttttatcatgtctttgcacatcttttcaaaaattcattcctacacaaattgtgactgaaaatggaatctctttttttctattacatttgggttgtttccaatttttattgtgataaattatgttttttgttttttgttttgagataaggtctcactctgtcacccaggctggagtgcagtgacatgatctcagttcattgcaacctccgcctcctgcgttcaagcaattctcatgtctgagcctccrgagtaactgggattacaggcgtccgccaccatacccagctacttttgtatttttagtagagatggggttttgccatgttgtccaggctggtctcaaattcctgacctcaagtgatgtgcctgcctctgcctcccaaattgctgggattacaggcatgagccaccatgcctagcccaataatactgcttttaaaaatacatgtttcttgttgcacatgtggccacatttttgttgagtgtatacctcagactaaaattgttctgtcttagggtaatgaatcttgaactttacttgataatgtcatctgttttctaaaacagttgtaccaatttttactscactggtattgtagacttcaagcattccgtatcttccccaatacttgcaattctgagtatttttatctttagccttttgggtgtgtgatggcatcttatggtggtgatcatttgcatttctataattactaataagtttgaggaagtttttttaakattattaagtatttggatatccttttttgtaaagtaacttttttattttcttaaccatttttctcctggattattcatcttttttctcctgattgtaggagttctttatgtattctgatttcaattctgttattggtcayaaatgtatttcaagaaagcttttctgctctgtgatttgccttttctgtctctcaggagtatcttctggttaacagaagttcttaattgtattaccatcatatgtatcatgctttccctttataaagtttgtgtttttgtgtcctgattaagaaaattttccttgagtttaaaggacattttactactatattttcttcgagaaggttcattccttttaaacttgatttatgtgtgtggtgtgaggaaggcgtcatgtttcatcttttttcatgtatggctatccagttattccagcacaatggttcagaagattttcatttctttgctaccctgaagaacatgaatctgtttctgacctttctattctgttcattgatttttcatctgtgtgccaatagcacaactatcttactgtagctttytaatacgtcctcatcatcttcttctttctcacaattgtttgggtattttaggtcatctatatttccatataaatttgggaatcaactagtcaaattacacacactggatagaaatttgtttggaattgcattgaatttatagactggggagaattgaatctttacaatattgactcatccaacccatgaagagaggtattctctcatttagttaggtcctcttcaatttctctttacaatgctttctcattttctgtatagaaagcttgcrtatttttggtgagatttattcttagattttttttgtggctatttaaatgatatccttttaaaatgtctgttttctaaatgttttttgttgttttaaatgcagttcattttatttattaatcttgcaattagcaactttcctaaactcacttttttttttttttttttttttttttttttttttttttttttttttttttgtggcagagtctcattctgtcacccaggctggagtgcagtggcatgatcatggctcactacagcctcaacctccctgggctcaggtgatcctcctatatcagcctcttgagtagctagcactgcaggcaggtgccaccatgcccagctaattttttcatttttttgtagagatggggtttcgctatgttgcccaggttggtctcaaactcctgcgctcaagttatctgccagcctcagcctccgcctcccaaagtgctaggactgcaggyctgagccaccgtgcccagcctaaactcacttattagttctactaatttatctatagattcttttggattttatggtacatgattacatcatatgaaaataataaattgtattttttccatttcagtcatttatctcccctagcactggctagaacattcagtacagtgtagaattagaagtggcaatagcagccatcaacatacagttccattctcaaaggaaaagctttcaacatctctccaattgcttaacgactcgtgtgtgtgtgtgtgtgtgtgtgtgtgtgtgtgtgtgtgtgtattagctaccatttatcgattaagaaattccttggctgggtgccatggcttacacctgtaatcccagcactttgggaggcccagtggggtcagatcacttgaggccaggagtttaagaccagcctaggcaacatggtgaaaccctgtctctactaaaaaatacaaaaatttgccaggtgtggtggcacatgcctgtaatgccagctactccggctgaggcacgagaatcacttgaaaccaggaggcagaggttgcagtgagccaagatcacaccactgctctccagcctggatgacagagtgagactctgtctgaaaaaatgaaacaaaaaaaaaaaaaagaaagaaagaaagaaaaaagaaattcctttagcttgctaagagtttttttttttttaaatcatgaatggatkttgaattcttaaagatttttctgaatctttgagatgataatttttctactttatcctataaataaatgtggttaattacattgattaactggtaaaccaacatgtttctggaataaatgtaatttagttgtgctgtattattttgttaaatacttattaaattattttattattatattgcyagattctgtctgttaatattttgtttaggattttcaaattcatgtcatctgggcaattggttataattttcctttctcatagttttttcaaatcttggtttcataaaatgagttagatttcattttctctgtttttattctctgggtaaatttatgcatgctgatttttttccttcttaagtgtaaagtgaaattcaccagtgaaggcacattggcctagagttttctctggagagaagtctttaaattatggctcaattccctatatagaatgtttttataattttatttcttttgcccattttggtagattatagttttcccagcatttgtccatttaatttaactttgcaaatgtcttgacatcaaattgttcacaatatcattttaccattttagtgtctgcagagatgttcccttttttattcccgacattgctttcttggtgccttctccccttttttcttttgattagtctcaccasggatttatcaattttactagtcttttaaaagaaccaaatttttggccttattggtggtctctattttttacttattttttatttcatcaattactatgatatctagtattttcttctgtactccttgggttaatttgttcttttcctgacttcttgacatggataattcttagagtgttggccactctcttttctatttacgatttaaggctacaagttttcctctaagaattgctttagtttcatcccataaatttttatttgtagtgtttttattttacttagttcaaactatgttccaactttgtgcttttttttttgacccatgagttatgtagaagtgtgcttccttatttccaaacatatgagagttttgtatttatctttaaatttttgatttattacattttgttgtggacacagaacatactatgtatttttttcttttttagttctttgaaatttgtttagacttgcttaatggcccagaatttggttgatattgtcaaatgttttctgtacatttgaaaagaacatgtattatgcattgttgagaacagtgttctatgtacatctattttatttaactcttctattttcctactgacattctgttttcgttccattgaattttaataatataattttttgcttcttaccctctgtccttaccttggaagtcatatactccttttctatgtttttagtaattactgtaaagatttcaacctgcatccttgatttagctattaatttttgtttatgttgagcctgcatctagaaatcttcctaaawtctctcattagattaaggagttattctaaagatttacttactacactgactttctacactggttaggctctgcagtatactgttaaatggaaacagtgaagagagggcatttttgtttaattccaggctttaaagaaaatgctgtcaatattatgtcattaatatgatgttcctggtaggtattttggtrgattctctttgttgagttaaggaagtttcctagttgttgttaatttttaaagtcacaggtgcaggctgaatgttagtgaatgctttttcctgcattaattgagataattgtaaggtatgacttctttaatcaatgaatatgataaattgcattattatagatttctgataaaggatgattcttgtattttttattrtttgttttttaatgggcaaaatacttttttttctttttgagcttagatttttggtataaattaacttttagatttggaagtacatatgcaggtttattggtaatattgtgtgatgctgaggtttggggtgtgagtgatcgcatcacccaggtactgagcacaggacccaatagtyagtttttcaacctgtgcccttttctgctgtgccccstctagaactccccagggtccattattgccaccttgatatccatgagcacccattgtttagctttcacttatgagtgagaacatacggtatttggttttttgttcctgtattaatttgctcaggataatgacttccagctgcatccgtgatgctgcaaaggaaattattttttttttttttgagagggagttttgctcttgttgcccaggctggagtgcaatggcgcagtcttggctcactgcaacctccaccccccaggttcaagtgattctcctggctcagcctcccaagtagctgggattacaagtgcctgccaccacgcccagctaatttttgtatttttagtagagatagggtttcaccaagttggccaggctgctctcgaactcctgacctcgggtgatccacccaccccagcctcccaaagtgctgggattacaggcatgagccaccatgcccagcctgttttttgtttgtttgtttgtttgcttgtttgtttttgagatggagtcttgctgtcacccaggctggaatgcagtggtgcaatctcagtcactgcaacctccgactcctgggttcaagcgattctcctgcctcagccttctgagtcactgggattacaggtgtgcaccaccatgcctggctaatttttgtatttttagtaaagacggagtttcactatgttggccaggctggtcttgaactcctgacctcaagtgatctgcctgccttggcctcccaaagtgctgggattacagatgtgagccactgcatccggcccatggctctattttgaagtatgttcctttgattcctagtttcttgagtgtttttttttatcaagaaagatgttgaattttatcaaaagcttttttttctgcatctattgagatgatcatgtggtttctgtttaattctgtttgtgtggtgaatcacatttattggtttgcatatgctgaaccttgtatccttggaatgaagcttacttgatggtgaactttttgatgtgctgttggatttggctgttatcctgatggggctacctttgtgtgtgatctggcctttttctgcagtgcctttagggctttttctttgacagtgaccttggayagtctggtgagtatatgccttggtaatgctcattttttatagtatctcacaggtgctgtctggctttactgtacttagatgtctatctagcaagattcaagaaattttctcgaattattccatcaaatatgttttccaggctgttttctttttctctttctctctagggcatgccagtaattcgtaggtttggtcactttacataatctcatatttctgactttcttcacttttaaaaaatcttttttctttatttttgtctgactggattagttcaaaagaccagtcttcaagctctgaaattatgttttctactttgtccagtctattgataaagttttcagttgtattttgaaattccttaagtgaatttttttwgttccagaagttctgattgatttcttattaagatgtttatctcttccttcatttcctggattgatgtagaagtttctttttgttgatttcaaccttgaatctcattgagcttccytgcaacccaagctttgaattgtttattgtcatctctgagttttcawtttggtaggaagcattgccagagagctagtgtgatcctttggtagtgtcactacattcagatttctcatggtgccagaattcttgcatgggtccttcttatctggagatgctagcacttctaatttgtgtaattatttttgtttgggtaggatttttctttttctttcctttcctataatattattgttatttttttcttctttccctttccctyctccctagrgggtgtgmctgtagagcatgctrggtagggtmttttggctttgcttctgcagccctatgcacttctgccagcaggttttatrttgggtgtgtggtttgacctatgagccagtagatggcgccrtgggtaagagctggctgttgccagtgccgctggctgtgtacttgatccttgtttattgggaggagctctctgctgccccaggcaaagggctgatttcctgagtacacattaatctgagctccctcagccctaggggtagggggattgggggcacaagatgggtggagccagatagggaagattcccccagtgttgtcctgctgccagtccaggtttgggaaaatgccggcagcgtttccctgtgtctttcccccacaaagtctccaagtctctcctcaaatgagctccaaggcttgggagaaacaatctcttcctctgcccgggttgcgtggatctccagtggaaaggtgagacagagggatgctgtctgcctctctcacaccctgaggcttcactcacttttatcagtcgaatgctgtcctgagggctgcttgcctgcattgtcctccccaggatctgggatgtccttcataattccgaggaattgccattttctttcttgaattaaagctcacagagttggtctttatgtacttgcttgctatttccaaatgactgaggcatgctaaaagcctgtaatctgccatcttggaaaaaacatccttgcatccttaagagaaatggcacttggtgttgatacatggtgtttctacattgctgaattcactttgaaaatatatgtatatttttaaatctacatttatatgtgagactggtgtaaaaatgtcttttcttctactgtatttgtgcaattttggaatcagttatattaatgtactaaatgaggtgggaatttttcttttttactattatccaaaaaaattataaaakacatgaattgttgctttcttatagatttagtaaaaacctcatcgtgtccttttgtggagagatggtgagagatatttttactgtaaatgtaatttgcgtatttttcacctgtgaggcggaggttgcaatgagccaagattgtgccactgcactccagcctgcgtgacacagcaagaccctgtctcaaaaaaaagaaagaaaatcaagttaaaatgcactccttgaatatttctgagtgtatttttataccatgtatgttcttgaactaacttcttttcttttctaggaagaaccgggactatggtttgtgccctccttattgcctccgaaatatttttaactgccgaggtatgaaagatgttctacaaactttctcttatgatgattgagtttgctagttctgaaagatcgctggtaggacgttaagatgattatttgagtcatggtgcttagtaaaattgtaattagagaagcagtttttagaaagtctatttttgatactttcttgtttaacgtgcactagttagtagctgactgcagaatctctttgggccaggactagagtgaggtcaatgaggtgcaamatttaagggaatgctaaaaattataataattaaaataaataattttaatgcaatattttaataaaaattaatgcaaaaaatctatgmtgtatgcaatatcaacattttaaataaagacaagacctgatggggcaggattaaggtgaggggagtaaagtcatgttacacagaaaaaaacattcagtaatcaacatgcttccctcacttcacctggccctgctcttattcctgccagtaccatgacttcttccttcctcgtgagaatagtatcaagcttaattagataaattctccaaagagccttgcccatcctcacaactcttaggtagataaaaagcaacatttcacaactgaaaacaaagcctctcctgaatgtaaatatctttgcttagtcaatacatgtggagtctgtgacctctagaaatttctgattagacaaggtgggctgtttccacttaaagcagagttctcagtcatttttctttctgccattttcttgctgagatgctaccatttccagcagctctgctcgagttgtttggcctgcagtctagggaagaggtggtggttgtgcacaatgcccagactccaattccaccacctttggtttctctaatttgagatacacagattttgaaaatgggtgttctaggatggtgtttttcaagctgtggatcatgatttatcagtgagttttaaaataaagttactgggttgtaactgacatcttttgaaaataaaatggaatagagcagaatagaaaatatcaaaaggtttaaatattggtgtatgtgtgtgtgtgtgtgtgtgtgtgtgtgtgtgtgtgtctcctaggtttattaatgtggattgcagcttaaaaaacaaaaggtttgaaagtcattgacagccattgatccagagccctagactgagatccagggacctgtattccaggcctgtgcttcttctaactggctgcagcatctccttggcaggttgcttggttttcttttggtctcagtgttgtcatttgtaatatggaaagaagggttggaccagatgctttctatggtgtttccagctctaaaattttatgaatgtatgaatccttgaatgagagaagtcctaattttgttatttttggtagcctctgcccaaagatcactgtggccgggcatgggtggctcatgcctgtaatcccagcactttgggaggctgaggcaggtggatctcttgaggtcaggagtttgagagcagcctggccaacatggtgaaacccctatctctactaaaaatacaaaaaattagctgggcatggtggtacacacctgtagtcccagctactcagaaggctgaggcagtagaatcacttgaacccaggwggcagaggttgcagtgagcttagatcctgccactgtactccagtctgggttgcagagcaagactctaccaaaaaaacaaacaaacaaaatcactgactttaggaaagaaggtgggcatagaaacactaagggtacctaatataggaaaggaaagagtgcagatgaaccatggttggattgtacccttttttgtaggaaagcctatattattttggagaaaggcgaaccaataaaacccacagcaataaatttcagggagtaraaactccttctcaggtaagttttctttttaaaaatgggagtttttttaggggagtgggttaagattgccacctgttatttggtttcattttagactcttctcctttggtgatcaggcagcagcagttgggtgccctgcaacaggccttggtccctccctgagtctgagggtcacacttcaggtgctgcccacatgctggggactctggcttctcctcagagaatcctgytttctattctatactggttattgtttatggagctcaggagtcgattattttcccaaagtaggaaggtccagtacccaaggctccaggaccctgaagtgtatctaaaatcaccagcctttgatttcaatgtaaaaaagatccaagtctttcacaaacccttactagggcaattcaacccttgcagaacatcacaaagactgtttttggatgactcctggtgtgtgtgtgtgtgtgtgtgtgtgtgtgtgtgtgtgtgtcttttctgtgtgtkgtgggggagatgtattttaaaagagaaaataaaaggggaaataawcttttcaaaaccccttctgtatcccagacagtattgcacttttacatatctcatttaatacccataacacctrtatgaaatatacactgttactctgtttttycttttagaagcattttgttatggaaatttttaatcatatacaaaagtccagagcatcatacaatatatcctcatgtagtcatcacattgctgcaacagtcatttcagccggcgccagccacgtttcatccgttctttcccactccactcacacccctcaaccccactctccactcttgctttccctaaatctgagttattgtaaaggaaatttcagtcgtcagatcattttatcccacagcattttagtatgacatttaagtactcttaaaacaacaacaaaaaaccttaacactttttatcatatctaacaatattataccttaaaaatccttcatatcaaatttgtagtccatgtttgtttccaaaattgtcttaaaatctttgaaaatttagtttgtttaatcagaattcaaacaaagtccacacatttcatttggtttctgtgtctcctaagtctcttttaagaatctaagttcatagatttctcaccattttttattacttgtaatttgtttattgcagaaaccaggatatttatcctatagcgtttacaacattctagactttgctgaactattctaagagttctctattcactatctcatttaatattctcagtaactctatgagtaggcactactatgattctcatcttataaattagaaaattgaggttcagagaaagtaacttttgaaccaaggactgaaatctagatgtcagtctctgaagcccttgctgtgcacagcttctcatttatattgccttttctatattgcccctgaaaccgaagtgagagcgggttgggaattccgaaatggatttggatgtggctgtaaatgagtttttctttaagtggtgggagctgagtaagtactcttggcccygttagaagaacactctaactaccggccctaaacctttagtttgggccagaagaactcacccttatccactgctacttttctcccacacccaagccccaaacaaaacaaaacaaaacaaaacaaagatagtcatagaccctaagctaaaagtgataggtgaatttactgaagtgcagccctaaacatgccatttccatgctyaaaatccatactatgtccccactgccaatggcaataaactaaacgtttcaacctggcactcaagagccacactttgacttttccaaccttctcttccactatgtgcatgcacacatcccatactccaacacatttagactgtgcgctctttcccagcctatggacacttgataccctcatgccattgctcatgccccttttcctagagtccctttcccttctcagcctgaagtagtctcttgcttttttaattcttagagccctttgtgtttcttttagggactacgtcactttgcatcattctctagttatttgaagtggtgacttctgtatcccctttaaaggcaaagcccgtggcttacccatctttccacccttttctcataatattttctttgtttgtagtgagtgcctcctatgtgttggttgtattaatttctactacaagtccatgttgttttaagttgtaggagaaggaagcgtgggagcacaagtagcttgagggccctggtggtttacagcccttagggaaaggtggagaatctagtggcagaaactaaggggatgctagatggagctccttcaacaactgtccccacacatctccccatccccatttcttctgcagtcatgcatagtttccctaactttagtccagaaccagcacaccaaaggctgcaactgaatctcttctgattcaccgaaaaagcaacacagggactcagctgcatgtttgagagctgtgttggcaagacctcaggacagagtgccctctatgtctggtgrtgattctcagacaccatcacattctgatcctgcattgtgggccattctactgactacatctactcctaagttaaggactttcatgaacctgtctcatgactggccctttctaaagggaagtatggcagttagttactttaatgaacatttcccaatgggtaaggaacagtctgtgaacttatgagttttgctttgttttgttttgtttttaatttttgagacagagtctcgctctgtcacccagactagagtgcagtggtgcaatctcagctcactgcaacctcgacctcttgggttcaagcgattctcctgcctcagcctcccgagtgctgggattataggtgcccatcactacgcatggcctatttttgtacttttagtagagacagggtttcaccctgttggcgaggctggtctcaaactcctgacgcccagtgatctgcccrcctcggcctcccaaagtgctgggattacaggcgggagccaccatgatggccaacttttgaattctgaaccagttgattgagtaccagagctcttcaataccttgaagaaagattcaggggagagccattgtgaacagcttgccccagggaaaggacaaggctgagagaattccagggcctccttgagaaaacagaattgaggaaatgcaaagtgaagaaattctagctgtcaggaacaagagaagagtgaygggaaacctgctactgaggtttggaggtattcctctggagttttcacttataccattctctcatgtccaggaagctgctcttcaccaaaccacaagccttcctctaactcagtcacaactaagcttctgtctggacactgatgatgctgtaactgttttgttgtgcttctgattagttgccctctcaaccataagcagcctataaacagggcctggctccatccttgttacttccccattgcactgaattcagtatttttccctcaaggtagatagttgtggggcagcatccctaaaaatgtccagttatataatggcatccagtaaatgttttcttaattacttacctccattaacaagctttatgcaaaaaaaaaaaaaaaggaatgctgactttagacttttcatctccacttaaaggaagatttctgttgcttttcagaatagatatgttggatattttgcacaagtgaaacatctctacaactggaatctccctccaagacggatactctttataaaaagattcattatttattcrattcgtggtaagtgctttatgtgtaattgaagaattgggcaggagggccaatgtycccactctgggagagttttgctcatagtyatatatacagatgagcctaactcatacctgtctttttacatatcgtcacacaggaactcctccttattaatgcycctcctcctgcaattgcccattgattgccagcccttagatgttcttcactttttcttttccatcaccaacttgggggacttcatcccctacccatctctcctgttctcattgctcctccggtctcaacccaggtggacttttccgggcagagggagcctctgatgagggaggaggaggacccatgtgccctcaagcctgcttatttctcagaaccacctctagttcagagtttgccttggtggaggtgtctccgtatcgtatcattttctcaccttcttttagaggcatatttttttctcatcaccctgggctctccctttcccctctctcctccatctgtaaccctctcactcccagcttacactcaggggaggcgggaaagcaggatgtgtctgtgtggaaggaatggggmctcaccactcccactgccagagaggtagcagggaggtgatgcttcggaacccctaaagcaaacctcttctagcagccagcttgtggacctgagatggtgccagtgctgggtgctataggtgccatggggccaggatgctggtgtccacacagacagcctagtatttttagccttctgagtttagttctvcattwcactgatttctggtagacatcaatagaaagaagttctgcacctggaatgggaaagagggaactgaggcaagaaactgtgatttctaatgacaaatgaatatcatggtgttagtgaaaacaaaattaaatgaaaacaaacagcatatgagatgaacaatcaaagataattaatacactagtttattaaaatatttgttttaattctctacttagttttgtgaatatttaaattaaaattaatgtagaattgagaggaaagcaataaaaaattaattggctgagaaaccaagtctttgaggaaacgctaagggaagtgggtcatttgaattgaaaaaaaggaacagaagagcctttgtctgtaaatatatactgaacaccacaggaatttttggatataactatcctatatttttatagagattgcatcaggaactggccttaaagtagggccaaagtagttaaatgacagwatttattattaagaatcattatgattagaagtctgaagaaagcaacatattagcaagaaaggttgcaagtcacctttcctgaattttttttctttttctttttctttttttttttttggagacagagtcatgttctgtcacccaggctggagtgcagtggtgtgatctcrgctcactgcagcctctgcctccygggttcaagcaattctcctgtctcagcctcccaagtagctaggattacaggcatgtgccaccacgcctggctaatttttgtatttttagtagagatggggtttcaccatcttggccacgctggtttagaactcctgacctcaagtaatccacccacctcgccctcccaaagtgctaggattacaggtgtgagccaccrtgcccggcctagcttccctaaataytttttctggaaagataaagtgatgggattctaagtcttggaagctgaactatatgtattcttttctcttctctcatcttataaaatctgctttaggagacagaaatgggcttgaagccttgtctttcaaagacaaaatccatgcaagaccaaataagtaactattgatacrttgttagcttggataattttttctctttttaatccatgatgttaagtggtgagacatattgatcttcatgctaaccaacctaactttttaatttcattttgttggaacaggtgatgtatgtgatctaaaagtccaagtagtaatggagaaaaaggttgtcttttccagtacttcattaggaaattgttcggtaagagaaaacatgtgaattgaaaaaatctgatgtttgttttaaggctgaatgtcaaaccagcaatgttcacytccataaactatcactcaccataaagagattccataacgctttctggttaccatacaacrtggtgtcactgggtttggatgcaarccagagataaattaacctgtttgttcaaaacagttttttcagggtgctttccagaatgtatttctggtcagtgttgctttgcctttcacacttccacaaatgctgagcatgttcccaggaatgtattaaggattttaatttacatatctggtcatttttagccatattctcttcttctcagtcatttgatcttttattayatagcactgattctaaaagtttagtgtgcatgaaaaccactgargagcttgtaaagatttacattcctaggttgtacccccaaagtatgattcgggaaatctggaatggggcccaggaatctatagacttagcaatgtccsaagtgattctaagtcagacgttctgtgggatgaccctgtgagaaacaacgcamgggtgaatgaactggggaggaacctctttatccaaagcaaaagggacctggtagtcaatgttttgctacaatgaagaaatgcctaaaactatataccttttctgaaacagtaagaaagcatccttcatggtctaataaccctaaattttagaattcctacccaggcctttgtctcaaattctcctattactaaccctgttccctgccaccccctcccgactctgcccccggcttttttggcctctcccaactgagggcattcacccaggcctgacccttggctttctgttcttagcaaatgctttattcttaaagaatgacccattccccttacttcaactattatttgttcatttactgaacagctatttatgagcacccactgagtggtagatgcaggagctacaacatgaacagtttccactccaactcaaatgcattcgccagtctcagttatcaaggagctttctctctgcctctgcaaatggcaccagcattcttccactcacgccttgggctttgattctctttgcctcagscccctaaatccagttagtcatccatctctgttgattatgcctttgacagttttctatgttctccttcctttctgttctcactgccactaattgtccagaatctcctttgctcagcgtagatttctgcagtggtctccttaccctttctttctccttctataatgcaatgtatagaatcctgaactatgcatcctgaaatattcctctcattgtgaaaaattgtaggtagagcagaagacacactgtgtgcccatggtcagagccagttaacacctttgtctcaacatctttatctgtaaaataaataacacatccaagtgtaatgggaattcaattagwtaatatatatgaagtttctttgtgaactataaatcactaaataagtgttatatgtgataattatcaggcctctttgtcacataggaaatgccccaccatatttttcaacaacttctctcttatttccttggctcgagctctgaagatrtaatagccctaacataatacctgagcttttttccatcagtagcttgaccagcagacttcattccaaataaactgggtcatcccttttggctcttggaacacaactctaatttagttagttagttagttggttatttcttcctttcctttttttttttcctgagccagggtctcattctgtcacccaggctgtagtgcagtggcatgatcatggctcactgtagcctcaacctcctgagctcaagcaatcccctaattttttttattttttgtagagcctgggacttgctatgttgcccaggctggtctcagactcctgggctcaagcagcctgtccacctcagccttgcaacatgctgggattataaacatgaaccacactgcccgacattgtttgttgttgtttttccaagttttttctttttcttttcttttttttctgagatggagttttgctcttgttactcaggctggagtgcactgtcacaatctcagctcaccacaacctctgcctcctgggttcaagcgattctcctgcctccgcctcccaagtagctgggattacaggcatgtgctaccacacctggctaattttgtattattagtagagacggggtttctccrtgttggtcaggctggtctcaaactcccgacctcaggtgatctgcccacctcaacctcccaaagtgctgggattacaggcttgagccaccgcacctggcccatttttctaatttctactttgtgttattgctcgtctttttctctccgtttggactaaattcttttttcagagctcttcttcctttatctaaactgcttcatgcccaattcaatttctacctccttaatgaaatttttgcattctgcaccttctgttaactagcccccagtagtacataacagcacacccagtctttgtcatacagattgagttatgtaccattctactattgtttcttaaatgtacagctccctgaaggggccaactgagtctgcacctccttttgtgtttttcacagggcctagcatagacctttcttattgtgggtgccattatttctatgagaatgagtcaaagaactagtacggcktcaaagtcattcattccaaaacttgagctatctttggtcactccatcctgcagcctgcactggtcaagttcaaagatcccattgacaaacacaagagttctgataaaacatgatgagcagggggaccccactctccccctcccttgggaggagcatgcaggcccaacccccaagtgttacagacccctgttgttattttttaaatttagaaaataaaaaaccatgataagttatgcattgctttttgaatgtcaatgctagctttaaaattgagcttcttaatgtattctcaaaaaaggccctaacacatgaaaatcaaatgagacacattaaataataatatttaattgattaaagtctaatrgaaaattcaatactttttaaaagtgcagcacttttgaaaagtgcctcacggccgggcacggtggctcatgcctgtaatcccagcacttcgggaggccagggtgggtggatcatgaggtcaagagatcgagaccatyctggccaacatggtgaaaccccgtctccactaaaaatacaaaaattagctgggcatggtggcacgtgcctgtagtcccagctacttgggaggctgaggctggagaatcagctgaacctgggaggcagaagttggcagtgagccgagatcatgccactgtactccagcctggtgacagagtgagactctgtctcaaaaaaaaaaaaaaaaaaaaaaagaaaagaaaagaaaaaaaaagaaaagtggttcatgataaccctaaacatgttggcctttaaaagacataaacaacaggccgggtgcagtggctcatgcctgtaatccagcactttgggaggcccaggcgggcagatcacttgaagccaggagtttgagaccagcctgsctaatacagtgaaaccccatctctactaaaaattcaaaaattagctgggtgtgatggcttgtgcctatagtcccagctacttgggaggctgaggcacaasaatcacttgaacctgggaggcagaggttgccatgagccgagatcacgccactgcactccagcctgggtgacagtgagactctgtctcaaaaaacaaaaaacaaatgaaaacacacacacacataaacaayagtattgcaactagaaaagattattaataattatttatgcatgtagtgattgggctgtgagagcaaaagtacttgataaatacaggaagtcatgataagtgaaaaggaacttttgttatcgttatctaggtttgtagttctcaattccatgtgttcattcatagatattgcatgacattgaaacagacaaartattaattaatgtatatgacggtcyacctctgtatgatgatgtgaaagtgcagtttttctmttcggtgagtaatcacaaartagcctctgccattgttcttgtctggtctaatgatttmatttcagatttgctttactacaattcccaacaagggagggggagggggaggaaaacaataaatcagatctataacaaatttttttaaaagagcgtatgtaatttaaataatttgtgttcatttgtttttttctaaattgtaaattttctaaatttttctaaatttaymtgtattctcaaatacaaaaaatacaaaataaacacaaaaaaagtaaaagccaagatgctaaaaaaaaaaaacccaaaggtacgttttactgcatagcawtgattacattttgttttgcatcttttttaaaaaattaagaagttgagacagggtctcactctgtcacccaggctggagtgcagtgrcgtgatcatagctaactgtagcttcamcctcctgggctcaagcaatcctcccacctcagcctcccgagtagctgggagcactgactagaatagaaagagttaggtttgggtgactcagttgggtgaaacagagaaggcagcacaatacaacacacgaaataaccaaagcagttttttattaattccagagagaagagggcagcacacagggccaactggaagggggagccatccaggagacctgtgctygactgatgggtgggagcaatagygagagagagggagggacctgagagtggaagcctttattgggatgtaagktgctacctgagcaggtttcctgargggaagtctaatttggtttaacgcaagcagccatgagtctctgctgtgactgagaggtggtcactgatatatccacrtggtccctgcggagtatgggggcctctggggggagtcaagtaggttatatctagctgtcccatagtgaagtggtcatcaggagaaggttgtrtaaggcagatatcaggatcagtcacatggagaaactgggaggaggtgaactggaaactgctgagggtgactgaaccccgcttctgagatcagaaaatacaatttataattaaaagggatgctgaggcaacraaaaaattataagaattcactacaatgtagttgggtatatataggcataggtccttagtagcatctgtttggcactatctaaaccagattcaaatagcagcatttaaattaaagacctatcatgggaaaaacactattccttgaaaattttgatagaaacagcaagagaatgcaatagcattttcttaaagcctcctcctttgtgtcttgagtgtattgttatagattgcagagtgctacctatttaatggttataattgtttgataaatatataaaggaataaagaaaggaactttaatttctttggaatgattagttcctggtgtcagttttactttgaaattttttttctttttagaatcttcctaaatactatgacaattgtccatttttcttctggttcaacacgtcttttattcaaaataacaggtatgaatataatagaaacccatagaaacagcctaatcttcaatgtctataaataaggtgtaatggcaagtcttttgctggttgtcataaacttaatttatagaaagcaaaaaatccctgagccaccatttttccttgccttactcctcttactttggttattttaaaaatacatttgttcttgagacccactgttgcagtatcctcagggtccatgccataggactgtgttatgagttcaaaagtattatcatcagatcttaagtttggtagtaaattcctcccagagaagttcartatgagtctgctcagcaccttcagtatgtcaggtccctgtcagtaggtgctgatttaccaatgacgaaccaccatcaacttttgtgctaaagtaaggcaggacctagggaggcttcagctagctgaaaagctgacggacacacttatatctgggagaagttacaagacacagtattaaggaatacagctaagaaatatcattaagtaatrgtctatttaaatagccattcaaatgtggctttctaataactgaattgggaaaactttctgaaaaattactaattgggtttggagattattgttccaaaaaaacctgccatatttggaaccacatttctcagtctagaagttctccactataagtagcatttgttttgtgatggtgaaaaattgagatttttttttgtatcaaccatactcttcaatacaaaaggacaaaatattttttaaatgatttaggtcagagttgaagaagtggctatgattatatgtggcatgaattgatagttattgttacatccagtcctaatcttttcttcaaacgtgaactggatcgaataactccttaagtccagcaaggcaacaggaaattaaacctctggtctacacacttgcaatgcaaaacatttaatggattttgatagagtcaactttgkatttgatggaaattttttacaagtattttttttagatgcatacaaacaataagctttttcttctaacatgagcaaagtccctcaaaaagtgagacctgggtggagcttcatttgatgctgctcctcaaaagtggttcttgctaaaggataccgtttttttcctttaaaacactgcgttcattttggagaagtgataagctagatcacttttattmttacttttatataaatttctaaagatttctgtaacatttaaatttacatactacttggtaaagctgtttttgttagttatgagattgttgtttagccaaaaatgctaacttctatcatttagaacaccaggcataaatgggttaaccaatttatgcctagtgttccattattggaacgctaagcatatgggagttatagcctactgctcaaggtcatttccaaggtctgattgtaaaaattcaaaaaattgcaacttcacacataaattaaaagagatatagtattttattcctgggttttcattcatgtctatcctgactgatttctgtcacagagagaaatttagatattttattaaacttggatgtcattaattccatataaagcaatgctaagagagtcagcatgtgttactgatgtgttgctgaagattaaagtatttttaaktctcactaaaaaggtggaaggagccaactgaaatgcaaaaaagggtctggggttctattcatggtgaggtytttttttgtttcttccagctctaacgtgggtacccaactgcgtggctttttggtgagccccaatataaaatgtaattttttttttctattcttaggctttgtctaccaagaaatgaattggataatccacataaacaaaaagcatgraaaatttatccaccagaatttgctgtggagatactttttggcgagaaatgacttccaatgatgttgtagctggatccgactaagtatagctcccccttccccttctgggaaagaattatgttctttccaacccctgccacatgttcatgtgtcctaagtcttccttgatgatgcatctatatttatatatgtttatatatgttcttcataaatctattaaatatatatagataaaatgtcagtgtttttcttcttttttgaaggcacatacttcacactttccatcttgtatttacataaatttggaacacagtatgcaggaacatcaggcatcattttgaagaactttgaaatagaactttcatagcaaaaacttgagatatttaaaaattgtgattccccaacacccacttacttacatatttttggtcaagtatttattccctgctttggttcacatttgtaatttcagatttattagaaagctaatttatatatttttcttccccttcatttacaaacagtctgttaacagattggcaaccaagactaagttttaaatccagaagagagaaatgtttcacataagcagttccccaactcccaacacacactctctttcattccgagcattaaataggtagcttacttgacaagcttcctttaattacacacagacatgggggttggggtaagaagactgtggtaaatatgaagataagtaatctttggtaacttctgcttttgtataaaattgtaagtgaagtcaaatattcttaatctaggtgtattattttgaaattcactactcctgctcacaaccaacttcacctaagcttggggggactctgaagggaggttatctttgcgttataaacactggttagccttatgtctacagaaaatcattattatttcctctttggtgctgggtgctactttttttttttaacaaattttttatttgtattttttattttttgagacagcatctcactctggttgtcgagactggagtgcagtggtgtgatcttggttcactgcagcctcaacctcccaggctcaggtgattctcccacctcagcctcccgagtagctgggactataggcgcatgccagcacacccagctaatttttttgtattttcagtagagatgaggttttgctgttgttgcccaggctgagctcaaattcctgaactcaagcaatctgcctgcctcagtctcccaaagtgctggtattaaggcatgagccaccatgcccagtccgtgggtgttactttattcaaaatacctttattgccactgtatcttcaggccatgattgtccttgaaaaccttctatcttggctttattgaaattattcttatttgaatgattttccttttattggcaaggccctcaacaatctagaccaagatgaaagataacaactaataagaaaagtgtcactgctaaaacacgatatactcattcctgaaaaacctggcactctacagaaaggactaaaaaaagaagcagttcatgaaaatacagggtttgagagtccagggcaaacctgtctggcatagcaactttctaaccaacacactaaccgctgggaccactcacatcagcagctcaatgtcgggagtttgccagagagctttttaatttttgagtggaaatagaaaaatacttgctataatggctgtgggtaccagagtggcacagatgagagtagagccctgagccatggtgggcacggaaggcagcaacctgccaggagccaagagccccactaggctggtgagccacctcgctgcaggtgattttttctcctctaaatattccaaaaacgttccgactgcccatgcagcagcccagctaaggcctttttcctttactccccctgacctggctccccctttgaggaaaagatcatagaacatgctttcaaattcctttcatgttaatattacgccctgccattcatatgacagaaacatgtgtaggcacaacataggttacactatttcctttaaaattcacacagccataatctacagagggcagattatgtcctgggtttaggtgaatagggaggaaaatacttagctggctcagtgaagattaagatctgtctttttcagtaccagaaatacaggaaggaaggaaacccccttttttattttaagaatttccctttttgaaataaggagattaccagtaaggtttctcttccccagacctccaagacccaccaaaatttctggaaattatgagttgtcacactattctgctttcgcttattcaaagaaaactcatttaaggcctctttgggtattgctttcttagaatgcaaaatgaatgattctttgaagaactcaagaaacttagatcagaatgatactcatgtcttaaaattttagctttaattttaaatatagggggtatgtgtgcaagtttgtyacatcagtatattgcaccccggtagtgagcatagtacccaataggtagtttttcaacccgcagccctctccctccaccccctctagtagtccacagtgtctattgttcccaaccttatgttcaaggatacctgttgtttagctctcataagtgagaatatgtggtatttggttttctgttcctgcattaatttgcttaggataatggcctccagctccatctatgttgctgcaaaagacatgattttgctcatttttatggctgcgtagaattccatcgtgtatatgtaccacatttgctttatccaatccaccactgatgggcacctaggttgattccgtatctttactattgtgaatagcacagcaatgaacatatcagtgtgtgtgtcttttggtagaatggtcttttttccattgggtatatatccaataatgggattactgggttgaatggtagctcgttttaagctctttgagaaatctccagactgctttccacagtggctgaactaatttacactcccaccaacaatgtataaacgttcccttttctctgcagccttgccagcatctgttgtttttgactttttattaatcgccattctgactagtgtgagagggtatctcactgtgattttgatgtgcacttctctgacaatccgtgatgtgaagcattttttcagatgctcattggtcacttgtatgtcttcttttgagaagtatgtgtcatgttctttccacatttttaatggggttatttggtttctgcgtgtggatttgtgtaagttccttatagattctggatattagacctttgttggatgcatagtttccaaatgtttcctcctgttctgtgggttatctgtttgctctgtcgatcatttctcttgctgtgccaaagcgctttacctttattaggtcccacttgtcaatctttgttgttattgcaactgcttttggggacttagttaaaaattctttcccaaggccaatgtcaagaagggtatttctgaggttttcttctaggatttttatcacttgaggtcttacatttaaatatttaatctatctccagttaatttttgtatatgatgaaaggtatgggtcgagtatcattattctgcatattgctagccagttaccccaacaccatttattgaatagggagtcctttccccattgcttgtttttgtcagcttgcaatatcaggtggttgtaagtgtaaggctttattcggggttttctgttctgttccattggtctatatgtctgcttttgtaccagtaccatgctgttttggatactatagccttacagtttgaagcctctggctttgcccttctgcttagatttgctcaggctgttgaggccatcttttggtttcatatgacttttagaatacttttttctaattctgtgaagaatgacattggtagtttgatagaaatagcactgaatctgtcaattgctttgagcagtgtggccatttgaatgatactgattcttccaatccatgagcatggaatgtttttccatttaattgtgttatctgatttccttctgcagtgttttgtagttcttgtagagatctttcacatcctttgttagctgtattcctagttatttcattttctttgtcgctaccataaatgggattctgttcttgatttaactctcagcctggacattattggtgtatagaaatgctgttgaattttatacattgatttttttatcctgaaactttgctaaagttgtttatcagttctagtaggcttttggcagagtctttcgttttctggatatagaatcatatcatcagcaaagagagataatttgacttcttttcctatttggatgcctattctttstttttcctgcctgagttctctaggtagtacttccagtactatgttgaataggagtggtgagagtcggcatcattgtcttgctccatttctcatggggattggttccaagttttgcccattcagtaggttggtggctgtgagtttgtcatagatggctcttattattttgaggtatgttcccttgatgtctagtctgttgaggtttttaatgtgaagggatgtttgattttatcaaaagctgtttctgcatctattgagatgatgatatggtttttgcttttagttctgtttatgtggtgaatcgcatttattgatttgcgtatgttgaaccagtcttgcatccctggactgaagccttcttgattgtggtgtgttaacttatcgatgtgctgctggattctgtttcctagtatttggttaataatttttgtgtctatgttaatcagagtaattagcctgaagttttctttttgtgtgtttctctgccagattttggtattaggctgatgctggcttcatagactgagttagggaggaacccctcatcctcagtttggatcagtttcaatagaactagtaccagttctttgtacctccagtagaattcagctgttgcttcatctagtccagggcttttccttgttggtagattttatattaatgatttgattttggaacttggcatttgtctatttaaggattcaatctctttctaattcaatcttgggagattgtatgtttccaggaatttatccgtttcctctagattatctaatttgtgtgcatagrgttgtttatagtattctctgaggatcttttgtatttctgtgggattgtttgtaatgtcatctttgtcatttatgattgtacttatttggctcttctctttttttctttgtttagctatcaggctatccatcttgtttattttttgaaaaactaattattggtttcattgatcttttgtgtggatttttgtatctagtctaaaaaaaacagcacttcaaaaagcacttcattcagtgcttctctaattttagttatttctcttctgccagctttggagttagtttattctttttttctagttcccttaagtgcaaagtaggaatgttaatttgagatatttctaacttcttgatgaaggcatttagtgctataaactttcctcttaacactgctttagctgcatcccagagattctggtatgttgtgtccctattttcattaattgcaaagaatttttttatttctgccttaatttagattttcacccaggagttattcaggagcaaattatgtaattaccatgtatttatgtagttttgagagatcttcttgatactgatttctatttttgtctcactgtggtcagagtgtgtgcttggtatgatttcaaactttttgaatttattgaggcttgctttatggccaagcatgtggttgatcttagaatatgttctgtgtgcacatgagaatgtatcttctgtgtttgttggacaaagtgttctatagatgtctatcaggtccaattggtcaactgtcaagtgcaagtacagtgtttgttagttttctgcctcaatgatctgtctattgctgtcagtgggttgttgacgtctcctgctgttattgtgtgtctaaatctttttgtaggccaagaacaacttgttttatgaatttgggtgctccaatgttgggtgtgtacatatttaggctaagtcttctggttgaattgtgccctttatcattctataaggaatgctcttctttgtccttaatttttattggttaaaaatatgttttatttggccaggtgcagtggctcatgcttgtaataccagcactttgggaggctgaggcgggtggatcacgaggtcaggagttcgaggccagcctgaccaacatgg

SEQ ID NO: 94676 - DNA, 326612 bp, Homo sapiens
  misc_feature (1)...(326612): n = A,T,C or G
cgcctctgtgtaaagtgaggatgacgattctctcctcacagggcttttgggagggttaacctccaagtctgcatagtgcctggctcatgataggtgctcagtgagaggaagctctttagcaagatttgaaaatgagaataagccttcctgtaattgtagaatctcagagacaacagggacatgtagttgtcttctttatattcagtttcatatgattgatcgcctactatgtgcaatactctgtgggtgatagaaaaacaattaagatgtagtctaaggaggataaattgctgttccatggattggggaggacaacgggtatgaagcatatacaagtaatcataatacaaggcagtctgttgtaagtactggaataaattataaacaagtttcaatgggaagtacgggagagagaataattaacttcagctgagtggatttaaaaggcactatagaaggagcaagagagagaaaaaaggcagttctcccagccgtgggagtagcctgagcaggacagggaggggcaggtgcaaggtgtgttgggaagacaaagccgggcagcgtgcacaccatgtcctcgaaaagcttaccggacgtgcaagtggatgagtgacctgggaccacttcgtggagggccctgaatgccattttagggactctctatttctctctatttaaggcagtaataacaataattccattcatccagaacctactatgtgaccaatcctattgtagactgttcataaatatttcttctatcttccataaaagcctatgcctaagtattattatgtcccttttaaggatgagggatctgaggctttgaaggcttttgaacaaagagagggggctttggggtctaaactctcagaagttactctggcagcagcaaatgagaagaacagatgagagaagtgctggcacttggggctccctcaattgctaacatgttgtgacattttgtccccccaaattggttaacaggagataaagaagtgaccaggatttctaaaactagactgatcttttcaaaagttttgcgggctgggcaggctttgaagcaaatggtcatttagggagttagaaccttttcccctctgtggctcttcccagcgtttcctgtgaaaagcttcccctccagggacaacagtgaagagttccacggcggtgtctcttgaccagacatagcagaaaacagacctggagtaatgtagtgaacccaaattagcctttttacaagctcattaaagcataaagtttaacatcctttgcccaaaatataacagaaagaagaaagcctccttttttctccctactcactcacgcctccttcccctctttccaccatctgtctccggataggcaagcatcaaagcaggatcttggatgggtaggtgtctccttcactgtcaagtaaacacaatcaaagttcctgggaaatccactgtgggcaactccagtgacactgtagaattccaggcagggggcagatgtgcactctggtagtcctgaagtccaccagcatctttcatgttaaaatattactatattttaatgtggtgtataaagagttgctgacctgaattgctgtttcttaggaagcagacacattagcaagtagtataataactaggctttaaaaaatagactaccttaagggaacagactatcttcaataactgtattttacatttttgcatagcacttctaaaacactttcaaataagcttcttcatttaatcattaccttgagatgcatgtattactatccccactttgcagaagaggaaattggagcttagagactcagattagctcttttgactccatctaattctaaattatctatttattattctgaaccccatggcttctcctttgtgctttccttcaagcttatcagttgatattgtgagaattttcccagcttgccttgtggagggccccacccaggcaagggggcggtacttaaaagttgttcagttgctagtacttaacagagtatcagtgccagaaagggttgtagggaccatttccagcctccttattttctaagaaaactaaaatgagggaatctcctgcctacattcccagggctggatcccaaatcccattcatggcaaaactgtgaccaggagctcctggttctcctgtttccaacccacagtctcactccaccacagccttcacagtcaaaaccaagaggaaagttaaggttcggacttggctagtatctgttcccatcctgtcattgcttgataacatggaaagattccattaattatgagatcataaaatattaggtggaagacagcttggagataatctggtataatcctttgtgttctgtacatgggaaaagtgaggcctaagaaggcgagcagaacccccccggcccaccttgcggttggtgaccctgaactcagctgtgctccaactgtcaagtgctgttcgctcagcttgtcagagacagtgggactaaaaatttccagacacaggtacctgactcagccctcgctttgccttggcagtggagatcaggcatcagctgctggcttggatgatgtgttcccagagcaacatggtgagtgtgagctgccaacattgaagtctcagggaatgtaaagtgttgaaccagttaaacatccaaaaatgccccgtctctcagaaacaagggtgactcatcacagcgcttgggctacaattgggaatggcattagggtggctgtggcggctaaaaatccatgcttagaagcccccagcttcgtttcctctggctttttgttcgcaggtcttttctctggctgagaaccaacatacacatgctccactgccaaacccagccctcctcctccatgaagcctgccttgactctttcagcccagaggaggtctcctttctcaagccctgagaatctgccctgtgcaatttggcacttgattccatactgtcgttcactgtttcttaaccagtggagcgtttgttttataactgacatggattgcaaaatctttgaggagaggcactaagcttcctcctctgtaccctacagtaagtctcagggtgtcaccacagagcagagacatgctcagactcacagatagtcctgacctcaagactctttctgctttaccttatgtttgcacatacagcaaatgcccaataaatcctcacttgtttcaccgtagcttcagccttttcaaataaagagctcagttgcagggcctctgtcagcccatgcaaattagagaaaaggcatccctccctccaggcagacataaccctaacaggttgtgtggctgggcaagtggggcatgagttggatttcagccccttagctgggtgccctctgcagcaagccacataagccacctgggctctggctcttcgtgagagcagcaacaaggactccctccccacagtgctccattctgatggggaaggcctaccttgggaaagctggcatcagatacttcccagcttgcttcccagctcatttcccatcaaaaacaaacaacaaaaaatccacacctgccatagctcctcactgtggaacccaagtctatgctcccagaagagcatttggagactcccacaatactgtcccagccttcttttcttgtgctgggaagacccagaactcaccatgaattgtcctacgtctctgcttttgctttctcccagcctagattgcccttgtcctgttgatctttaagtgagatctctattcccctttaaaatccgatcgcaaaccctacctcctccatgatgcctccattagcactaattgttcttggtgcttcttcccgccccatccctctttgccttccacattgcttcagcctctactaccacccttttcctccatgttattagcatgtaactcagtccacacagccttctctgaactccttctgcagcaactcagatgcatcatttggctccatcctgatcctaaaggaatccatttgcaagcaaaccgatgaacaatattgactttacaaatgatttctttcataggaccgggggctttcatagcccaccccacagcaaactacttaccaatctttgcaagcatctcccctgtccaaatccctggacaacttggcaaccctgttgcctgttctcaggcaagttgcttggcaaccctgtcctcagagctcctcccctctcgttacccttccccaatgtgctctcaacgaagctaaggctccacactcagtctctgcatgtcttcttcatttgttccattcaatttatttccttcctgtcctaataggcagagcaactcaatgttgtcctaacacctatttgcaaacatgtaccccaagtccattatgatgctcagccaaacacagggtctccttcagtttagccttctttagaaggagtcaagaatagacagccagaatgtttttcttgtgacatgtatgtgcattttcctccattgagcatgcagtcaaaaaaagcaaggattgtgtcttccacatccatgcaacctagcagagtgaaaatatataccagaaacctgtgctcagggctcctctcttccagggatgaggacagttctaagccctttctgtctctcagttcttctttcctcccaagtaaggcccaggactggagttacggggaagcacctgaagacagagtaggagtttaataaatagctgtaaaatgaatgagtcagtgactgaagaggaaaaaaagaaaggacaaggaagaactttgaaggcaccctcaccaagattatttcagcctagctgaaggaaactttgagaagccacccagggtgatagaatggataagacccagaggataagaggagtcgcaaacacggggttctggtatcagctctgtcttcatcactgtgtggaatcttaaggagatctctcagctctgtttctcatctgtctcaccagcctgcctgcagatagcctagtatggacaccacccaacagggtcctcagggctgtttgacattcgtgtttgaggcttcttccccaaatgcacagacacccagagcccctcggcgcctccacactctgcggaaagcttttcttggctgcagtgctggcccggggaccttcactgcccactggcagaaaagaattctcggctgtggaaatgagtaaactccacatattttaaagatgacagtctaaactcctaatgactctaaatgtggtgtgaaatggacagcagtcatcttgctgtgtgacatgcctgaaatagtgtcaccaccaccatcaccccctcacgtggacatgcacgtcatggaaagagaagcaacaagtcatagtgccttggctaatgtagctcccctattccccccgacccctcaccccagcgtcttttctgtgctcttctacattttaaaaaaagaagagatctatttattctgcaggaatacagtccaaggtcacctaaaagcaaaggagaatgggaattaaacacacccagagacccgacccatccaacagagtccagctcaggcaggctgtgccagtctccaccaggctacgaggggaaaaccttttcgagttgaactgccaccaatccactgccaccgaagtcaaggttgtcagaaatgaccctctggacagggctagtgatttggatcctagagatactgagttcctgggaaacaaagagaacttgttgattttgtatttttattttttcttcgatttggtcgggatattacggtagccttgaccagagttgagaaaaggaaacgcccagtcggtatttatttgtcaaacagttgtcctttgcctccggggtcaggggccctctggtacccaccactgttgcatcctctccacactcctaagcctgtaactcctcctcccaaaccgaagccctgtcagtaaaaagcgtcctaatgatgcccgcgccctagttgcaccaaagggggtcaggttcccatcgagcggatccacattcgtgtgtgcgcacgcgtgtgcatgtgtggaagcgcgtgtctgtgtgtgccgtgtgtgtacgcgcgcgcgccggtgtgtgtggcgggggcgggctctgcgcccgggggcagggctccgcagtgagagtggcagctggacttgccaggctgcgaggggcagggcacagagccgcagtgccgtagtagcgggccacggagatagacagctttggagctgctgaactccgagcacagggtgaagaccccggcgctaccaaccacagcctggcagcctggtctccgcggcacccactggggctgcatccccctcccccgagagggctgcgcaggcgggaagacgcccagaggccagcttcggtcccccttctgtctctcggttcctctttcctcccaagtaagggaataaaccgcgaagaaggagcgccccgggccaccgcgcaaccaagtgttgcctggtgaggtaagacggcggccggcgcggcggagggggtccccggctcagggagcacccggtgcagcaacttggtaaaggagggcaaagcgggagccggtcccgcggccagggaaggggctgcagccaaagccacggcgcccaccccgacagttccacctgccacaaagccctgcaggaagggatgccccgctcgaggggtgcaggcttggggaacgcacagggtggggctcggctctctctgcgactgagaggccccctcaagcctcaaagctgtgcgggtgggaggcggccttgctccaggcagtttgctaaagcaactggtcggatttccttcttcttctggacttaaccttggctccttgatatccagttcgcgctccaggcagtccgagaagcaggagatgcttttcctaatgtctggccgccaaagcctccgaccgtcccgcggggttctaggactttgggggcactccacaaagcccctgcgcagggcgacttaaagggaagctgaagcgaacacggacacctcagagaataaaggagggaagggtcgaatctgaggttgatctgtgtagtctcagagtcacaagatgtgtccgtgtgtgtgcttgtgtcctgaggagtgcgtacccggagtcacctgtggtgctttcgcagactccaccggtccacctccccttgcctagtctgagattttcttcgtttgaactagtggaatagaattaggggagggggctgtggagttctaaaaagccctacaggtgatttgacgtgctgcccccatccccaccatcactgcagtggaaagcttgggactagagctagaaccacctcccagatgggagggatgagctgcggaactcagggtggcggtcgagacccctcccccagtcgccccccgcggcgggagcgtctgctgcagcgcgaagcgatctgtggctgcgccgcagtggtgcccgggagcgctgtgaacccgtgggcgcgctctcccgcgctgcgccgctgcctcctcggacttcattagcatacgatgacctctctgtggggaggagggcctgggagggctgtttgtcattcctttattttgggggcttggcgacgacactttggatctggaggtgaacaccaggggtcatgatgagagacagtggtcaggacacaggactggaaacgacccctctggtctggatgggggaatcaactttgttattttggtgcttgggattctctgtctgtaaaatacagctggcagagccacttgctggcacacagggcaccctggttgtcaatgaaggaaattagatcatagagggcaaatgtcgaggtttggtcatgaacccaggcacagacacacacccctttatattttatgtccctctcactctcattccaggcatgtgtctaacatgggaaggtacttaactgtttgtcatattaaaagactacatttgctggagattccattccgaatatgaattatactccttaaataaaacggctgcaactaagccaacttcccggtcgtactcctgatctatgtcttttttgccaatcacccttaacgtttacacccagcactataggcattactacaggtatttttctgggaggggctttagggtgggaagctagtagatgagtctttcctaccttagaattttatggagtggttggttcagatcaaccgagacatggggagaaaacgacaaacatcagcgtgtcttgaaatctagactctcagagatgggagtaactactaagatcatctgttccagctcccccaactgctccaactccccacacaacaccatcaacagatggtgaggatccctccaacccggacactcccagaggcccaggctgtgcatgtgtgagcctctgcgaggaaagaacccagaagccagcaactctcccctctcctactgatgggagttggtggatgctggccccatctcctcccctggaagagaagggggaaaagggcrgggaagtaccttttctttgtggtaaaactttaaaacttttaaaatgtatatcttattgtattacatcattataatgtactcttttagtataaaagtaattcatgttcattgcctaaaaattgggaagttgaaaagtatgcaaagaacaaatcaatcacccatgatcctaccactcccatcccacactgttaatatactggcatatttcctttccatctgtttttatgcctcgaaattatacaatccatagagagccagcatttattgggtgcctaataagtatactttgcatggtgttaaattttatattcattatatcctttaatcctcaggagtccctctgaggtgttattactatcaatcccatttttctagggttgcatttttctagggttctaagacttcaggtgacttgcccaagttacatagctagtatgtgnnnnnnnnnnnnnnnnnnnnnnnnnnnnnnnnnnnnnnnnnnnnnnnnnnnnnnnnnnnnnnnnnnnnnnnnnnnnnnnnnnnnnnnnnnnnnnnnnnnnnnnnnnnnnnnnnnnnnnnnnnnnnnnnnnnnnnnnnnnnnnnnnnnnnnnnnnnnnnnnnnnnnnnnnnnnnnnnnnnnnnnnnnnnnnnnnnnnnnnnnnnnnnnnnnnnnnnnnnnnnnnnnnnnnnnnnnnnnnnnnnnnnnnnnnnnnnnnnnnnnnnnnnnnnnnnnnnnnnnnnnnnnnnnnnnnnnnnnnnnnnnnnnnnnnnnnnnnnnnnnnnnnnnnnnnnnnnnnnnnnnnnnnnnnnnnnnnnnnnnnnnnnnnnnnnnnnnnnnnnnnnnnnnnnnnnnnnnnnnnnnnnnnnnnnnnnnnnnnnnnnnnnnnnnnnnnnnnnnnnnnnnnnnnnnnnnnnnnnnnnnnnnnnnnnnnnnnnnnnnnnnnnnnnnnnnnnnnnnnnnnnnnnnnnnnnnnnnnnnnnnnnnnnnnnnnnnnnnnnnnnnnnnnnnnnnnnnnnnnnnnnnnnnnnnnnnnnnnnnnnnnnnnnnnnnnnnnnnnnnnnnnnnnnnnnnnnnnnnnnnnnnnnnnnnnnnnnnnnnnnnnnnnnnnnnnnnnnnnnnnnnnnnnnnnnnnnnnnnnnnnnnnnnnnnnnnnncccacttttccatacaagtcattataacaacattcactcttgtgaacgtgcatcatgatcacagccaggttcagcaagcttaacccatcagcaacagcttcctcacatactggccatattcaaagagttgtttatttgtaccaagtatcagaattccacacccaaccatagtgagagctgatgtcactttataagtaacagagtttgtctgactaaaaaaaaaaaagaaatcaaggctagtaactattaatagtaataaaacaatttaaaaataaagttatacccatcatttaaaaaaaatgtcctcaggtggaaacaaaatgtggctggcagaagagagattgaattaggcaatacaaaacacacacacacacacacaaagggttagaagaaaacaaactggccctagctatgagttgttcctagagcctcgttgatctccaagccacctctgccaccagcagtgggtttagtagccctggaatataatctgttgttgctcccactctgagatcaatttatgcaagattcagctcaggtccggaaacatccttcagggaagcccaccctagagatgtcctgaatccacagcacctgtgcgtaagcttacctcgctatggcgaagtcactatttgcatatctcccactgaactatgagccccctgaaggcagagaccatgtctaatccttttctgtatccccagcacctgagatagtgccaatccatagtcaacaattaaatgtgacgaatgaacgaataagagaattttccaggtcctgtactggatgctttacgtgcatttctctttcagcatacctttattctgctcaggctagtcagtcccagaaatatacctgaaaggtgtctagagctgtgctgtctgttttcacatgtgactatttcctgtttaactttagttcattaaaattaaatgaaatttaaaattcagttcctcggtcacaccagtcacattgctagtgcttacatgcagcatgtgatttctggctatcatattggagaatgcacatttaaaagatttccatcattgcaaaaagtttaactggactgtgctacagtgtaagcttggtgcaagcaaagtgtgtgtctatgtctgtctcgttttccactgtatcctctgcactagcacagtgcctagccccgaagagatgagggagagaaagataaaggagggatggtggtagtaaatgttgtggtaatattagcaatagcacttactgggcaccgactctgagtcccacattgggctatgttctgtgcacgcatagcttcacctgatattcacatcactacactcctggtattaaccccatctcacagataaggaaactgagtctcagaaagtttcagtaatttgcctatggtcacaaagctgataggagagactgagattgaaactcaggtctatatgatttcaaagccttttctctttatttatcttctctttttttcttggaccttttgctttactgcctcaataactgctgtgtgttgtgatgtggattaggattgccaccatcttggcttcctgggaaatcacagaaaggggacttttgaaagctttccaagagaaacaatgggtataatttatgactctgaatcacatatcaagagtgcaaaattttgctcagggtcttaagagaacctgtccctggatgggtgaaggagggagaaaggaacccayccatagtgtggcctgacctgatttcagcgtgtcttgaaatctagactctcagagatgggagtaactactaagatcatctgttccagctcccccaactgctccaactccccacacaacaccatcaacagatggcgaggatccctccaacctggacactcccagaggcccaggctgtgcatgcatgagcctctgcgaggaaagaacccagaagccagcaactctcccctctcctactgatgggagttggtggatgctggccccatctcctcccctggaagagaagggggaaaagggcggggaaccaaaaacctacaagagcagaccagtcaaccaccatagtctgtgcttctcctcagggagtcctgaaccagctcttaagatctcgcaacctattaatggggtaacttggctctcaaatccctggccaacgcccttttcactgctccaccctacctcatgggccatttgctccagtgccctcactattattatcatcactcttgtcctagttttctctaatttctttattcttaaagaataaagtgcaaaatttcaagggagtcctaatcagcatggagaagactgaaattaccacctcctcattctatttcctatttctattaaaactctttaaggtctaattaagaatctataccattgacacctgttgagcttaatatcaactgaagtaacccaattctcttttaaacttgctcttgaactgcattgcccacctgctcgccttcacccgatacttgcccacaccccctcacagccactctagagactgtgcattgtttctcattttatcttgttcagttcagtctgcctcgccaacttgcccagatatttctggctgtgattctagcatccagtgtatttaccggccctctcagccagcttcctgccatctctgaatctgatgagcacgacctcttcatctaagtcatcaataaaaataatgaacactatgggattctgaggcattccactgtatgttccctaaacatagatattaattcaataattaaacagcacttacttagaaaatttattcagctttctgtactataactgagcccatatttcttcatctttttcaacattattagaagaatcttatcaaaggtctctgataaactccaaatattcttcatcactggtatttccttgatcttccgtccaayaatcttgtcaaagaagcaattttgttggtctgacataaactaatttcagtgattccatgctggttccttgaaatcacagcttcaatcctaaaagctcattccacatcccattccagaatgttccctggaattaacatcagtccctcaaattaagacatttttataaattttcccattttaaaaagtagaactttatttctcatgaaggtgatggtagtggtggtgatgatggtggtaatggtggtggtgatgctggtggtaggacagtgatgctggtgctggtgctggtgctggtgatggtgrtaatggggtaatgatggtagtggtaggacagtgatgctggtggtggtgctggtgatagtggtggcagtagtaggggtgattattgtggtggtggtagtggtgggnnnnnnnnnnnnnnnnnnnnnnnnnnnnnnnnnnnnnnnnnnnnnnnnnnnnnnnnnnnnnnnnnnnnnnnnnnnnnnnnnnnnnnnnnnnnnnnnnnnnnnnnnnnnnnnnnnnnnnnnnnnnnnnnnnnnnnnnnnnnnnnnnnnnnnnnnnnnnnnnnnnnnnnnnnnnnnnnnnnnnnnnnnnnnnnnnnnnnnnnnnnnnnnnnnnnnnnnnnnnnnnnnnnnnnnnnnnnnnnnnnnnnnnnnnnnnnnnnnnnnnnnnnnnnnnnnnnnnnnnnnnnnnnnnnnnnnnnnnnnnnnnnnnnnnnnnnnnnnnnnnnnnnnnnnnnnnnnnnnnnnnnnnnnnnnnnnnnnnnnnnnnnnnnnnnnnnnnnnnnnnnnnnnnnnnnnnnnnnnnnnnnnnnnnnnnnnnnnnnnnnnnnnnnnnnnnnnattgatggtggtggtgatagttgtgggggtgatggtggtgataatgataatggtggttgggggcagggtgatgatggagatagtagtggcttccttaactctatgattctgaacaaattaaggagcatggtctaattacctcaattgcacactgtctcagcaccctgggatgttattcaattaggattagagatatatattaatttggggcagatctaagaatttctggcgtcatagaaaatgagatcagagaaggagccaagagaacatctggttctaagccttcatcctgagaaataaggaaacccccaacataataagtgccctgcctggggttacccagccagaataggagccagggtctcaccactctgaccagtgccttctccagggcataactcctcttttcacttccttttctgaagaagcttaaggctttatttcctgcaaaaatatctatttctcctcttggaattcgcttcttaagtcattgatgcttcagtgaaagttaaagattctttcctggaatcatgatgtgtaasagaaaagaaggaaagagcttaagagctctcattttccaagtgaaaaatggaggcatctagaaaagtctgctgyggcaagaaaagggatggaagagaaaaactcaatggccagacagcagctgacaaaacccagacttgcctgcccagttaatcatttgggtccatcactcctttctgtgtgttttgcgttggaagttttcttctcgccttgggaataaacagtgtcgtctgcagagaaaccaagttttcactttgctgatggctgatctggtgtgaaagttccaagtagccaaaggtcagtgaggccactttgatccttagatgctgaaatacttgaaatgtttttggcctaaatgtttccatttcctgctgcatttctccacccctctgctctgggaacagtggctcatagtacttcaccagctccgtcgtgcccctgacttgcagttaaagtaaataagctagagaaagctctttccagctcccagaaggccagggtgtcccttccttggaagccacacaaaatggttactctcatctagccccccaaactccccatccaaaagtctcatcaacaaggatgttcctgatccccagaacctgacataaagatattcactggtggaagtcagtctcttcccttttctcatgccggcatgtccagcaggcctggatgatcacaaagtgatctttctcaactattaggaagctagtagccatatgttcctataggggaaaaagtcccatggtgccccaaagaccacaccattctttaatccctaaatgatgcaaaccatagcaatgctctcctgaggatgctccatcgtttaaccaatattcaatcagtaaatatgtgctgagcacccacttcatgctagtcataggactcatttcttgggataggatcaactgggtttccaggagctgagtggaacagagtccactgttatatagatatagatatagatatagatatagatatagatatagatatagacatagacatagatatagatatagatatagatagagagtctatatatatgtgtatgtgtgtgtgtgtatatatatatatatatatatatwcatacataaaagtatatataaaagtgtgtatatatacttttttttttgagatgggatctcactctgtcacccaggctgaagtgcagtgctgtgatcttggctcactgtaacctctgcgtcccaggttcaaggaattctcctgcctcaacctctcgagtagctgggattacagatgcatgccaccacatctggctaatttttgtgtttttaatagagatggggtttcaccatgttcaggctggtctcgaactcctgacctcagatgatccaccctcctaacctctcaaagggctgggattacaggaatgagccaccatgcccagccagagtcaatctttagatgagagtcaggaaagggtcacgtcctcggcctgggaaggtattggacctaggaaatcaggtaatacgctctggagtagatgagcttgaactgaaatttaaaggatgcgtgaagttaagtgaaggaatgagggtaataaattctaggtaaagggaaccatgtatgcaaagccagtttttgttgtctacacttcagtgttgctggagcaaaaactgtgagtcagaaagttatgggagatgagtctggaaatgtggacaggagctgggccatggagggtctcgtttgtcacattaaagtgtgcattttttttcttgtagctagtgatgaggggaggggcactgagaactcataagtggggactgacgtggccacattttaacattagagcaacccctcaggctgctgtcttagaaggagagaagatggaaagtgaggctgcccctgagaggcttttgagggagttccagggagatgagggctaaaccaatggcagtacaggtggagtcagggacagaaccaggaaagaacttgtaactgagtgtatgtgagggggctgagggaggcagagaagccaaaggtggccaccaggctcctacacctgggaagatagtggtttcattgaccaagagaattgaggaacaggagcaggtgtggggttaggtaacaagttcagttcagggcacgttaactttgaggtttcagtgagagatccagatggagatgtaattggatagatgagctccgtggctggaggcccagataacgaagtcctcagtgcaagtggtgggtgaaacgtgaaaactcatgagatcaggggagagtctatttccatgtatctagatcaatgtattgccagtacctgaaagatccatgtcaaggaggtccatgcctatctaataagggaaagaaacatctcacagcattgagagtctgggcttggcaactgagctgtcccagtagccgtctattgactcagaccaatgtccacttctgccaggtgaatggtcaagcaggggggtggcttacagaaacacttatgcccatcttccatattagagctcacaaatttgtaagcatggtctttctctctaagctagtggttctcaagtctgtttaacattaacattgcctggggggagtggggaggggccttgaaaaagcaccagttgtgggtcccactcccagagatgcttacttaattggtctggggtcaaagcttgggcctcagtacttttttacgtctcccagtgctaccaactatgccaatgttcagaagagttaagaaccattgctaaacaaaacattcagcgatttctcaaattacagagcttttaattccttagctcctctggtaaatctcctacatgtgcattacagtttctctaaaactactttaaggtgtcagaaccgaaactggatctgcaccagtcatggtcttgcttgcgtgttrtccctgtttttgtattcaatgggtatttctccatcatgcctgcaaggctcatgaaaactttgtcaagtctcctgcacttacatccactgtctaccacatttccctgagttatataactaatgtacctgtcaagaagatgtaagaatcacctgccatgacttcttggtgaaccttggttagttccaagggwtcattcccttctcttttaactgctcacgagtcaccactgaacccagtagttctctaattttcatttgcattagaacttcctagagatttcttttgtaatgaaacgtggatcctaaggctctctcctcagagactctgagccagaggtgtgggaagggggcctcgaaccagtatttttaaccagtagttagggtaattatggtgcagggataccactttcaaaaaataaggccttaaaaatggaaaatgaagcctacacatttaactcttaccttccatgatttttactgaaataaccaaattaatataaaaatatttgggaatatttgttatagtactgacaactagcaaaggacaccaatataatccacatgtcagacgttctgaaaacattccataataaagagtgttcacaacagtgattgagggaaagaccaaccaactgtaagtcatcagaatggaaggaaaagttggcctggagattaaatgaaaaggactcctagaagaattccactaacatctccaaaggtaaagcatcagagactgcacagaatggaataaatgtttgaaaaccgcatatctgaaaaagaattaaagtccagaatatatagagaactcccaaaactaaacaacagcaacaaaaaaacccaattcaaaaattgataaagaacttgaaagacatttctcaaaaaaggatatgtgaatagcaataagcacatgaaaagctcagcatcatgaatcatcagggaactgtaagtcaaaaacacaatgagatgccacttcatacccattaggatagctattatgtatattttttaaaagaacagaaaataacaagtgttggcaaggatgtagagcaattggaactcttgtacactgctgatgggaatgtgaagtggtacagccactatggaaaacagcacagtgggtcctcaaaaacttgaaaatagaatcactgtatgatccagtaatcacacatctgggtatatactccccaaaattgaaagcaggaacatgaagaggtacttgtacatccatgtttataacagcattcttcacaatagctaagagataaaagcaacccaaatgttcccttatggatgactggataaacaaaatgtggtaaatgtatacaatgaaatattactcagccttaaatgtgaatgaaattctgacacatactgcaacatgcaaccttgaaaacattacactaaatgaaataatccagtcacaaaagaaaaaatactgcacattccactcatatgaggtacttatagtagttaaattcattgagatagaaagtaaaatgatagctgccagggtgtggtggtgggaaagatgggtagttatcatttaatgccacagttcattttgcaagatgaaaaagttctgtggaaggctgagcatggtggctcatgcctataatcccagcacttttggaggccgatgcagatggatcaccagaggtcaggagttcgagaccagcctggccaacatgatgaagtcccatctctacttaaaaaaactacacaaaaattagccaggcatggtggcacacatcggtatcccagctactcgggaggctgaggcatgagaatcgcttgaacctggatgacagaggttgcagtgagccatgattatgccactgcactctagcctgggcaagagagtgagaccctatctcaaaaaaaaaaaaaggttctgtggatggatggtggcaatggttgcacaacaatgtaactgtacttaatgacactgaactgtacgcttaaaagtggttaaatggtaacttttatgttatgcatattttaccatgtaaaaaaactttaaaaagtggcaagagctacaggaatgctaggtaggcaggcaatgggaaacacatctcaatcaaacgtatccaatggcccctcagatgtgccttgtgctggggccatgggactcactctttgtgaagctcatgaaaacaatatctagcagttccaaagaagggagacatctaagaatgcaaagctaatgtcactctttaaaatagatgctaaaaaaaagagagaacataaacttaaaaatctccaagttatatttatagagatttaagaggatatagcaggaactatcaacatggagcaatctgaaagagagcaatctgagattgtgaaactttgcctgctttgaaatgaaaaatattttgcagaattaaaatcatgcagtggaagcacaaacattggaacaatgcagaaagctaaagatgagcatgaattctcacaattctgacaaaaaacatgaaagtgaaataatgaggggaaaacggaggctattattcaatacattaaacatataaatacagaatttttcaggaaaagaaaaaatagaagatgttataataaaaatataggtagctgaggcaggaggattgcttaagcccagaaggtcaaggctgtagtgagccaagatcgtgacatggcactccagcctgagtgacagagcgagacctgtctctaatttttttttttaatttaatttaccgtgacacatgtgtacctatgtaacaaacctgcctattctccacatgtatcccagaacttaaatttaaataatttttaaataaaaaaaaatttcctgacattacttcaaaatagttaatgtgtaccaggaaaaattaaaagtatattctggtgaaaattattaattataagaaaaaatctgttggtatgaaaacagaaaaacaatgttttattttcagagaaaaaataagcaagtgtcagacattgtgcaacactaaatatcagaaataagttgaggtatgactgtggaatttgggggtagtaagataatgaaccaaccggtgccgtggctcatgcctataaatcaagcacttggggaggccaaggcaggcagtcacttgagcccaggagtttgagaccagcctggccaacatggcaaaaccccacctytactaaaaatacaaaaattagccaggaatggtgatgttcacctggagtcccagctacttgggaggctgaggtggaaggatcacctgagcccaagaggtgcagactgcagtgagccgtgatcacagcactgcactccagcctgaacaacagtgagaccctatctcaaaaaaaaaaaaaaaaaaaagattatgagccagaattctctattcagtaatttgtacagaaaaaaaaaagctattctcagacaaggaaaaaaaaaaaaaaaaaagcacccagcaagtaggccactaaaatcctttattaaaaaatgtatttactcaaactattctggtcaacagagaaattaacattaaagcttgggaatggaaaagatgtgatatcaaagctgtggcgtgaataataaacccacacaaacatagacttagtatttacatgttattaatatagtcaggaaacaatgcaactgccaaaattactctcaacaaagaagatacataagaaacttaatgataataatgtggggctaaaaactcagattactcaaggcaaaaaaccttgatgtgctgaatgtctcattttgtgctgtgggaaacattgaatattgtttcattgctgaacacagaaaaatacaggtttaaatacatttttaaataagaagacagtagatgaatataaaactagaaataccatgcttaacttcaaaattaggaggaagatttggaacattatagccaagaatgaaaactaaaaaagggctgggtgcggaggctcatgcctgtaatcccagcgcttcaggaggccaaggtgggtggatcacttgaggtcaggagtttgagaccagcctggctgacatggtgaaacctggtctctactaaaaatacaaaaattagcctagcgtggtggtgggcatctataatcccagctactcaggaggctgaggcaggagaacacttgaacccaggaggcagatgttgcagtgagccaagattgtgccactgcacttccagcttgagcaacacggtgagactctgcctcaaaaaaagaaaagaaaaaaaatacgtaaaaaaggaaatagcaaggaaacattaatataaaaagtataaaataagatgatagaagccaggtcaaacataccacattaagtgtgaatggtttaatcatttccttttttttttttttttttttttgagactgagtctcactctgtcgcccaggctggagtgcagcggctgtggtctcggctcactgcaacctctgcctcccgggttcaagcaattctcctgcctcagcctcccaagtagctaggactgcaggcgcgtgccaccatgcctggctaattttttgtatttttagtagagacagggtttcaccgtgttagccagagtggtctcgatctcctgacctcgtgatccgcccgcctcggcctcccaaagtgctaggattacgggggtgagccgccccgcctggccaatcatttctattaaaagacaaagaaccacgcattggtcaaaacccaattctaaatatatgctgttttaaacaaaatgggagagaaagggataaaaaatgaagggacatagatatatcaggaaaatgcaaacaaaaagaaaggagggtgatattagtattaaactatagctaaaagtaaaatttaatacaaaaatcattaaatgatacaataaaattgtcaaaacacaattgcagagggaaaatctaacatacatctgtcaatctgcaacaaattgagtgccaaaaacaaattagtgtataaaagttttaaggctataaggagcttgatggaatggacatatatgggactttacatttaagaaatgaaaaaatctattaaaatgtttatgaaatattgagatattttgatcccatcgtaaaaaaattatgatacatttcaaaaaatgtagaacttgttctggcagtaagaggcaaataaaactgagtatagtatagtatagtatagtatagcatagttactctaggataatctattcttgaaatttgatgtaggtctaagacctgtgtacatccactcaccattattgatttcagcattcagtgagaacaagaccaaaaagacctgttgtttgacaagcaccaagtttatagaatgcttccttctttaagaatgaataaagagtaaaacatataggaattaaaggaaatgtaaaataagggagtaaataatagcatatgaaatgaaaatgagttactccagctgggcctaaaagaatattttagtagactagaatcctcataagagggcactagagggcatggtctttacaaatcaaaagacaataagaataaagctgagatgaaaatgaaaaatggtattcaaagatgtgaatgaaatatggacggactgcaaggaaattgaagcacaacagcagaattaaaattcactagctgcaattaatgagcagagtattctatcaaaagtcaaaccaagcatgtgaaggaagtgacagtgtaaaagataggcaactagtactgaagcaaattaaaaaagacatctaactaataatttgtacatcaagttttaaaactgtatacaaggtgaggggcagtggctcagcctgtaatcccagcactttgggaggccgaggcaggtggatcatgaggtcaggagttcaagactagcctggccaagatggtgaaaccccatcgctattaaaaatacaaaaattagccaggcgtggtggcgggcacctgtaatcccagctactcaggaggctgaggcagagaattgcttgaactcatgaggcggaggttgcagtgagctgagatcgcgccactgcactccagcctgggcgacagagcgagactcggtctcaaaaacaaaacaaaacaaaactatatgcaaaagtaaaatatattcaaacagtagatatgcattgatacaaaaaatcctgagaaaaatttgggcctaaaaccccagataataattttcaaagcctgaaaagactggtgtttgtctgaaaggataagacagtgaaaataaaatattctgaattccttggttcaattatgagactgtcatttcattcctgacacttaaatttagaagacaatagttacagagttttcaataacccaccttctgaatcaagggggtctaagaaaacaaactctatgcagcaaactaaatattaattaaacaaaggagacagtaaggaagcattaaaatgataataaaatagagcatgaaaatgaagacaccaaacaactcagttataacaattaacataagtaagctaaatcactcatttttaataaaagtcttcatattggatcaaaaatgaaaattcagctctatgttgtttaccataggaacccttaaaacaaagtgttgtgcaaaaattaaaacactgagaaaaggtatagcagggagatgccacaaaaactaaagcagaagtcattttattgatataagacaatgcaattcatgacaaatatcattaaataatacaatgaggattgttttctataagtgaagaatcaaattcacagtgaagatataatggccatggaaatatgtacatcaattaatattgcaccccaaactgatggaaacacgrtagaggtggaagatatcaaaacaccactctcaggctttcacatatcaagtaaacaaacaaaacataatataaatacaggaattgtgtaatataatgaatactactgaaaaaattatatgctgcgtaatatccaaagcacataataaaatttattttctagggctcgtagaacatttataaaaattaattttgcatcaggttatacataaaacctcagcaggttcctcaaagcaaaaatagtaaaagtcatagtttctgttagaaatgaattttattgacttatttattttttaacttttattttaggttcagggatatatgtgcaggtttgttaggtaggtaaacttgtgtcatggggggttgttgtacagattatttcatcacccaggtattaagcccagtacccaatagttatctttcctgctcatctccttcctcccaccctccccactcaagtagaayccgtgtctgttgtttccttctttgtgttcataagttctttaagttcttatcatttagctcccacttgtaagtgagaacatgtagcatttggttttctgttcctgcgttactttgctaagtatccatccatgttcctgcatccatgttcctgcaaaagacatatcgcgttctttttatcactgtatatattccatggtgtatatgtaccacattttctttatccaatctgtcactgatgagcatttatgctcattccatgtctttgctattgtgaatagtgctgcagtgaacatttgcacacatgtgtctttatggtcaaatgaattctattcctctgggtacatacccagtaatgggattgctgggtccaatggtagttctgcttttagctctttgaagaatctgcatactgctttccacaatggttgaactaatttacactcccaacaacagtgtttaagtattcccttttctccacaaccttactagcatctgttttggtttttttgaactttttaataataaccattctgactggtgtgagatggcatctcattgtggttttgagttgcaagagatggattttaaagataaacaacagcagagggaactgtcaataaattatgtctatttacacaataaaatactaggtaaccagggaaaacagtattgttttgctggtattgaggaatgtttagtaacaccaaataatgctcaccatatactgctaagtgaaaaaaagacaaaaagarctaaaacaaatwtgaaatttttttttaaagagatgcctacatatatatggatacattctagaaagaatttacagcaaaatgttaattgtcattatagttggataatgagatgatatgtgatttttattttaaaatcatttaaaaatatgatttggattcttagctaagactagtatcatgctcacgctgttgatagtttgtggaatatattttcttccacttttttgataataaaaataagakagtccaggtgcagtggctcacacataatcccagcactttgggaggcrggcagattgcttgaggtcaggaaattgagaccagcctgggcaacatggtgaaatcccgtctctaccaaaaatacaaaaaaattagcaaggcatggtggtgcgcatctgtggtcctggctactcagkaggctgaggtgggaggatcacttcaccccgtgaggcagaagttgcagtgagccaagactgcgctactgcactccagcctggatgacagagtgagactttgtctccaaaaaaaaagaaaagaaagaaagaagattagatttgcttgtttctggtcctctggcttcttgttgttgtttttctccaaaattcttcaaagatcaacgaaagtggttcagtagcctccatggaggttctggtaatcctcgttcacaagcgatagactaagctgttctttgctcttatgggtctaaaatgaactggcccagttcccagaattcctccaactttttttggcccatagtggggttttttgttgttattgtcatttagtatttcagatcactttcagctatttttttcacattataatttttccgtttaagtttgtgccatcttcctatatgttccttggttgtgtgcctttcttttcctttttttctaagtgtctttttcagatgggaatctgtgggtgagcctgcaggcacattttttaaaaggaccatttcttttccctttttattggaatgatttttgaacgcttccccattttggaaaacttcaggctgcctctattccagaatctcatctaatcataactatcttctttttaactttttagactgcctaaatctagacttcttggctacttattacagccagccttctcctcattgacaatcatgtcttctgagctggagtggcttgtttctcctaatatgtctcttctgcttgcttcaccaagcagggtctttctgttggtcagaatgagggaccgagagaaaaaaaacagaaataaaacaaaacaaaaaatcaaataaaaaaataaagaatgagagacagaggagtgtatctagttaagcttctttattccatgtcaacaagggaaatgaagagacttgtctgatgcgctatttttagctgaaaagggcgttttgcaagtgttcagtcagcacaagaccactttcactgctgtaacttcccttatgacagaataacagtggctaagaatccaccctccatttcttcctgtggccaagcggcctgtagaaaatgctcataatgaactcacatgtgttctttaccatattctgctcactcatgatatctctaggtgctctatccttagggtcgtgaatttccgtaacaaatcaatctcttgctgtctagactattcagcccattaatgtagtttctagtatttttttttattatactttaagttttagggtacatgtgcacattgtgcaggttagttacatacgtatacatgtgccatgctggtgcactgcacccactaactcgtcatctagcattaggtatatctcccagtgctatccctcctcactcctcccaccccacaacagtccccagagtgtgatattacccttcctgtgtccatgtgtcctcattgttcaattcccacctatgagtgagaatatggggtgtttggttttttgttcttgcgatagtttactgagaatgatgttttccaatttcatccatgtccctacaaaggacatgaactcatcattttttatggctgcatagtattccatggtgtatatgtgccacattttcttaatccagtctatcattgttggacatttgggttggttccaagtctttgctattgtgaataatgctgcagtaaacatacgtgtgcatgtgtctttatatcaaacaaatttacaagaaaaaaacaaacaaccccatcaaaaagtgggcgaaggacatgaacagacacttctctagtattctttataattatgtatacatatgtktacgtgtcaccaggtaccttccctctcttgtctttgttttaccagcagttcctggatagattcatggtatcatggtatcatcccaactcttttatattttattttatttctgagttggtggtttcactatattgcccaggttggtcttgaacttcttggctcaagccatcttccttcctcagcctcccaagtagctaggactacagttgtgtaccactgcatctggctctatcccagctctttgatcctcttactcatcaccctgtactaaatacatgtcccccatgcttagtagatgcaagtccttcatgaccagacatgaacttacccttccagcatatgataaatcatggtccagaaatctacagccacttagtgatatctgcttctttgttatcccagaatcccaatgatcagcagaaagaacaatgacaacattatccctattcccaagtccttcacagtctcgcccctcaaactagtgggagatccagttagcctaggagataaagtaccttgaatacttggaaaaggcactgaacacaaactgatagtttagttcttgacctggaaaataattgaagcttgtggttttcggtagtctcatgtgcagaacagactaaaatgagtgagaagatagttatgagaccagagacctgctagggccattaagaagcccctacccagaaactggaggtgctgttacaaggaatttaatggagagaaaggggcagagctgaaagataaaagacaaaacttggcgaattgatgtctgatttggtattgagatttcagagaggggaaggagactaaaggtaaataaagccaatgtatcaagcccaggaaatgtggagaatgacttcttcattgaaaaagttagttgtttagttttggagatagacgtgggaggaaggtaagtttgagagtagagtatttatatatttaaaagttacatctagcaagtggttagaggaatgaatatgtgcatgtgattccatcagcaacagggtggctttctgaccaaactaaactcagcatgtgatttcacactctgatcaaaacaatgtcagtcaatcaaataaaatgatttatttttctttagttggggctggtttctgttggctatttttgcctagttcaaagtgactcacccagggagccagtccctccaattgggttgtaatttattaaacacattcagccaaatgactaactctgtgctcttctcccaacccctccagtgttattagtctggcccacacatccagccactcctaacccctgcaagcagatgtttccataaagtttatagttttttaaatttacttattcattaacagcttctagagatgaaggtgaaaatttacaatgttttgtcttctacagctggtactgaaaagcatcttctttccctcccatcctcttcctcgaagatttttcatctctaaattcatactttctctcattttaaaccacttctccattttatgaggacactcaaggggtcagggaatcttggcacatttacctgtgtctgataaagaggaagggaagggaattaacatctgtggagacctgtgccaggcacggccctgggaaacctatattcattatctttaatcctactgtgtaaggtgataccactattcccattttccagatgaggaaacttgggctcaagagattaggtagaataaatagtatgctcaagaccacaaatataggaaatgtcatggaggacatgctgactcaggtttgttggagcttggggtgatactcttttctgtttcctggcagatatagatttccgggtactgctgacactttgtgctccacatcagaagccagtggtacaaaggagcagcagagaaaccttcaatatctcacaggccccagcgtacaggcctcttggcataccacccacccccacaacccacacacatgcttcagtaagctgggctcattattttggaagatttgggggaaatgaaatagcacattcctaattagtttgaactgaggaacccattagctgtattttttattgaaattgaaaatacaaaaacataatctcatagcatgaaaaaacctcttttaaagttacatccaatttaggagtcttgaggttttgattttagtagttcctctctccggtggaggcatgtaagacacagttagtaaacaggagtcttttctgctctttcttctcagtcaaccatgtcaacatcatcgctgtctgagctcttctttctctgagctccacagcccttagcacacacagctcagtactatagcttttatggaagctctgtgatatccccaatgggctttaagttcactgatggctaaggtaatcctaattcatctttgcctcccccatagctcctagcagagtattttaaacatactaaaagcttgataaatgcacaagyataattgcccattgaacatcattattttaaccaactttataggaaaggataagctaactagaagatagaacaggatttcaaggtagaataagtcctctataatttctggtgtaggggaactttaggtgaaggtgattcatttatttaacaatggtatacattcatgcatcgttcacagatactaaaattctcatgtatataaataatactcataaagaatgaaaagacataatacatattgtttatcctataagcccacatacattacacatgttcatacatagtatacattgatatgttccatgcagtaactgcttgggtatctgccttcaagtcaatgttccgtaagcctccatctctaaccaatgtacgtaaactttgaaaagattgagttgtgccagaaaaaaatagaaagaagcagacctagatagtagaaataaggactttccttcaaatttttaaaaagtataaataatacattaatacattccctttttaaaaaagaattaaaaagttacagataacaaaacctcaacttctaaactttatgtatttcttggaagtaaccatgattacatttcatgtacatcctttcacatctctcttttttcagttacataagaatatttgtaccactacaaatattgcatgtaattttgagaggtttttaaaatgacgtttactagttctaatagtcacaaaaaactccacaagggagattccattatcactcacatgaataaactagggcttagatagacaaagatttcaaaaattttaccagtcacgtagctagtaagtaccagaactaaagtaagccttcctatccgtgaataaaatatgtatccatttatttagatttccctattgtcctgctacaaatgcctataggtttctccatttttctccatgaaggtcttgcacattaattgttagattcactccaatgtacattcyacttttcyttctttctttttttttttttttttttgagatagggtctcactctgttgcctgggctagagtgcagtggctcgttcttggctcactacaacctctgtctcctgggctcaagggatcctcccacctcagtctcccgagtagctgggactacaggtacacaccatcacacccagctcatttttaaaattttttgtagagacagggttttgccctgtttcccagcttgtcttgaactcctgggctcaggcaatctgctcacctcggcctccctaagtgctgagatkacaggcatgagccactgtgcccagcccattctactttttattaaaattttgaaaaagatctttttctattatgctatatttcctaattggctgttgctagtgtaaaggaaagcagcaattttttaatattgattttgtgtcagtcactttgctgagatcccttaataatttatatttatgtgatctcttggtttttctaggtttgctatcatatcacttaaaaataatgacagatttgccttttctattccaatttatatacctctaattttgtcttatttaattgcattaactgggatctctcatagactgagactgctgaatagtagagtttctaacatgcatccttatcatgtccttgattttaatggtaatgcttctagtatttcaccatttaaatatgaagtttgctgtgggattttggaggatagccatcatgaagttaaaggaggtttcatttaccttctgatgtgcttaaaggttttgtttgtttttttgtttgtttttttattatatttcagtgttgaattttgttaatttttttctacatatattgagatggtcatatgaatttctcttatattctattaatatagtatattgataggttttataacattgacccagtcttgccttactgaaataaactgtttattgttcttttaatgctatactgaattttactattttatgtggggttttactctatttagatgaggttggtctataatttgtttttgtattttccttgttcagtttgttaccgggttatgctagcctcatagaataaattgtaacttaacatatttttctatgctctggaatggtttatgtaagagaagaattatctgttttttgatgactcttagaactgcctgtaatattgtctgggccaggagggtggggcaagtagaccttttaatattggttcagttttatctattattgaactagtcaggcttttctaattcttgagtcacttttgatcacttatacttttgcagaattttcccattttatctaggttcttgaaagtggtgctataaagttgaatatagtagtgtctcataatttaataaaatctcttacgttatagttatgtcttctttttcattccaaatattgctactggttcttcttcttcctctccctcctcctccttccccttctctctctctctgtctcatactctgccaaaggattgcctattttattagatttttcaacaatattaacaaccaaaaggacttttgyttttaaccaaaactgtccagttttttgttttgttttgagtgctagttgataatctctgcccttatctttattactgccctctctggcttcacttagatttcgtttgtgtcccttttttagcttcttgagttggaggcttcattcatttttgttttcatctaccttgttttctaagaaatttatttaaggctgcaaagtgtcctttaagcattgctctaaccaaattgtaatctactacattgatatttaaaatcttcatatttacattttttttaaacatggagttacttaagaatgcayggatctttttcttaattttcatattgctgccaatgaaatttcctgggatacagattctgagatggagattgtcatgcagaagtgttaatgagttttattagggagtacgcttgggatcacccttcgtggaagggaaaggacagaaatggaacttggtgaagggagaagttggactgagatggtcctgcagagttgctcccagttggggtgagatgaccaggcttttataccgtaccactgtgtatcatccagtcactgggtgtgggctgcccaagaaggggacatgaccttggacaaggcagctttttagagttaaggcaattcctgaaaagaattgacaggtgagagctgtctgccagcaccactcccaagtatctgggagatctgattggcacagttcagcacctactacaaatatgtatagtttaatattttagatgtacatactaaaagctatttaatcctatattgtgtggcatttaaatcgtttygattttttgctattttaaacagtgctgccacaaatgtcctgggagrtgaaatcttgtggaaataatagtagtagttgcgaaagtgatactgttattactgtccatagttgctttcttaagataaacttatagaactaaaatgtcatggaaatgtacattttaaggctattggcatatagcgttaccttggctaatttacttccacaccagcagcattggacagtttctgtttccttcctttctaccaacaaggatattaactatttttaagttgttaacaatttggtaggtggcaaaagtatcttactgttgtttccatccaatggagtatactttaaatgaatatgaaaacaaaaggcattccccagcctaaaatggtggcacgagataccatgtggcaagagtaaagggtttatgtctaacatttctggaaggaaaatgaaattactgtttaaaaagagcttaaatattacttatttcactcaccacaattatcaaatgagaaacttgaagcatagagagtagaactgactgcttaggccaaggcaggcagatcacaaggttagtagttcgagaccagcctaaccaatatggtgaaaccccatttctactaaaaacattaaaaaaaaattagccaggtgcagtagtaggcgcctgttgtcccagttacttgggaggctgaggcaggagaatcgcttgaatccaggaggcgaaggttgcagtgagcygagatcgcgccactgcactccagcctgggcaagctaataaataccaggacttgggttagacccaagggctccaggtcttacaacaccttttatttgctttagaaaattaatttgttcttcctttctggtttccaaaccccatcaagctgtggtgtttctgtaaccggggtttatgagtgccctgtgaaatgatttcaatgttgtactttattcaaatgacaatgtttaaaattattacagatatatttgcattttctcgatgactttcttatgccaagtactgccacaagccaatgcccgttaactttgtgtcatataacataattccaatccaggattggaatcctggattcattaattaatagctctgtgacctaggacaagttacttaacctccgtgtttcagtttcctcagctttaaaatgagcataatatttgtatccacctaacagagttgttatgaagagtcaaccagctaatttgtgcaagttgtttaggaccatctgtcacattgtaaaggttactgaatattaatgaagtatttatttcaaactgggttctagacacctctggggtagaggaggccatccagggacatattgtctgggytaggcatgaggtgtatgcacctctagatgctgttgtccacagtgccgaatcattactacataatcgcccattaggacactgctggttggtggaggaagaggcacctggctacccagagccttccataaactcagccctaggtttctggaatgaaccagtaaatccaccctccatcagtttacaatctagagatggtactaataatctctgtaggtctgagaagcagtacagatgcagggtggggtgggggaatatgggctttgcattcagacagacatgggtttgaatgattgctcagtttcctgcaaggaacctggtcccaggtgtaatattacttaccttgagagattattttaaggattgcattaatatagaacagatagtagaccctcagtaagcggctgctgctgtttatgttgttatgggaaacaaaaaggggatgaggaaaaggaaaggagaattagagaataggagatcaggcgttggcagaagagagaggggagggagaacacaagcgcttcatgaagtggagaatgatgactggatggctgacctcaagttccttctactccatgggaacttaccaagctgagcgtggttttacacaccgttccaaacttgagtgttttctctttagtggggttttgttgcggttactgttaaaacacacacacacgtacataccacgccgctatcaccacaatacctaggcatttttacagagctgtctttctagacctgcccaagccccatactcatgcccagggctctgcaatgtctcttcgctgacaggtccatttctggtgtgggaatgagctgctagccttaatggagctgtcattttcttaccttcttggatttttggtttgtttcttgtccatttgcttcatgatggaaaatcttacctgttctatgccttctctagatgaatattttgcacaaaatgttatagaaggagtatgaaaaacacatccagattggaaagaaaggaaaattctgcagggaatataagtcataacatgacaattttaggagtgyggcatgatgacagttttctggcagtcatgggcctccagcttccctataatgttttactgcctcaggaaagtggaactgatttgacagacccaaaatctgtctgcttaaggtccccattaagaaaaagaaatagctccagatactccaagtttctcttcttagtcctgttccttacattaatgtaaagcagtgattacaaaacacaggcaggttgctgaccctccctgaatttctctagctctggtgcgggttccaagaatttgccttcctaacacgttcccccggtggtgctgatgctgctgggatgaggaccacgctttcaaagccactgacagaaagttttactagtgatgctctcataaacacttagtccattttctgctgcttataacgggatacctgaagctgggtaacttacagagaaaaggaacttatttcttacggttatggagggtgagaagtccaaggttgagggactgcatctggtgaggcccttcttactggtggtgattctacatagagtcccaaggtggtacagggcatcatatggtgagggggctgaacgtgttagttcagatctcgcttcctcttcttataaagccaccagttcccctcccatgatagaccattaatccatgaatggattaatccattcactagggcagtgtcctcaggacccaattacctcttaaaggcctcacctctcaatactgccactttggagattaaatttcaacatgaattttggagaggacaaacattcaaaccataataaacattatacaaataatctcataataaccttgggaagcatgtgttaatattttcaccattcccatttagagatgaagaagaacttgctaatgtcacacagttatataggatagagccaagatctgaattctggtctctaattccaaagtcagacttgtgcttggtgctctgggcagaagtctccctgacacagggcatgagtctagggcagacgcttccccaggtagtaatttcataaaggagacctctactcacaatcccttccctacatcagcccctcagcactggagttcagaatcagacttttccattgctattcacaaccctgcttccttaaatttccactgttaagggccccaagtggtgaagctgagtgaactctcccaggattcacagaggtggccccagggcaagagcaaggttttctttcgaagtcccatgttttgcctacaaatttcctggatattttgcattctattccattctgtgctcatgtttaatataatatagcttttcctccctcaaataatgttggcttttcaggaacaggccatggtttttattctggcttccattccccttccatgttgaggaccagggcgtggcatctccacaggtggcttattaatggcatctgtacctgcacaggctcaacacttaggtactcagcactcattcatccaaagatgttaccatgagctttggaacaacacagacttagattcctatacagtctcatcatttactagtaggataacttgggagaattactctgggcctgcttctacagatgttaaatgggcataaaacatacgttcctcacagggtttggtgactattacagatgaagtttgcaaagcgcaagatgtgttgcaatctataaatggaggttgctgctattgcttgttattacagtgatttgttgagcaagtgaacaaatgaatgaatgaccaatcctcagattgtgatgcccctgagctacaaacactcttcttagaccaacactgcctgcctgtgccaaagacagacccccaaagtagcagtcctcaacttctccttggagcccaaaagctttttctgggtaccagccactcccagctcccccacctgggcatttggttcagcctgacattttcatgactatcttgcggcagagattctcacattcactctgaggccactaatggtgtacaaagtacctctcaaatgaaaatcctctctgaattcttatggatagaatgcaatcccaagacttttgtgtttatgtttatttaaggactayatgccagtaatatgctaaatgagttattaggtattactcatatttaccactcataaacttaaattagatcattgcaaagttccccaagggctttaattcagttatctgtgaaatcaggctgcttctaaatgctcagcagctacagcccccacactcaagtagatggttagaatcctgtgacctggggaaggccccgttgttgtcattgcatgtcagtcttgctttgagttggttgtggttttcagctactgctattcttgcttattaattagaaattatagttcacttgacttcatmattatcatattagtttgtgaaggatatttggctaaccctacagcaggcagtgatacatatttgcatcgaaggtatttttagcctataattttccaactactagattttaagacatgaataagttgcagttcaagcatgaatcatgcagattctgttgccaaatagacacatgcataacctgcccctaaaagtgcttgtgtagttgtcttggttatctacgattacataactaactgccccaaaatcttgttgctccacaattatgttattcgtctatgtgtttctgtgcattgggaatccagaccaggctgagcggggatgggttatctctgctccacgtgtgatgtctgccaaggctgtgaaatcccaaatggcttcttgtctcacaacacagctaggatgacttagatgactgggtgctggctggaatggcttgactggggtcttacatcttgggcttcagttcttgtcatcagatgggttgctcagttctcctctctgtaatgttagatctcccttcatccacgtggcctctccatgtggtctctatgtgatctctccagcaaaatggctgaacttcttacatggcagttcagtgcccttaggaactcagaagtgggccttctcaaggcttatgcttgacacaggcacagcaccacttctaatgcactctcttggttagggcaagttacaggtgcagcccggactcaagggaagaaactagaaagggcataaatatcaggaagcatggtttgggggaccaccaatgtaaatgacgaccacaatagtgacagttcattgataaattcaagcaacttatgtaacttacaaaatactatcagattaagcataataaagtaacttgattataagtctatatctgttataactttataaccctgatagcctatacttgtgtaggtcattattttaatataaaatgtgagtgttgatgtatattttatggtaaattaagtgacttrtaagtgatactatcaacaattgtactgcaacttgcatcttctgttcttcttgaattctttttatcacccagttcctcctctatagggacatgtaaatagatgtggtaggaactttgactccatgaaaatgatcttggtcaataaaaggttgagaatcatttttctagtgtcaaaaaatgaactcttagaaatcttgtagtagctagaggtgcaaagcagacaggacactctttctgccctgaaggagttcaaagtcctgtagggaagacagttggtaagtacatgcactgcagtaaatgtcataatggagaaaaacccaaagtgctactggagagcagacaagatatgcccagccaggtctgggcaattaaagagggcatcttcaggtgcaatttgaactaaactccaaagcctgcataagagttatagagttgaagaaggaacagtaggagttaaagccagagatggggcacttgtcaagttgcgactttccacaagtctgagaagagaaagaggtttttatctttgtagcttttagtctttcttcccttatgaacatgtactcattatggctttgtaataaaccttcaaatgcacataaataggcttctccaatctgatgtcatattcatgaattaatgtttttaggagagcaaagaggagatgaggaggtgtttgttcctggataattgggtatggctgattcattcaaatgaatagagagacccagggtgcaattcaatactcattgaatttgccttcttcctcctgacttgtgatttccatgctgacatccgtacagaacaaatagaatttgatccagtatataaaattgcagagctagaaaatgcattagaaaccattattcccaccccctcatttcatagacaaggaaactgaggccaaaggagctgaagcaattgctcagagtgacatagctgtagagacataaaatactcttctcctacccaagtcagacaatatccaatctgagttttatttagaaaatcctattcaattttttctgtcagaaaagatgcttggggtggtaataagaagattgttcatactacaaagagcctctgagaggggagtgatggagcaggctgctgagggaagtgccgagcttcgtgagctagagaaagccctcctggctgtcagctgtcaccttcatcaaagggcagaaggcagaggcgggctgtcacgtgggataccatctggagagtcaggcaatgttttaggcccctaacttttcttgaaggaaataaagaatggtgtaaggccgggcgcagtggctcacacctgtaatctcagcactgtgggaggctgaggcaggcagatcacctgaggtcaggagttcgagaccagcctggccaacatggtggtgaaaccttgtctctacaaaaaatacaaaaattagccgggcgtggtggcaggtgcctgtagtcccagctactcgggaggctgaggcaggagaatcacttgaacccaggaggtggaggttgcagtgagctgagatcatgccacaacactccagtctgggcggcagagcaaaactccatctcaagaaaaaaaaaaaaaaagaatggtgtagccttttccactgtgaattcaagcactgagctacaatggaacaaccatgataatgataatatgaatatttgttgagttatagcaatgtataccacatcacctcgtcacccctcctcagcaggagcatcagctccttcaggaagcttttcctgattatttgtgcctgcttcagacacattagatgaccccataaatctctggacatatctgcaccacttctcttgccagcttgtatgttaattattaatagctgtttgggtgtctgtcccccacagggaatcatcaaccaccgcaatagagaaatacataggattctgtggaacacagctgggagaacaggcaaatttgctcaaagagttccaaaaagctatagaaaagaagtgaccttttaatctggatctaaagagatgagtagagatttgttttaggaaggaaggagtaaagggcatttcaagtagatcaaaggcatggtgtgtttgtcaggccataatgcttatggggtcctcccacatccaggcactttgctagtgctaagagtagacagaaggtagatttggctggaaggtggagtgtgtggggcaggaggtaatgggggtgagaatggggaggtgagttattaccacaggtaaagaaccttgtggaactagctaaggagacagctctttttttcctggaggccaagggaggcttctgaaggattttaaggagataagtgtcagagtcctatttaattctaaatgagaaagatctctatgaacaggtatggtgtgattcataggatgtattgattggtgaaaaaacaatatgcagatgatgatctataatgtgctaccttttgtattagaaagaaagggaagccaggcacagaggctcacatataatctcagcactttgggagaccgaggcaggtggatcacttgagcccaggagttcgagatcagcctgggcaacatagtgagacactgtctctacaaaaagttaaaaaaaaaaaaaattagcaggtcatagtggcatacacctctagtcccagctactctacwgggagggctgggagggggctgctgaagtgggaggattgcttaacccaggagttcaaggctgctgtgggctgtgattccactactgctctccagcatgggtgacagagagaaaccacgcctcaaaaaaaaaaaaaagaagaagaaaaagaataaggaggaggaggaggaggaggagaaggaggaggaaagggggaaataagatattcacatatcttctcacatgtgcaaaactaaacacaggaagtataaactagatactataagggtaagtgagaataagatagaaaagaggagatgggaaaagagtaagaggaatgagggatacttctctgagtatatctttttctttttgtttttgttttgagacgggatcccactctgctgctcaggctggagtgcaatggtgcaattatagttcagtgcagccttgatccctcaggctcaggtgatcttcccacctcagcctcctgggtatctgggaccacagatgcacaccaccatgcctggtgaatttttttgtttgtattttttgtaaagacggggttttgccatattgctcaggctggtctagaactcctgggctcaagcatctgcctggctcagcctcccaaagtgctgggattacaggtgtgagccaccaacgcctggctgaatatatctttctatatagttttgactttggaaccatactgaaaaagaatcagtggatatgaagaaaacatcctaaaatgaaatacaaacagaaactgatgggagtgagaaagaactaacctacgtaacttttgagagtagcattttgaggatttgccgttgcctgaaaacaatagaactgtaaacaaatcttgaagtctattttgtttttcacagaggtgtggactggcaattctgaaactactttctgtgtattaagcaaataagtatgttgtagatgatggaaacaaagcttgttagagaagatagttaaaaaatatggaaggaagggaaggctacarttgactttgcaatgtcggactggagttggaggtgtaagtatgaactcaaggtatttaacagagagagagagagagagagagagagatgaggggtgtgtgtgtgtgtatctgtgtacatacatctattttttttttaagacagtgtctcactctgtcacccaggctggagtgcagtggcaggatctcggctcgctgcaacatccaacccccacctcccaggttcgagcaattctcctacctcagcctcctgagtagctgggactacaggcatgtaccaccacacccagctaatttttgtatttttaatagagacagagcttcgccatgttggccaggctggtctcaaactcctgggctcaagtgatccttccgcctcggcctccaaaagtgctgggatcacaggcatgagccaccacgcccagcacacgcatctattttctagctctgtccttgatagggcctagaagcaatgacaccccagcagcagtgagcatacgtggtacccaagctttggcttcaaatgccattcttcaccaaaggaactccttagagaaatgactgattttagcacttgagctgaggaagtacgagatgagcctgaaacattttgtagtgctagaaaataaggatgtgctgaaaaaatgactgagatatatctaaagaacagatcgccaccttgactgagcttccactgatcaaatctggaataatctgagagtcgaagatagcaacagatttgtaacccacagaataaaataagaatctgtgaaaataaatatatattatatataaatgcagtttttatacacacatatatattctttatatatttataatttatctttatttatagtagacatataaattgatataaataacagaagggaaagctcttacttacaatagactcctaactaacaaatataaagggaatgatggaattagaaaatcagtatcattgtaataattaatccaggcaataatcattagtggacgctaaaactagtggataagggttgatgagcaattacaaaattacaacaacctggagcagtatcagatcaagttcagaaacctgtggcacaatactagaaactttctacttgactactgccagctgattttttaaaatttcaactattattcagggggtacaggggcaagtttgttacctgagtatattgcatgatgttgactttggagtatgaatgatcccatcacccaggtagtgagcatagtacccaatttttcagtttttcagtttttcagcctttgccccttccccctgccccctctagtaatccccagtgtcttttacttccatatttatgtccatatgttcccaatgtttagctcccacttataagtaagaacatgtagtatttggttttcacatattttctatttggtatttggtattttctattcctgtgttaattcattttggataatggcctcaagctgcatccatgttgctgcaaaggacatgatttcattcttttttacggctgtgtagtattgtatggtatatgtgcattacattttctttatccatccagtccatcattggataaatggataaattggataaatccaggttgattccatgcctttgctactgtgaatagtgctgtgatgaacatatgagtgcacgtgtcttttttgtggaactacttattttcctttggatgtatacccagtaatgggattgctgcattgcatgggaggtctgttttaagttcttcgagaaatctccaacctgctttccatagtgactgaactaatttacattcccaccagcagtgtataggcattcccttttctccaaagcctcaccagtatctgtttttgtctttttaataatagtcatggttttgatgtacatgtatctgatgattagcaatgttgagcattttttcatgtttgttggccacttgtattgtcttcttttgagaagagtgtgtttgtgccctttgcccactttttaatggggttattttgggttttttttttttttcagctgatcgtttaagccacattgctacatgttgtatttgcaactggatgataataacaatcatttattgagtgtttgctatgtgcaggcattgcaccaggtggggattttgtttttatgtttgttgcatatattaacccacttaatcctaacaccaacccagtaagctttttcattaatatcttcatgttttagatgaagaaaccaaagttcaagggatgaaaaatatgtctagggtgaaatagctcagaagggcagagcccagattcaaattctctgccttctggttttagttcagtgttgttctgtcatgcagtgtgcctmtgcgtcctcttagatctccctctgtgcttctgaaggtgtgcagaatgcccaggccatggaggcattctttttttttttttttttttttgacagactctcactctgtcgccaggctggagtgcagtggtgtgatcttggctcactgcaacctctgactccctggttcaagcgattctcctgcctcagcctcccgagtagctgggattacaagcatgcaccacgacacccagctaattttttttttttttttttttttgagacggagtctcactctgttgcccaggctggagtgcagtggcgcaatctcagatcactgcaaggtctgcatcctgggttcaaaccattcttctgcctcagcctcctgagtagctggaactacaggcrcccaccaccacgcctggctaatttttttgtgtttttagtagagacggggtttcactgtgttagccaggatggtctcgatctcctgaccttgtgatccgcccgtctcggcctcccaaagtggtgggattacaggcgtgagccactgcgcctggccacacccagctaatttttgtatttttagtagagacaaggtttcaccatgttggccaggatggtctcgatctcctgacctcatgatccgcccatcttagcctcctaaagtgatgggattacaggcataagccaccgcacccagcagraggcattcttaaacagaagcactagtggctccttctttctcctcaccatgtttactaaatacctaacctcatttttttctcatccgcaaaacagggacagcaatattgaattgacatgttattaagaggactaaattagataatgtatataaagcatatagcacagagtaaagtacaggtccattcattgatagcagcagcagcggtgacagtggttgcaatgctagattccctggcacgatggcaaaggtttctaaaggatactcctcactttcgtactaaattgatcatcacgagccagatcataaagagctttgtgtatcatgaaaagaagattacatcttattctacaggcagtagaaactactgaagaattttattaccgagagagatgtgatctggttggcaatttaaagagcagaccaaggggaggagaacaaagcgcaaggcagggagagcagcaggaggctgttgtcaaaggccaggcaagagataaggaaggtctgagttaatgccagggctggtgtggtggacaagagggagcacacagtggacagtcaaactccggagctgtgcctgggtttggcaggagagaaaaggggaggagcttagctgagcctcctgcctctgacctgggcactggcttctcttgggcataacccgagcggctggggacactggaagatgcagatcaggggtggtttgggacacacaagggagtcacagtagatggttggatatacagatctggattaaggcatctgaatatctgaatattcagattcagaccaaggagagagctcagggctgccgcagcatgccgggggtcattaaagcttggaggtggatgaggtccatcagagaagggatgtagagtgagaagagggctgaggacaggattttggaagtgcccattttttctttaacttttattttaggttcaagggttcttgtgcaggtttgttatatgggtaaatcacatgtcacgggggtttgctgtacagattattttgtcactcaggtaataagcatagtacccagtaggtagtttttcagttctctccctcctcccatcctccaccttcaagtaggccccagtacctattgttcccttctttgtgtccctgtgttctcagtgttcagctctcacttataagtgaagatgtgctgtatctggatttctgttcctgtattagttcacttaggataatgtcctccagctccatccatgttgctgcaaggaacaggatctcattcttttttatggctgtgtagtattccgtggtgtatatgtactacatttgctttatccagtcttccactgataggcatttaggctgattctatatctttgctgtggaaacatttcaatatttaaagatggcaaaagaagaggctgaaggagactgacaagaaacacccagaaacataagagagtctctaggtggaagttttctgccatggcaaagaaagattgcagagagagaaacaagccgaggaaggactgaaaggtgcctgctggatttggcagctaggtcactgatgaccttgacagtagcatgtgccaaggagcagagtcgagctggctggattaaggagagagttggacttctcagggcgagagactagaacttaatgtccccaggaatgtgggtctctcatttccttgccatgcattctggttaatggaaggttttctttataaagctagaatctctctctctccagcatcttccctcagctctagttcactctccaggtccaaaacaaccagtctacacatttccccagagaatggtccatatatacctcccaacttggtcgtctcatccagcactgctcatatgctccaggaaccccagacttgccttgcagttggccctcaggatggatcctgttttgttaaaactgtgcttgttctttggcaacagtagagcctgtgtttcagttggtctttatttctcacctttttaggttggtggcttcccaaccatgcttgtaacctcaactgagaataagaaagacacttcacaatatgatcrgtataaccatgggtgtataactgaaggaaaagtcttatgacataatacatccccttactgtggtagatgcactctagtgttttcgactccatctcattctaccctattccatttcatgtgtttacatgcttgttgtgactcattacatcaatttcacaaccacaaaactgatttaatgacccacagtatgagaggctcaaaggaaaagatgctcagtgtttgtttgaatccatccccatttcccggcctcattgaggccagcagcccattcctctaactccctttttatggctctaagaggacagagaactgcttcagtcactagatgttagccagccttggggttattccagaatggctcaccagagctatcacggtggaatttagaaatcagtgcaggacagaacggctgcataggctcctgttcctgtaattactcatgaagcatccaatagcctaaggcatttttatgccctgaggatgctcttaggcagctctaataccacctctcatgtgacacatggaacatttcccagagctgagtagtatggcccacctattcatacaggccacagcttgcccctcaactctcaccaccagccagacaactgycgttgtgccctcttcagacctctctaaggggagaaccatccttaagaaccattgaacaattgtcccctgtagatctttcagcaaagaacatttggggccttttttttttaacattctcatttayaatgtcttttctgcttctatctaggaagagccaggacttctgaatttaccttgaatacagacaggaggatgttgcctaaggaatagcagagatcttgtctcatcttctgagaggtgcctgctgctgctgtatacacttgagtgctcccagaagtctcctgaaaggcttacatcgcaaacctgcaatgagccaggccctgggctgggcctccacttcagcctagtgaacaaaactccatcactgccctttagccactcacataaagtttaaaaatgggtgaagaacggtgggtctccctcactccagaagaatttgaccaactccagaaatattcagaatgtgagtaaatgcattgacagccctgggacgggatttcttcttggctggagaaatcatttctggaaagcatagcagtatgatcattgcaaarccacaaagaatgatgtcaggcctgacggcttatatttccttataaacacagaattagtgtatttaacataaaaacgcaattatctttaagctcagtaaatactacgtgctcaccatagaaatttgcaatatacatagaaaaaaagagtaggttaaaaatcactgacaacactgcaaacatcttagagcacttccctgctgtgcatattgctttacaccgttgagctcacactgtatacaccctgcgttaagcctgcattttccgcctaatatatcgtatgtatttgctcaggtcattaaagctcttcagagcataattttgaagggctgcatgctgcatggctacaatgttactcaatcgtttactgtartatattcctgcatttggacccaaagccttcttgcagtaagatgctgaatgctaatgtgtgtttctttcttgactttgttttgggaaggcttgggcttttacttggggctcttggtttcccattagttgtgccccagaaccaattcagtgcaagacacagtggtggtagggtgcacagccacacatgggcccatggcttgtcccctcaggttactcctaatccttattggtgagaggaacctgctggactgtggcaggacaccacctgaccactgcacgctgcccacacagagtgaccgtcacttaccctgcatggcactgactttccaggaggcccttcatcttgtagagctctcagctgcactgcctgctccatgcccttgtcccatggcctctcccttcacattaactgtgttgatgcttctgtaaatcatgaggcctgcagctgttgacctgctctattgctcttgcacaggtcccccttctcacacagtaggcagtccttgtccccagcgctggtctaggagtcagggaatccagttcaggtgccagctctgcctcttgctctctatgctgtgacatccctgaacatccctgggtctcagcaacctcttctatacaatgggagggttggactaagtgttctctccctgcggtcccttccagcccagcatcctgtgactccgaatgctctccgaggtcaacaggggaccatagggctaatggtttgtcaccctcctggtactctagagcctgtggtctctcatctgacccccatgggtttagaaaaactctaatatattgacaagaagcaaaaaatcaccctccagggtaaattcaatttaattcagctagctctgtaggtcagcaaagcaccaagccctgtcagggatgaagaagaagcacaaaggagaggcctaccctggaggaatcagaatcttgttagggcatcagaaatgtgctcgtgacacagagaactgctttaaggcagcaggcaaacagctctggtacagctggataaactaagcgtggaaacgagaaggggatcaaaaaccaagggaaactggtatgggggttgtttgctatttggttcaatccagcgtgggtttattgtctctaagccttatagtctcaaagttctgggagctagaagtccacaatcaaggagtcagcggcgctggctccttctgagagctgtggagaagggatccatcccagggctgtgtttttggcttgyggatggccgtattctccctgcatgccctcacrtgacattctccctgtgtgcatatctctgtgtccaaagttccccctttcctaggcgcacaaccttattggcctggatccccccattcggtcatgacttcatcttaactaattacatctgcaacaacccaaataaggttacatcctgagttattgagggatggaacttcaacacataaatttgaggtttagggcacggttgaaccgataacagaggatttagctggataaactccatggaggaaagaggtttaaaatgtgagcagcagatggaaggggaacgatggaagcaaaaggaatgtttgggaatgttgattttgagatggtgataacacacccactaagcattcctgtggtgtgcaggggtgggtaaggagagcttctgggctggatggtgagaaggcacagaaaatgaggaggacataggaggcgtggggatagcaggaggtcttgggccttgtgtgtcaaagtgtgggcaaaatttagagccaggaatctggagactgtgtgcagggtgccttggatcaggcagtttccaggccagggaactgggcaggatcctttggaggaaacctagtctgagccaaagagctaagrtggtgagtgtggccatgaacaaatgctaattcgtgggaaactgtggtggaaatatcatcaatgcacgtacaacaaaaggaagccatcaaagataccttgcagactgaatctgtagaaaatgacatcaggatgcagggctgatggggaatgtttgggawtgttgatttggagatggtgataacacatccactacgccttcctatgtgccaggctccagggatccagcaataaatgagacacagttcctgccctcaaagagatcactgcctcacaggggaagacaaacaggactcaagcacgggtgctgcagtatagccggtgctcagaagtgggcagcatgggaggagaaggccccgctcagcctrgtgggaggcctcctgatgcacgcattgtttccagactccaggaactgtagggcagggagggagaagggcattccgggtagaggacgtggcttgggcaagggcagggcagggtggaggacatcatgggagcttccaagaactgcaagcagctcccaggctggagcccagagcatgtgttggtggtggcatcaggagtgttgggggaagaactagaaaggaaagtaggaccccatcctggggaatcctgctttctaagaaacatgtcctgtaggccccaggagggtgtgtgatgggatttgagtggaaatgaggggtcagtccatagctctggtttgggaatcatgcgaggagatggcaaggagagaaagaaaatgaatgaaggcactcagacagtaggaatgttaggaaagaaaagaagaggctggagaatgaggcttaaggtatgcctctatcaggattcagcagaagacacagagagaagaaccagaaaggcaagtaggtggaaaagagtgcagcatggagggcgcaaaggcaaggaggagctccaaatgcagcaaagccgctgagcaggcggagggatgaaaaggaaccagagtattcagtagaagagggttgtgttggggttgggccttttctttaaacatttacctttgtccttctctgacccttgctcgtgttgtccatgtcgcgggactggatgaggcactctgctactgttgttcgaacaggagaggaaaaaaagatacaattcttacaaaatgattaatcctcagaggaaaccctgaaaaagtcattcccaccaattttagacacattctggtgttcagtcggattgcattgccatagcaaccactcttccgtaaccacataaacaggagctttacaataacaaaataatgaagtgtacagcctgagaattgagaactttctccagtggggttaccaggtaggagaggctcttgktgttttccatttatatagtgtaaagttggcaccttctctggtgaccttctatagggtgagggtggggcatcttaaaactgctcttggagacaagtaacttaactttgtatgtawacgtacatacatatacacacagacacacacacatatagctgacagtaagtttgttatcaatctacaatgtaaagtacttatcaaaagagctaatgtgatattaagaaatttgtattataaaacgatgaaatttaaagctactcatgattctattttccagtgataaccagcactagcatgtttatgtataaatataagtataaatatagatatcaaaatatgcaagcacatatacatatatacacatatacaacatacacatgtaaaacaaacttgagaatatgcatgytgtgctattttgtatgctgttttctttcccttaacaatatgtttcagttacctattgcagcatcaaaacaacttcaaaacttgtgtgctgaaacaaccaccattttggtttcccatgagtctgtgggtcaggaacctgggcagacatggtgggcatgactcatctctgctccacagtgtttggaccttcaagggggaggcctcaaacaagtgaggacttagaccatccgtcatggctcattcactcacatggtgggaccttagtgttccttcatggaacctctttctccagcactttcttgtcttccagggcctctccatatgtcctttcttttcagcagggtaacctggaaatctaacatgkcagctcagggctccaagagcacagaagaagctgctgtcagatctttttagcacctgggatcagagatcctagaacggaactccctccacattccactggtcagtgcagtcacaggcctggctcacattcagtgaagtagaggaacggactccacatttcagggaggagggactcacatagggagggaaagaatttatggcagccatctttggaaactggctagcacacaatatcgatcatgagtcattcccacatcattctgtactcttcagaagcatagcttttagcggttgcagagatttttttttttttttactacatttgtactatttcatctaaccaaatcagtcattgcaatcttaagctgtattcatagactcayagtgcctagtaaggcaaactgatatccacattctagcctaccctgatagaccrtcagacctctctagagaactgaatttatttatggtcactatggtttrcgatggacatggacaacctggaacttgtttgagagttggtraggggcctcacaaccacattatggagaaatgaagatactgtgcatatttgttggagaagggaagggaaaggtgaagaagagctcgttgtattaaaatagctcagtactgttgtgggaagaggtgtgwagttaattytgaatggcttcaagaggtagccctaggactaatgggaggaagttataggaagtctttaaagtgtggaatacattaattactagtggtcaaatctgcccaagatggaatcgaattgacttaaaagtgactgggtttcctttccctggaactgtctgggcagagagtttgtttrgacactataggggagataacagctttagtcatctggttgattaaatgaccttcattagctcytccaatacttggtttctatatttaaatagatttctaccgcagagggtgtgtgcatgtggggatgccgcctactgaccctcttcctaacaataattgctggtggccattggggggtgggcattttttcttcaattttttgttaattccttaaaagttccatgatgcctcaaggacagaaactattcatttattcagaaagagaaaaaaggaaaaacaactgaagaagcatccattaaacttttaattctctaagaaattaaaccaaacatttcctacatcagccagcagttgcttggactgtgtagaactttttttttttttttttttttgagacggagtcttactctgtcacctagcctggagtgcagcggcgcgatctcggctcaccacaacctccgcctcccgggttcaagcgtttctcctgcctcagtctcccaagtagctgggactataggctcccaccaccatgcccagctaattttgtatttttagtagagacaaggtttcaccatgttggccaggctggtctcgaactcctgacctcaggtgatccacccgcctcgacctcccaaagtgctgggactacaggcgtgagccaccgcactcagccagaatttttaagttgggaaaaatcttaaccatatcaatgccaagcattacacattttaaaactgagactactacgtccagaagagctcagtgacttgcccaaggtcatatagaaagaaggtcgatagtaaaatagaaattagaaccaaaagtccctcaattctagtacaaactcatttgcttcaattcagcaacaacaaattaaacaaaaagtacccactggagctcaaccttcaaacatacattaatgtgtgtgtgtgtgtgtgtgtgtgtgtgtgtgtgtgtgtgtgtgtgcagatatgtatatgtcmattaaattacattaaagcaaaattttaagatgtaattaaagagaatcaatcagtaaattgtgctattaggaaatatatttctttcgaatcagattatgacaaagtttctgactttaagatgtagttacagttcaaaatacaaaactgtcagagtcagagaacatatttagggctgatatgtagaaccatagaaggctctaagtaaatgtcactaaaaccttgctatttatgctggccagtagagtgagacttgatcaaatgctcatgaagtcctgggcccatgaagggtcatatctagttgcttctatcttggaaggatagccataactatttctcacctacatgtgtttcagcaccacagacctttttttcttttaacgatgagtaggactctgcccaccaggagtcacagaatctacggatagggaggaatttctatggaacaatagctctcaatgtttaatgtacacatgaatctcctggagagctgttgaaatgcagactgtgaatcagtaggtctggggtactgctgagaatctgcttttctaacaagctcccaggtgatgctgatgctgctggtccagggaccacacttttagttgcaagatggtccaagttgtctgatccattcctccaccttcacttgaaatacgactgatgaagccaaattatttggagaaaaggtgagaaaatgttctagcaatacaaattttacttacacaaataagtcataccagtgattcagatcatttatgacaaaaaaattgtgtcttaaaaaacgttttattgctattgaccccaatttcctctgcttctatataaagtcttttcttattatttcatatgtaacatctgtgtcagagccatcacttccacatgtcagtggtcctcagcctcggctcatgttcaaatcacatggaaggcttggaatacttccaatgttctgcccacacctcccagatcatttaatcacagtttgtaggcaaggggcctgggcatcagtattttttaaagccctgcaagtgatttcaataagcagccaaggttgataaccactagtctaccttttctttccatacccctgagaatataggacatgtgggacaagtgtgaccagctcaatccctttgctagccttcatttattcaatagatctttcttgaatatctattttttttgccaggcaatgggctgcatgctggggatgaacagtgagcagaaacaaagtttagatgggagaatatgtgtgtagcaagtacatccgtgcttatgaagctgggcttctcccctgtgcttcccacgtgctgctctgaggcctgactccagctggctgaagaggtgggccttttgatgcagtgctcttggccctgscccttctgttttgacatttttcaggaccctcacaaaactctgctcttgtttttgtgcatctcactgtataacttcctagagtaattagaaaatgtattcttacatcccagccttcactggaagaaggaaaatctagattttatttttttgctcatgcgccaactttcccttcccctcrtctcagtgactccccctgcccaccacttatggtctttctactccattgagtatgttcctttgtcctcggcatcgtggtcttttcygggttgtgacaggcaagcctcagcagtcagccccagatccacagggacattgcttagagcctrcgtatcaagtgaggtccgtgaacctgcaaaattggtgtcacttaggatcttattcagaatgtagaatctcaggctgtggcccagtcctacagaatctgcatttttaccrgatcccaatgtgactcatacgcacattacagtttgagaagctcatagagaactttgaggaatgaagagttatcatgtaccttagaattccactctcatatatggattttcagattcacttttgaaaatgttgatttatagttttttcggagtttaacagtttaatggtctaatgctcaaatactctgtgttcttttttttttttttttttttttttttttttttttttgagacggagtctcgctctgtcgcccaggccggactgcggactgcagtggcgcaatctcggctcactgcaagctccgcttcccgggttcacgccattctcctgcctcagcctcccgagtagctgggactacaggcgcccgccaccgcgcccggctaattttttgtatttttagtagagacggggtttcaccttgttagccaggatggtctcgatctcctgacctcatgatccacccgcctcggcctcccaaagtgctgggattacaggcgtgagccaccgcgcccggcctactctgtgttcttaactagacaacagactataaactttggggtctagtcctggcagcacaactaatattctgctgtaaacactgaagtctctgatttgyctgcttgttcagatggaacgcacccctgtcccacactgacaaggcaacaaaggtgtctgtgtgtagggccaaatttttccctttaaaaggctttgaatttgctcaaacactaggaacagtgcttggtttaggtcccagagttcttggcacataaagtatagaagacaattttggactgaaaacttcttagggcactggtaaccttgatcaaagagaaaaactttctgaacacccgatttaggacagaactgtatgtggatagtcctgacagtctgggtgaatgcaaaacatgctcctaccttgccaagcagctgaacaagttgacctgttgggtagagttmtttggtgttgtccacttaaacaatggataatgtctgccaagcacagcaattttaaatttagaagttataagcttttttttcccttggcaataagtattcaagttcaggggctttttaggacagtcttcatttacaacaataaaatcatgtcctagaatggcagtcctcaaccttgactgtacatctgaattccaggaagcttttaaattatactgtgtcctgggttcctcaagagatgctgacttaattcacctggggtaagacctgggttacagtgtgtatagagctccccaggtgatttcaacatgcaggcaggtttgagagccactttcatagaggaagagtcctggcttctaacttaccagtgttcaagtatccagtgaatccaataaccatggcctatgatttagaaatgtttaagaagtgtgacttacgagctrtctccttgaaagaatcacttaaattccataagcctcggtttcttctctaaaataaggataattattacattagagggtagttgtggggatttaaataaaatatataaggtgactaggacagcgtctagcatataataagcactctacaaaatgggaattgttacaaagagctgtggaaatggccctattttctacaggcagaaatggaacaaggtgtcctctgaatctagtgctggtattatggtaaaggctttgacaaaggaattttctgtgaggttatactattggacccacagatgacacctaaaataagaccaagggatgctattccctcgttgttcttttctgtcttaagatgaaacagaataaagcagctgtcactgaagcagattagtcatgcataatacctacttactcctcatggaaaaagaaacccaacccagacatctattaagaagaaaactgttataaagtatataaggacatccaaggagaaagtaatgtgtcccaaatttgagaattaagttgattcccttttttaaagggtattgatactataatcctatgaaagcccataaagcaaattgaagtaaatgtgtgatgagtaatccacctcacggaaagctagttagaaacctcctggattcttgttgtgtgtgtgtggttttttttttttttttttttttttgagacggagtcttgctttgttgccaggctggagtgcagtggtgcggtctcggctcattgcaagctccgcctcctgggttcaagtgattctcctgcctcagcctcccaagtagctgggattacaggcacgtgccaccacgcccggctaatttttgtatttttagtagagatggggtttcaccatgttagccaggctggtcttgaactcctgacctcgtgatccgcccgcctcagcctcccaaagtgctgggattacaggcgtgagccaccgcrcccggctgtgttttttttttccatttaatttcaggctattaatcagatattttaaaataaatgtcttttctatttttttcttattaaaacctcagtttattttatgcgaacatatgatgaatttatgtgtgtatatatatcacacatttaaatataaagcaggatttttaaaatagagcagcagctctttagaatcaaaggaattctgctacagtgaatggtggaatatccaaaatgagatgagaacatcaaaatatcatatattcaattgaaattactccactggttctcaatcaaaatgctaactctacactcttcttgcagaagtcacaccaggggtactcatgttctcagatttttattttttttatttagccattttggctgagctaacaacctcccattaaaatagattctaaaatgtaggatttgttttcctaaataattaagctgcttgtggaataacatatatgtgtgatgttaactgagctctggtctcattctaacttctctttcatcctgtttccagagtggtctttagaaaacagagagctggttatattatttcaccactcaaaaaaatctttaaccatttcaaatcaatgttcttaactctacattcaagacccccacaaatctagccacaaatgactctctggttctgacttgtcctaaacgttttatggtgcccatctctgcaccgttgctcccttggtctcttccgagaataccctttccacttcatatctgcctttataaaccttacccaattctttatgcctcagctcaaatgctacctcctttatagggcagcctcagttcccacccctaccccactttcatcttaatttttcttcttcccaacttggtgtttcatagaacttcatatcattgtgtcacccttaattacacctttctttatgttaacaaatgtttaggaagctatagtgaataatgctcaagggaaaagaccatacacttttgagccagactagacctgagttacaaccctggctcttgagcaagtcgaattaatttttctgaatttcagcttcttcatctgtaaactgaagaaaatacttgcatggattagtagaggagagtttatgagactatgcaggtgaaggtctccagtaagggacagctattagtaccacagttatttagatcatctttcccactagtccattaacagtatcttgccgcatcttaccctccttagtgttttctgaattgaatggaagcagcccaaattgacagcatctgctgcctggctcttactgagctattagtttttcaacatctgttttgaatttcagaaagaaatttccatttttaggcaacagaagcattttcctgttgtatttcaatatgtctcaatcctgaaatgattagaacttctgcttgattgaatccaagtcagcaaagccatggagaacagcccagcccacgaatatgtctactttacctaggcttaagagacattaaccctctgtacaaagagcctgggcaacaaaaaacactgtgtgagcttttaataacatcgtcctttggctcagatgtttaaatagcaacaataatggagcttggaaagctcttaattacccacaatattggaagagagggatagccaaggtcagagaaaccctggtttgctttgatgtctagagtgctgatagctgcacaagatgcattcataatgtgtttttaataacaattattgagtctcttttctggattcccaattcctttataaaattccaaaaagaagcagccagtcttgcctccagttgcttctgaatgatttcctatggaaagcagcattttcgaaaacaccatgtttgatgaattatctgagtctttctttatccccttccaaagtaaatgcaacatagagggaacattaaggggaaatcatggcggggggtggaggcctcaactttcagaggaaaatcttctggctgtcagaaatatgtgagaaataccatgggaacataaaatcaaccatgctaattatgagacataattgaggttatgttttatgtgtcagaatgagtagctcaattttatccatcaagataaaaaataaaaatcaggtaaaaaaaaaaaaaagggacagagttgtcaagattccagaagtagaagaaactatcttgccatagtgtacaacagtgtttcagcaccaaggacagagccttatggggtttaatgcccactcatcctacatacttaatgaatttttaatgttttgaaattttcactcagatgtttatatactcatctacatattgtttttctgagccctagttacacgtcagaccttagtatgatagacaaagactcaccagccarttaacagctctcaaggtaaagctgaagcaggagatgagcaagataggcaagttaataaataattataacactatatgacaagcactattacatagttgtgtacaagtcacgtgggagccratgaagggaatgcttaactctgactggtgcaaaggaagactttacaaaggagttgacatttgagctggatcttgaagaatgagtgaaatttgcaagacagagaagaaacatcatgagagagtgcacaatatgttcagggatgtctggaaatgtaacttgatatggctgaaacgtagagtaaatagggaaatgaggaataggataaataaaatcaccaagggctggtattccaagttaagggcttatcttctaagctaagaatggtaagctttatcctgggggaacagaaagcccttgaatggttttgagtagggatatgatctgatcagatttgtgtttcagaaagataatttagatgcaggggggaagtcagatggaaaagaagaagtgagaggacaaagggtagaagagggtgacatttctccagattttctgggactgaggggcagctccaacataaacatggttacacagggagaatttacttggcccagcttccattagctatttgccagtgtttcacatgtgaattgtgtctcttcagattcctccaagaagataaaagatgccttgactgaatttaatgagggtgggagcctcaaacaatatgacccacatgaggtaagaacatttccattttaagcctttaaaaacccctgtgttttttagcctttccataatttgtttccctcttggagactccgcttgccttgaagaacttgctcctcagcatgtttcctcttaagtctcaagtgagccatttgtgctacctggcattatatgtttcccaagcccatacactcattccactgtcctagaagactaccactacttctcctctgctcatctctcacccctcctctcctcatcctcagttaacaactgagttttctgcttcactgaaaaaatagaacaaacagaacagatctttcacaagctccctcaccccataggcccacctatctgtaccttttcttctataaccagagatgacctctccatgctcctatctacgtccaactcccccacgtgtgcactcaaccccatcctcttttggcctacttacaggcattgcttcagcaacatatcttccccagactccctctttccctccctcctcgtccctccttttctctatatctctacctctgtctccttcatatcagctttcttcgtatattttatttttccatcaacatgtaaacatcctgttatttcttctatattaaaaacattttcctgactccacttcctcctctaggtaccacctcatttccctcctgtgttttacagcgaaactgtacaaaatacttctctatactcattgcctccaaattctctttttcctactttcttgaaatgccttgcatcagtctataaccttcactcttccactcaaatcactagtcaagatagccaagggcctccctatggctaaatccaatagcaattttgctcaacaacactggacacggttggtcaagtcatcctccattttcttcactacattctacattctcctgatttcttcttatccttctacttgacatttacacttaaaaatcaaatgggcatctcaaacttaacatgagctaaactgatgtgtccttaatcttcccctataaagcctgtttttccagcagtctactccatttcagtaaatgacaactctacccttcaagttattcaacctgaaactatgcagtcatcatcaacttctgtcctctcacatcccacatccaattcattggcaaattctgttagatctaccttcaaaatgtatccaaaatatagacacatctcgccacttgcactgctagcatcccgacctgagtcatcaccatattttgcccagattattgcaagagtctcctaactcatctccctgcttctgcccttgctgcttcagtctattcttcacacacatcctgagcaatccgttaaaacttatgtcagagcttgtcactgctctactccacaatctcccatggttcccccaatccctactcagagtaaacatgaaggtcattacaagctgcacctcccccagctctctgacctcatctcttgctactctccccatcttcattccttttcagcatattagccttcttgatgctatcaaataagccagtgtcaccgtaacctcagcaccattgtgcttgctgttactgtttcttaaaatgttcctcctcagcacatcacattgtccattatcttaccaccttccagtctatgctcaagtcaccttctcagtgatcatcaccttcttcatctaaaacttgaagccctctttctgacatttcctatccccctgctctgcattattttcctcctaagtacttctcaccacctgtcacactatataatttacttaattaattgtctgtctctcccactagcatatttttgttcactgctgtgtcttcagtgcctggaaaagtatctggcttatagcaggcattcaataaacatttgtggactgaataaatgaatgcaagatctccccctactttcaaattcaatgactctaacatttcttgggcttctatgcactgtactgggcactgtagaaggcataaaaatatagaagcacagttcctgccctccaggacttacttcctactggcagggtcaggtttgaaagccatgaccctggaattacatggtcttaagttagacttctacctctgccatcaacaagtggtcttgaataatatttcatatctttgagcctcactttcctcatctataaactgtacataacaaaaaaagcctcgaagtttgtggatgagtgaattaaatgagaggatctttgcaaagtggctaacattctacaagcacttaaaaatctgtacctattattatccctcttccatcccctttccccagaatgtttttaactcaattcccttttccctgctcctgagtccttttatgaagactaaccacagaaaagtgactgatctgcaggattcacttagggagagactggccactttcttattcacgttgtcatccattgaacaaaactgagtcaacaccttctccgttggacactggaaatgaatcaacagagcctgtgccctcaaggtacacctaaaaggggctttggataaaatacaccagttgcagagagaatgaagcaggaagaaggttgccagaacaggggcgagaytgagaatgcaccatttcaaagaacattcctgaggagaaaccatgcagagaagatagcagagccagcaaagaactcactgccccacaccccccacccccagctccaaaaacacgggaacaaagcctggcggsggctgctaatcagcttgtccgccctggggctgatgagtgggagaggaacagtttggtcagggccactgcaggtgtggaggccacaggagctttcagaagcagggagtcgcttggctgctatgagcacgcagccgccctcgcctctgtcggggctggcccccactttttgtaatgccaggcactgctgggtcccagggagctctgtcactctgatttcgttctctcacacagtgcagctgacttctagtaggtgtaatgtcatggcacagggttagggaaataagaagggtttaatttctcttgagtttgatggcttactgctgctaaaatgtctcaatgagaaacgagttagctgtgggaaggggcagattgctagcaaaggtaggatgggaataaaactttgcagagtggcagagctgcatctggccgtgatgaacatgcgcttgcccatcagtaccaagtgattctctggagaatagagtggtggcagacagctagagagtgggcaaaacccagaaaagcaaaagaggcaggtggcttggtggcactgtgagcctggacccagacacctgatcacaaagcccagctctgccacacgctttatgatcttcagcaagttatttatgttgtcaaaatttgttttatccccagaatgacagtaacagttcttccccacactgctgtcttgagaatgaaagtgccggatgcctgctaagctctccatctagttctctcttcttggtctgtgtaaggattaacacactctctttaagtgtgttgcagcaggagcaaattgcccagctaattcctgcataaaagctgctggggaaaaacagagttcctttggcctgaaccatgagtgtgcctgggatgttagtccaggtctcagagaattgccagcatgcctcatagtggttggtcatctggtttgggcatgacccctagccactccctagttagtctctcatcatgcatttactaagcagctactctgttcctgggctgtgcttttaaagaacttttgtataacccagatatcaccttgagagtgtggcacatcgttgcatgtctttgcctgctgaacatgggatactgggagggagtgtcagggagcactatgccagctctggaccctgtgacagatatagtagcaggagcactggacagggagtcaggaggtctggcttctggtttcactctgctgctagctcgctggggctcatcactgaatttcctgagcctcggaggcatcagaagactgagtcccctctgagactcttctggtttgcatgttctgtgcttctgggtttattctgtgcatcctgttctctaggatggggacatgcatggttggatgagttccatcagtattattttctaagttctcataacagtttgtcagctcttttcctatggcactcgccactgatgaccacacattgcaattatttcaatatctttacctcttatataacactgactctttgaagatacggactcatgcctaattcattggtgcccagcactgtactgtgccctgcacttaagaggctcaagatatatagatatatagatatagatatagatatagatataggtatatacacacacatatatacacataaatatatgtatgtgggtatatatatatacatatgtatatatatatatayatatatatatatatatatagcacatttcccccctttttccaatctgtgtcttcttcagcaaattgtgagtggagatacatatatccattcaatctatacatagactgaatggatcccatagtagttgatgacatccagggaccaggcaccaggctattcctcaggtgcactgattaggacacatcatccattcaaatacctatgaagaaccctgtggtaggtggtgtgggggattcaaagatgaaaggagacattctcactacttccaggagctctggattgagtagaggaaccaaggtctgtcacaaacaactatatatcaatgcagagcagcacatatgagtgtcacaaggcaggaaccaaggtgccaagtagggaaattcagggacagacgatcataaggctttctggaaaaagtggaatccgggttgggccttaaagcatgactggaacttgaacatgtagagatggaagcagttcatgcagggtagagtgcatggagggttgctcaggaaagaacacagaggtcagcatggacagagtgcatacacgcacatggggaataataggagagaatatgagaatcatctcagagcttgaagtaactacaaatctaggttggaggggattattggaggctatgaataccaaaggtctaggagagtacacaggatggtccactggactgtagaacactgcatattaggccttctatttacattcatctaatttccacttgccaatttagttttgcaaatattttataatgtatagtgtaagaacacagtagtacctcagttaatctcaattcagttccatgggcaattagaaaccatggaaagtttttttctttgagacggagtctcgctctgtcacccaggctggggtgcagtggtgccatctcggctcactgcaagctccgcctcccgggttcatgccattctcctgcctcagcctcccgagtagctgggactacaggcgcccgccaccacgcccagctaatggtttgtatttttagtagagatggggtttcaccatgttagccaggatggtctcgatctcctgacctcatgatctgcctgcctcggcctcccaaagagctgggattacaggtgtgagccaccgcacccgtcacatggaaagtttttgagaagagaagcaattttatcagagttgtgctttaggaagatcaatagggcaaggataggcaagataggtgggaggaccaacagatggacatggggttaaggaagccttggagaggtattgcaatggcccaggtgagatgtatggaacagaagtcagaatccaggaattttggtgatggcagcagggacaatggacatagaaaaggtctggatgtgacagatgttgcagaagaacagtggacagaaggaagggacaagaactagtctcagccaactgacagttcaaagctcagcctgtaatgttgggagcataatggtgtcattggcattaacagaaattgtggagtcaggaagaggagctggttttcagggagcaagctaattgaagtttagaacttgaaatcttctagttcaacactcacaatttgctgaagaagaaacagattggaaaaaggggagaaatgcgcttggtctgagaccagtcacgaggtttcctgaatctcatgctgatcttgtttcatgatcttttggctttggttttttacagcattatgttagactgtttaactaaactttctttttattagatcatttagtacagtctgctttccagaaatattttattctgatagttttcatttgatgctagctgaaagagattaatagtacactttggaactgaaaactaccttttaaaatactacttgtcaattaaagtggtacaaagagacaatgcaaaaaagagctttagaaataaattaatgaagaacagtgccatattattcagtcaaatcaaagtagagaatgaagagaaccaaaacagaacaattccatggaaaatagagagttttaaaaagaagagaagatgaaatgttgcagagaggccaaagatgagacagtctaaaaagagatgatcacgtctgtgaccttcaacaaagcagtttcagaggtaatgggctaggatccaatccgaatgggattaaggagatgaggaggctaatctggtctgtttggagaaatttgaaaggaaaggggagaaggatgggccagtagatctggtagacagcaatttctttggaatagtggacatttaacatacttgcaggtaaatgaaaagaamatgctggagatgcaatcagagccagcgaggatggaatcaaggatcaaggtgggtgggttacaattggagaagaggggctgggcatggtgcctcacgccagtaatcccagcactttgggaagccaaggcaggcagatcacttgaggtcagtagttcaagaccagcctggccaacaaggtgaaaccccatctctgctaaaaatacaaaaatagccgggcatggtggcacgtgcctgtaatcccagctacttgggaggaggctgaggcgtgaggatcacttgaactaaggaggtagatgttgcagtgagctgagatcgtgccactacactccagcctgggtgacagagcaaggctctatctcaaaaaaaaaaaraaagaaagaaagagaaagaaagaaagaaagaaagaaagaaagaaagaaagaaagaaagaaagaaagaaagaaagaaagaaagaaagagaaaagaagaaaaaaagaaaagagaggaggaagaaaagattttgttattgtatattaggaaaaaggaggaggatgtgggaggaagggacattctgaggcaatgaagttatagaggcagagagagacagaaagagtgtgaaataaagagacacagagactcggggacagaaaaggaacagagagatgggtagctgtcacaagaaatgtgagtccaccatttgcttggagttcccctaatctggtaagagcctctgtccagctgaatcagacttccttcactctgcaaaggagacggatagaacagccaagcctggtgctaaacagaaatttatttgtgagcccctcagtggggtggggaggccattactcgcttttaaggccaagattttgaactcaaacttgtttatacacatgtaagccagtctctggttctgggacgtctcccagatctcccagaacagacaaggggttaaatgctaccaacattttgatgggtacatcaagtaggctcctgcaaagggattttattctcatggctgctattattcacaaaagcctgcacagcagatctcagagtagtgcttcctcaaatgatttccaggagcatctgccgatttgatgaagaatctgatgccatcaaagcacaagccagtgatgactcactgcaaactgttgttgttgagtgtttgctgagtgcagcagccctttctggcatagctgctcccagcctgggaccagaagccaggcggyactgggagagacacagcaggaagagggtctagtttttggcacatctcttggttctaccttctgtccttggcttcctgctcttctcctggtgcctaaaaccttcacaaggacatgttttgagaagcagctgagccagaaacacacacccacccttgttatttgagggtttttccagggaagatcaggactatgaaagtcatgaaggatggagcctgttcttttctcttccaggtctttcctactttctgagacctgaatactcaggcatcacatccgtcatggtacaagagggaaaccaagataccacagaagaactatttctttgcatcatattttcaactgcatccttcttcatcttaactaggattctagggcacagatcttgtccctgctcattagagccacatccctcacacaggcctggactaaggcagagccctgcactttggcctccactcccaaggctcactctccaacatgtccctttttatctaaatttacataatatcatttcttattacaggagcctgccctggttctgtgccccaccaagccccaatatgcaactgcaacattttctctctcttacacccatcccctgcaccctgtgcctctcattgtctatcacttccctggccttttcattcctgtccccatcagctcctccatgtcctactgcctccctttccattcctttcacctgccagcttttctattccttttccttctctcttcctctctgtccctttgcttctctccactgactttgcccttttgccccttctcagccgattagctatgatgtcttcaagctgttcatgagggcgtacctggaggtggaccttccccagccactgagcactcacctcttcctggccttcagccagaagcccagacacgagacctctgaccacccgacggagggagccagcaacagtgaggccaacarcgcaggtacacagagctttccccaagatgggaagaccttgcgcagctctcatcccctgccacagccacagactgcattcctagagggtcccctgaacatagtaactgccccaasrgtgcraacatgaaccaagggacagggacrcctttcctcatagtgccttacgggaagccctgatgaacctctcagcaagaggaataaasaggaggcataattcctgccactatggatcaaaragcaggatggggaaagaggagacacaaaataatgtatggtgggggaagagagccttcagcaaaggctgacggtccacggatggagcacattcagcttctgtgtccaggctgggactagcttggaagtgttagaggagagggaagccatgatccctgtcttcctggagcttgggctataatgggrgagacacagccaatcccaataagcgagcatgaacccagctgacacataaccccgagacacagacacaatcaaggcaaaccaggtcccatggggatgtcctgtacctgcccttccaagaagctrgagggcctgggytggtctttaaatcttctttyttttcctcagatactaatatacagaatgcagataatgccaccaaagcagacgaggcctgtgcccctgatactggtaagtctttggaatataagacttgtgggaaaagtagggaatacctcatccttggggagaagtggggaaacctaaccaacagtgctgtcttcatataattgtgcaatcttatgcagatctggtcctcctgtggccttcagaacctccatctctggggctcctgtcatttgaatgttctgggattctgaggctgggtaaaggtttttgcttcacttgccctagaacagagcaggtcaggacttgggacagcttgctagatgtttatctctgatatgtctgcctgcccagaaaaagtggagagccttctcaggggaagtgtgtgtgtgtgtgtgtgtgtgtgtgtgtgtgtgtgwgagagacagacagacagacagagagaggtggctgtggctgtaaggctgaggtgcagatgactctaccagtggatgtctggagaggaacagagcaagagggtaaaaatgtgcccttgttgacttccaacaacatatatacactattttgaataagttgaggagttgctaataagttagcaaaggaagccagctcaaatggtcttgaagatatatttgccaggcatctgctcattacacatttcatctaagcttcacaatcacaccactttacacatgagaaactgaggccttaagagattatataccactggtgtgacctgtggagccagggattcaatccagaatcatccaacctcaaaactcctgcagtctttcctatagagagagaggacacagtggtcctggtggtgtgkttggttcctgtggaatgagcaaggctgcactctcagcggagctgctgtagtggtgcctgctgcccataggcccactgttgggctgtgagagatgtggaatcttccctgacacatttatcaatgggaagccattcctctctgctgttggctggccagcccaaggccagaagctcctacaaaaatgagaggtgaaggttaccatacttaatttctgttctcatattcaatacaaatgtcctgagtactatcaactcaagttggatcaggcaacagagcatgttgcttaaggagccaggatgcctgggtttgattcccagagccaacactacctagctctgtaaccgtgggcatgtttgaacaacgtctctgtgcctcagtgtccctaagtgagataacaaatgttcttatgaaggttaagtgagttagatatgttaacgcttagaacagtgcctggcacacagtaaatgtttgataaatattagcatttattattcaggccaccttccagaagtatactttattcttttctttttttttttttgtctgagataaggtcttgctctgtcccccaggctggagtgcagtggtacaatctcagcctactgcagcctcgagctcccaggttcaagctattcttgtgcgtcagcctcctgagtagctggrattacaagagtgtgctgccacgcctggctaatttttgtacttttttagtacagacagggttttgccatcttggccaggctggtctcgaactcctgacctcaagtgatccacccaaaagcgctgggattacaggcatgagccaccgcacccagcacagaagtatactctattcttaactcagtatggtctgccattatctccttcagcctgcaacctcagtctccaagtgtgtcacctgggcatcctcttcccatgaaaggtctctcatgggctttctttctcccaggttgttcctgaagctttcaatacaaagactcagagagtcagaccttttttttttttttttttttttactgtgcattatcattttattgaaaagctttatggatatccaaaggtgaattccagctcttaggatatgcccaggggaaaaagaatgcagtattattattattattattactattattattattattattattttgagacggagtctcgctctgtcaccaggctgaagtgcagtggcacaatctcagctccctgagacctccgcctccctggttcaagtgattcttgagcctcagtctctcgagtagctgggactacaggcacgtgccaccacacccggctaattcttggtatttttagtagaaacaggctttcaccatgttggccaggatgatctcgatctcctgacctcgtgatctgcccacctcggcctcccaaagttctgggattataggcgtgagccaccccgcccagcctatattttaaatgtatataaaacaagatagattagaggtactacagctgaaggagaaggggaactaattgcaacagggacctcgaagagagagtttcttcaatgtagttctaatcttttctcctgtcacagcaaaaagagaaactggaaggattatcgagttttcagtgtttaactgaggactggtgagataaacaggtcatgatagatggaaagcagagcatggttggggaaaaacagttacccctggatcataagctcagcaaactccatgcacagagcaccagaaagcaaggatgaggagcagctgtgccttcccgaaggcttcagggacagcagcaggccaagactccacaaaattgctggctcgtccatgccctgcccagcacgccactcagccatgctagtccatagccccttggtgaaatggacgtaargcacagataactcttatatcttctatggactagaggaggcatattcaggcatctgtgtaaggcacagataactcttatatcttctatggactagaggaggcatattcaggcatagatcattctcatactagggaggaaagtgtgaaactaggagctctgagattttaaactcccagcaagaaactcagtggtaaaaagcatcctgccccaaattatttacctagagactttttttttttttttttttttgagacrgagtttcactcttgttgcccaggctggagtgcaatggtgcaatctcagctcaccacaacctctgcctcccgagttcaagcaattctcctgtctcagcctcctgagtagctgggattacaggtgcatgccatcatggccaggctaatttttctttttttgtagagacagggtttattttatctggaacttcaagaggaacctagaagaagatacaattcattcactgaggttccaaattgtctgagcaggttgtgttttagtggctaatgtttctgaggtaccaaggaagaacttattggggatatgtcattttatgtgatatttgagaaaagatgatcaatgatgataacggaaattagctgacttatttaagacctccatgcgtatttgcaatagttgtatcattctgggactaaaagagaaacttccagagatttcctcctggagaagtgattttgtcatgtaccattttccttgtgtatgggaaaaatcagccccctatagtaaaatcatgaaagggcaattatctgactcttggcccaaggaggtatacagcatttttttatcttcttttgacacttgagatttaagggaaaaaaccttttcctggtaggccctcttccacagatgtcttaattagatgtccctgttcaccagaaacaagaattataggaccaggcagtcaccacagagaggggcctctgccggcaaggaakagccaagccctggactcaccttcaatcaggccatctgctgaaaagaccagccttttcctgttgcccaggtggaagccagggaaagagcttagattcttatttcatgtggcctgtctaggcctatcagatcagtctccaagctcagatctagcaaagcccacttcattcccagagccataaagacmgaagagcagggctttcagggtccagacttcggctcggaggcctgagcaatctatcactgtcagagtgtcagctcaggaaaggctgagcccacctttcccttcatgaaggcccaggactaactgggatgaacaaggagaacttcagtgtcctggtgtttcgttagtttctcaggctgtcgagatgtttcagcgacttggaatattgaaatctcaaggaaagtcccccagtatcttgtgttagtttttccaaattataaaagtaatacactcacattgtaagaaatttgaaggacacaaaaaaataaagaaacaacaaagatcagtggtgtcaagggtcaggggaagggaaggatgaataggcaaagcaccgaggatttttagggcagcgaaactactctgtatactataatggtgaatgcatgtcattgtacatttgcccaaacccacagaatgtagaacaccaagagtgaaccctaatgcaaattatagacttcaggagataatgatgtgttgatgtattcatcagctgtaacaaatgtaccactctggtgggggagtgaggcatggtaggttatgcatgtgtagggaagcagggtgtgtgaaaaacctctggaccctcttctagttttactctgaattttacagtgctctaaaaaatgtgtttttaaaaaagcacaataaaatcatccataattttaccaatgcaattacatgtgtgtgtgtgtaatctccttgtagatttttctataatttttttacagaattgggatcagactgtattgtatagataatctgggaccsagtttcttctttttttttttgagatggagtctcgctctgttgcccaggctggagtgcagtggcacgatcgcagttcactgcaacctctgcctcccgacctctgcctcccgcgttcaagtgattctcctgcctcagcctcctgggtagctgggaattacaggcacccgccaccacgcccagctaatttttgtatttttagtagagacagtgtttcaccatgttggccaggctggtctccaactcctgacctcaggtgatccacccacctcggcctcccaaagtgctgggattacaggtatgagccaccgtgcccggccttgggacccagttttgttcttcacttagttaagtcatttacttgaatgatttctgtaattcaagactttgggtaaacatcagttttaatgcaatcccctctttaaacagatgagaaaactgaggttgagtgtggtggagtaagcytgcttgtgttaaatcacacacacatactttgtgtgttaaatcacacacaactgaacacaaactcagcggtggaatcacggtcttctgctgcctggtctggtgctcttcccactatgccacactgccccactgaaagggaacaagtaacacagataccaagggagaaagtggaacaagtcaggtctgcccaagagccgtcacatgaaagggtttaggacatggcaccaggacaggacctctgtgatccggaagagggtgttggcattttttactggtggtacctgagggtcgtactcagatggccataggtcagggctatttcwtataaagcagaatgaagaggaaggacactaatgagacagtgtcagtgcctctcagccttcctggacccctgcatctctatgacaggagtgagcagtagacttcagtgaaaactagagaaatggttcaagatccaaggattgagttgtaaattggcaaaaaattgcatgttttaagtgtataattaataagttttgacacacgtatatacctgtaaaactagtaccacaattaatatgatgaacatacccatcatctctaaaagttttctttgtaatcccttttctccaccctccttacccgcccacccttcatccccatacaactactgatctgctttctgccatatatattaaattacattgtctagattttatataaatgwtatcatacactmtctactcttttgggtctgccttttttcactccatgtaataattttgagatttatccattttgtatatatcaatagttcacatattttagttgctgattagtgttttaatacatagatattccacaatttgttcgtctgttaacctactgatggacatctagattgcttccaatttataattatcataaataaaaatgttataaatattcttgtgctttaatgatgttgagtatcttttcatgtacttaattgtttatttggtcttatttaatttctttttacatattatgagcctcaatttgctaaaatattaagaacgtttgcctctgtgttcataagggatattgatttgcatgttcatgtcttatcatgtcattgtctgtttttggctttagagtaatgctggcctcaccaaaagggttgcgtaggattccctcctcttaaattttctggaagaatttgtatagaatttatggtgcctcttcactaaatgttgagtactggattttcacattcctacaaagtcctgagctttgtttttaggtacagttaggttacttggaaacagtctgatctttttggatctatcttttaagcttcactggacaggaccagaaaggcatttactcactactgagaaaaaatgtttctgaatactctatcaatgattcacgaattatggggggtttctaccctggttggtgggaataggcattactcctggttctctccagggattattcgctctaatcctagttctttccccagccttagccttaggtgttttccttccacaagtgtgctaattactactcagctgaataattgaagggaactctctgctgttactcaaaggggaccttctacacacattcagagctagctctctgtgcataccctcctctccagtgcctgctctgtgaatcctagccactgtgggctccagattccagcttcacctccactcagagagacttccagggttggcctggcttccccttctctgtgctgcggcctagaagctctttccaaacagtctgatgtggcagttgtaggagtcatctcatcttctcagagatcagtgtttggtcctccctgataatataatgtcctatgaaccattgtttcatacattttgtccagttttgtcactgttttaggtgagagggtaaatctggtctctgttagcccattttagtcaaggtagaagtcactgatagagttttaattgatgaataatatgaggacctagcaataactttgggtgtaatgcactacacagtacaaaggcctgttcccatgttttcctccagtgacaatcttaatacttcattaaatatgtaattttattacaacctcccctatctcactatccctgtctttatctcatcctattgtattttcatctctacttgccaaaccctgaggctttctgcttttgtataatagaggtgatatcttcttgcatcccgctaagggccttgtccagtagaaaattacttttgaaaatctggtcttctgagacctcaggatgaagctttctttccttactttgcagccrcgtttcctaggctccatcttggtttcttcatgaggccctctgtaatatacaaattgtgtcagtgacctttggtttctcctattgtccatctggatgatggttaactccctcctcagacccacaactgaatccctggaacctggaaggctttcatctagcacagccctgcttgcctaaaatggaatattcactcccattgcttggttatttgtttctccgaatgaagagtgtacaggtaacattgccttcctcaacagacattacgatcaaggctgtctctcccactgcctctaccttcagtactttgttacttggtggtataatataacaacacctaaaacattggattttccactgtccatcttccctttgttccctggctagttgttttctgtgagttgtacactcctagtagatattaagagatcatttctgatgagcatggaggtagagacggaagacagcactcaaagtgtctcaaaaaatagaattcacacaggaaaacaggggtgcccagttttcttgttagtaatagagcttatatttctgaaccacaggacagagtgtggaagagacaaagtgttttcctaccttagaaaggagaaattttaaagggaaaacttaccccattcttgtggtacaataatccactttctgcattttcttcatccaaattagacttgcagttagtttgagttcttcctagtttctggagattcgttaattatcaatcccggttttctcttttgaatattcatcctttatgtgtctttaaatgtgtttgaaaagaaaattgcaaggtctattgagaaatgactgttggccatttaccattttgaaatcccagccaaaattacttctataagttgggtatgttcccaaaaaagtaggccaaatgacatttacctgttgattattgatattaccaataatcactatcatcttttctgaatattcagagtatagatgaatttcctgcaaggaaatagactcttaaaggggtcagcatgggatcccttcagagaatatgaactccacaagttggatttctagggccactaatttggtcacatctatgtaaccaaagcttttgaagacacttctacaaaattcttgcctctaccatgaaaaggatggggtaacaaagaggggttaatatttactaaacagaaaatgtccttggatgttttccttttgttcatcgcagaatcaaatatggctgagaagcaagcaccagctgaagaccaagtggctgcgasccccctggaaccccccgtccctcggtcttcaagctcggaatccccagtggtrtacctgaaggatgttgtgtgctacctgtccctgctggagacggggaggcctcaggataagctggagtgtaagtgctcaccctgtcaaggggcttcagctttttcctagagaaggatctggggttctatccattattcctaaacacactggagattgagttgatatcacggatatgcgtcccgcctctttggggaggtttctttgtcctgttaccarmagtgatatgaacaactcctagaatccaccctgggacatattrccagttgtgtatcacatgggaagggcatctgaaacccaggtattgagaaccagaatctggaaagggaaggggtcccatcaagtggtcaagacttccttgctttgctggcaggacttcctgaaagcctttactcagaaaactrctacctcctcttaatagattttttaaagaaagatattcaacatctgtcctccttcccctattctgtgcccaggcaactctttaactatgaggaaatattcttttcttgagatctcatcaacctctgtcttgataagcctttgtccatttctctacctatgcccccccgccaccccaagattcttggcctctagagaacgagggggccagttaattaaaggagttgagctcagtttcgtggtgctactaaagtaggttttaaaaacatgtcttcaggaggagagtaagagctgggrgcagaaagttcacagtggctgaaacagcctgcagtcttgtagatgattcagtccagtgatggtttccctggcttctgtgagcctacagacatacttctaaaaaaataggagatgacaggaccttgttaaaaaatctgtattgtctttgcttctcttgggaacttaagtagacagtaaggggaaaaaaatgtacatgttacagccaaagtcaaaattccagttaataataagactagtcaacaaaacttaaacataagcaagggaagtctgccaaaggytaattcytgccaaaaacaaaatgaaacagtttgctcattagctgagcttaaaatctctcccataggtttgaagtgttaacaattgcaagtcttaagtgctaatttggtggcaaatgtagcagatttctgttttcttctagctaatgttaaaagtgaaacatcaaattatttccagcatttagctggattttgagtttcaggcattgtatttgttagtgactaccaaagagaaggtgacagatttttttatattaatgactctccaactgagtcttataatgaccatgcaaagaaatgttaaaactttttattacagaaaatttcaaagataaaagtagagagtacagtgaacatctgtggccccatcatccagtttcaacaattatcaactcatggtcaatcttgttgtgtttatacytcccaccattccctctgcctcagagtatcttgaagcaaattccaggcatcatataatctgtaaatatttcagtatgtacctctaaaatcgcagactcttcttcttaaatataacctcaataccatcattacagctaaagaaaatgattccttttgctattatcaaatagtcagtattcacatttttccaattatcctagatatttttaattgtttgtttgaatcaggatccgagtaaaattcatacatcaccactggttattatgtctctttactctcttttaatcttttggatccctctccatcttttgctaattttttcctttatttatttatttatttatttatttawttatttatttattttgagatggagttttgctcttgttgcccaagctagagtgcagtggcgtgatctctgctcactgcaacctccacctcccaggttcaagtgattcttctgcctcagtctcccaagtagctgggattacaggtgcccgccgctacgcccagctactttttgtatttttggtagatacggagtctcaccatgttggccaggctggtctcgaacttctgacctcaggtgatccgcccgccttggcctcccaaattgctgggattacaggtgtgagccatggcacccggcctgcaattttttgttrcagaaacttggtcatatagagttttcattttggtttgctttttattaaaccatatcaatttatatccttccttaactttaaggactgaaaacaaattaaacttttctttttaaaaaccaaacatgtattttttgggaataatagcctgaaatcccacacctattgccaatgcaataataacaactatcattgataaacaccttctatttgctaagtactttgaatgcattctcattttaacctcattgtaacctagaaggaaggcacaagaaggttaaaagacttgcccaaggttacactgctaaaataaggatgcttactcaggcctttctagttctattgttcatgcacaataggaccagagagaggtcagcgttggagagtcgcctaggcccagagtcctggaataatgctagcagaaaaggtctgtcctctatgtcattcaaccatctgctgggtgagtcagcagcatacgatgcatgcctctgactgggaccttctgaggaatcacaaagaatcgaaagcccatgaccctacctttaaaggactttgactttgaccagcgatgcacccctgaaaaaaacacaaggtgcagagacattaaaacatctaggaggaaatgatgacacaaggacaacttagcagaaataaggggaccaggctggtacgtgccccaagtggttgcaccgcatcagtcaacgggtgctccgcagagaaagcaggcatgatgaagggttttaaacaatagcaggaaaggccggggagcgcagaggctcacgcctgtaatcccagcactttggcaggccgaggcaggcggatcatctgaggtcgggagtttgagaccagcctgaccaagatggagaaaccccgtctctactaaaaataaaaaattagccgggtgtggtggtgcatgcctgtaatcccagcgactcaggagggtgaggcagaagaatcgcttgaacccgggaggcggaggttgcagtgagccaagatggcgccattgcactccagcctgggcgacaagagtgaaactctgtctcaaaaaaaaaaaaaaaaagaaagaaagaaagaatagcaggaaaatgaagaaatgcttatctctgcttcctgccatgctgacttatgagaccacagacaggatcttttccttttggttgagtaaaacataggtttccaggtcccataagtaaacatgtagtcccttgtccagatttttctcccagatcttccttatcctacatcacttcccagcagttagaacgtgattgaagatgtttctgaatagcgtatttccgaatacctttagaaaaaggaaaagatggcttccgtaataactaccccatagcattattgaggattaagcaataatgagaaagtctataggacagtaccttgtatatgttaaatgccatatataaatgttcatttgaaaaggaaaataaaaattagtaacatctgttgagtgctttctatgttctaagcccagttgatttggcctatcagttacacattaatcttcataataatcctaggagaaaccaactattattctctccactttatagataaggaagctgagctcaaagaagttaagtaacttgttgggcaccccccagaagtggcagggcagtcctaggatttaaatctgcctaactctacactttctatgctcaatagaagaaaaattctgstgcctctgccccacccccagctgggcatttgctttaggttgtgttctagtgacgctgaaatgtgttcatgctccccagggaattacactcatgamctggacttcatcagccacataggtattgcttagacaggtccagaagccaggtggttctcctcccttggcccagcctctctgtaaggaagtcagactctgtgctcagagggagggagagctggctgccataaccttcgtcacagtggtgacagaactaatctaaaaacctggcagcatcaaaacttcagccatccgcgcwtcttagaggacacctcaaggcttacctctgtgtttcttacagtcatgtttcgcctctatgattcagatgagaacggtctcctggaccaagcggtaagttctcactctaaatatccctcatggacctgagaaaggctgggggagcagggagcragcagaggaagaatctgaaaatgttcagttccgtctttgtagtaatagcaatgtctcgatgcaggctgaggaaatccgactaggacctctccacccgctatttccaaagggccggccttgcagagcgtgaatgccaacttaccttttcgctctagaagcctgggatcatcaaatctcaggatggagggatgctttagcatgtcacctagtttaacttcccattcagttcacaagcgcctcctgcaatttcctgcaggagtcctgaggccaagaggagagggcgggggaggcaacaagaccaagggaaaagggcacgaggaaggaggctgctggttactgttgatgtgcaaggaaggaggctgctggttactgctgatttcagaggaaggaggctgctggtcactgctgatgtgctttgccgtcacccttggctgcctctcctactccagggcactagcctaggagtctggttctgtctgctctaagtacatgttcccatcccattgcacctgagaaagcctgagactcaccctcaccccttcaggaacaggcaaggatcgatcaaggctcgtggagtaaaaggaagaatggaaagagaagaaggcaaacagagtcagacaggccctgttgtcctgactgtcaatgtcagagatagggctcattaacaggaaggccctgaggttgagatgcatggggctgagtcagaccagaggaaggaaggaagggaagaagtccactagacaaactgaatcatcccaattccctctaaaccccagggtgcctctatgggatccctccagctacattgcaatgctgcgggttgggtcatttgaggaaacatccagagaatcacagattctcaagcatttggtcaacacatatttactgagtatctgcattatgtcaggcactcttctaagcactgagggtatggcagtgtagccaactgacaaagttccatgccctcatgaagctttcattctagtccaagcacagacactaagcagcatagtaaaaacatgtgtcaggtagggatgggtgctgagaagaaaaataaaggaaaggaaatgttggaagaagttgaagctttagcgagggtcgccgaggaaggcctctctaggagggggcatctgaacagaggcatgaagaaggtgagggagtaattctaggggaagagccttccaggagaaagaacagtgagtgcgagggtcctgagggtccctaggatgttagaagattcactccgggccagtgtgaatggagcagaatgagtaaacagatgagatcacagtgaggaagtaataggggatgagatcagagaagtcatgggatgggggtaggagagtggggagtttgcaaatcttattaaacgttataggtgattaatagtgtttatctttggccaggcgagtgactcttgcctgtaaccccagcactttgggaggcgggcagatcacgaggtcaggagttcgagcccagcctggccaatatggtgaaaccccgtttctactaaaaatacaaaaattagccgggcatgttggcacacacctgtagtcccagctactcaggaggctgaggcaggagaattgcttgaaccctggaggtggaggttgcagtgagccaagatcacgccacttactccagcctgggcgacagagggagactccgtctcaaaaaaattaaaaaaaaaaagtgtatcttttactccagagaaatggagaaccattgacgatcttgagcagaggagtgatgtgattgacttatgttttaacagaatcactgtactctgggtgcagtagttcaagcctataatcccagtactttgggaagctgaggtgggcggatcaccagaggtcaggagtttgagaccagcctagccaacatggcaaaaccccgtctctactaaaaatacaaaagaaattatccgggtgtggtggcgggcgcctgtagtcccagctactcgggaggctgagatgggagaatcacttgaacccaggaggtggaggttgccatgagccgagatggcgccactgcactccagcctgggtgacagagggaatgcaagcagggatactggttaggaggccgttgaaataatcaaggcatgaaatggtgtagacttgtacagggtagaatcattgcaggtagtaagaagttgttaaattccagatacgttttaaaggtaatattggaagactgaagcaaatctcaaaagagttatctgattcaacctttcaccggaatccctgtcatatggactcctaccttaagacagccattccactgctgggggtgactgctggagagggcttccttctcgaacacaggcactcctctttgtggtggggaatcgttttcaactcaaaacctgcttctgctccccttctcccccaatccaacagggaggccaaaataagccagtcctcaactccttccttccctgcatccctctctgcttccttctgtcccccatacctggccaggacaaatggaatacctatcccatacaataggccttcgagtatttgaaggtgctatcacatctcccctaaaatcttctccaagctaaaatttctctattcctacactggttctcataaggcaggcttaaatatccactttggacaagctctggtttgtaaatgccattcctggaatgtggcacagaacagaatccgtcccctatgattctttaagtatccaaatgtggcctgaccaggaagacctcaggggaactttttcttttttaaatctgccaactctgcttctattttcrtagcccaagactgagtccaattcttggttcctgaaatacgttttctctttaaatcttggacccaaccagagattcacaagctcttttcttttggaacttctgccaaaacctttccccacctttgtgcccactttcttaccctcatctactggcctatcctgtagttttgcaatggattgttttttaacttaaataaaatacaattttttaaaatccctgctgggttttagcttgctatttggacccggcattctatctggcagaggtaacasttttgaaccttgcttcagtctaccaacatgtcctcccaaagcaatcttactgtgaacatcttaactggtgcctaaatggtgctaactttgacaccaaatgcctcttcagtctggtgtgtttcagcggggctctcagaacactgactcattggcagccaacaattctgtgaggttttagatggagcctggcctcagtaccaaaaggctcagtcatcaagtaaacatattcctcatgagtttcctgttcacggactcctgggggcygggctaagggctggaccatggtaaaaaggaaacagaggagataacaaaaggaatcaaaatcatggtacctgagctgagacacacacagtaaccctccatgcaagagaaactggcctcgagctgagagatggatcccaagttgctacagctgtggggatgagtgataagaagtgacaggagaaatctgccttgrtttgtaagtatttgtggaagctataatcacaaagagggataaaaataggagtgctttctatgctttccaagttaaagcacagaataagggaaggaaggtgggtccaggaggaagtcagtgtttatgagctttttgcatacctccagcttatgcatgctctgtgcttctcgtgagctttgtggtcgagacagaaataaactgagctcctcacaaaatggcagttactgcaccagcttcttctcttgccctgccctgtccctcttcccactgggcttaattttgagttcggctcttaatgacacatctctggttgtctccttttgatattttctccctttgctattttctaggagatggattgcattgtcaaccaaatgctgcatattgcccagtacctggagtgggatcccacagagctgaggcctgtgagtttctataaggatggggtggctttggagtgagcttctaagacgggagggggacacactcaagacatgaatgagtgttaaccctgcaggtgctcccagactcatcttcttataggcagcttctttggagtcctgcactttacctcctacctctctgataggaaaaatgyaggcagcaggaaaacgtgcagacataactgaaataaccatgctaatcttttcaccagaactaaaatgttatagcagaaattcatcagtcaaagaatttagagagaactgtagagatttctattagaaagaattgtagagatcttcctcaatcaccagataatatgaattataagaataattacatttgggggctcctatgtgtcaggtattttgttattcactttacattcattttctctaatccctgctacagtgccacaaacacaacaatattatttccatttttacagataagcaaaccagagcccacagagtcagggtgactggcccaaggcccaagggcagagccagacctggaagcctggcctcctcactcccagtctgctctattcacacttaacaggaggggaaaggggtaaaacacaaaccagataatgcaagatgaacaagacagcagaggcagaaggcaggtagacatgtcgatgatgaaaatggacaatgattgctctttggattccacagatattgaaggagatgctgcaagggatggactacgaccgggacggctttgtgtctctacaggaatgggtccatggagggatgaccaccatcccattgctggtcctcctggggatggatgactctgtaagtcaacaagctggagttcagagatctcttgccattcaggaacattgggcttcaygttaatatcaacatatcactttggcttctgctccagactgcccaacagacgtgccatgaccagccccaaagtcctctctatttacattattttgtatccattagtgcctgaagtatattcatttgacagacatttactacattattactactttaaaaatactgttctgcatgctgtgagggaatacagacacattatctgcctgcaagaaccttatactcaaccaggcaaagggccacaaacttcaaagaagaattctgtcttttcaacaaattaggtttaaaaatgctaagagaattggggaaggaagggtgagaggaaagaacgaagggagagaggaaaaaatacggatctgttgtgggggtggcttccattagtggtatcttatttaataatcaaaacaaccagataaggtaaatatttttatcccaatttatacagatggaaaactgaggttctgaccctaaggagcaaaaggaggagtgaggatttgtctctgacaccaaagatgttgcactttgtaatatcccacacatgagagttaggccagtgggaagaaaccttggaaggtgttgacttgtccctgaagaatgcatgagattttgatgtcccattcttgagaataaagagcaggtggccttaaagacctagagagagtttatggcttggagaacagcttgattaaaaacacaaatgaaagaaagttctgggtgtgttaggcaaatctcccatttgatcagagtagggcatatgtgtacaggcttaatgtgaaactgattgttatatataccttcatctgacccagttactgtattctccacctatttaccaagtgaactcacttccatgcatgaggtagggaagactaaaactagtaggagcacaaatggtgacattaagcgtttactagtcacaccagttgtgtgacaacactactttgagattacagatctcaaagattacacctctttgagactattccatagagaggaacagggcagcaagtgcagctgggtgagcctctagctgaccaagttgcctataatatcttcatttcatagctctgcaattcaggactaaagctgagcccccatttctgaagctcaagaactatgaatcttgcaatcatttcatagcatgtccagtgctttccaagctctaaggagaaatcaaggaaccaggatctacatgacccccttcttattccttagaaccctagaaagtcaagctggaaaagatctttgtggtccctggttgatcccctttcttttacaaactgagacccagagaaatgaaggarcttgcccaaggacatccaccgaactagcaccagagatcatcccccttactcgctcacatcacgcctctcacccaatgatcccttgccaagaagctttatgtacaagaacccatgtgatccaggaactggaagggctcagataagttagatatgctttctgctgactttactcacttaagattatactcaagacaaaatggaagttctgttccaaaacaccattttttttttctcatttagggaataaagatgggacattttagttacagggaatcaatttccattttctgttctactttggacttgctgaggttcaaaataccaccaactctttgcatggaaaagacccgctgtcttgtggcaggaggaaggagagcccatctacttcctcagcattctcccaaatgtctcccctaaatgccagatcagccttgtagaaaactctcatttatatcaggaaagtggccaatgcaagtttagttttattaatcaagagttttatgcacttatttttaaatrtgyactttaaaagtttttaacacttactatttggggttttggagaaagcccccatcaatgtcttaaaagtccattgcttcttgggctttttcaaaacccacatacaaccactgaaaagtctggggaatcactgaatgagatatttgcaaaacagactctctcccaggaaaatcgtagcagcagcataaaacctggtgagcacgaggaaggctacgcccacgttctgcagccaccatcatgtggaaaggaaagagccacatgatggtgctataacccaagcagaaacgttactttatcccaagtcacggtccatgcacttcttatatccataaaaatagtagctgagaaagggggatgagctaactgacttagctactagaggtgttttcagatacactgacaatcctttgggctccacgaagaagtctgctgaagagtgctatcattttccttctacccatacaggaaaaccctggcttgtgaggtagaggagcaggatggaaagagcatgggctctggccagcaaaagacccaagtctgactactcattcagtccctcattatctrtgtgggcttgggctagttaccgaacttctccaaatctctgtttctcatttctagaatgggaacaaatctacctccttccacgtcaacaaacactttttagtttattttgtgtcttccggcatctggaatggaataagaatttaatgaaagtttgaatttacaatatgtcaggcattgaactagaagctttacttacatgatgtcatttaattcttacaaaaagcccttgaggtagatgttggtcaaacgaataaatgaatgaatcaatcttttgatgaatcattatcagtttgtgaatgcatttactaaagtggagaccgttagataagagggttttaattctataaaactcatgtcctggaagaagcagggtttgaggtaatgagaagaaaatagcttctctggcccagaggagaaagccagcatttggaaaagaatgtgagctcctctggagatcataamagaagcctgggcacaggctgaggtctggttgcagtgaccagcccaaatgcatacgcaccccagaagtaagaattacatttgagtcccgcatattggacactacatccatgaccatcgatcctcatcaccttaccgtagcttttactgatcatgaaaccagcccaagagtgttactcttgtaatggagcctatgagaaaagttcagggatagcacatgcaggagggacattcctcaagctgtgctgtgttcccctgggatgggatgtgggagatgtgggtgtcactgtgtgaggcttggtgtacctagtagatgcagatgatttcacttctgaacaaagtcaggaggtgatggtctaaccctttctctgtctgtcttttcactattttttctgcgtaccgaaagttgataggagaaatacattgtttttactaaactctttcatcttgattatcacactagtacatgcacactgtaaaacatttggaacacacagcagaaagtagaaatcagagaatacaataaatccatattgctgccagctatagccaacctctgttaacaggttaatgaaattacttcccatcaaagatctattatataaaactgaaatcataacatatcatcgaaatggcattctgttttttcgcttaacattgtatcatgagcacattcccatgccattagatagtcttataaatatctttttgattgccacctaacattacatcagacggatgtactatcattagccttttggtaattatgagacctttaggatatttccagcttttcattattttaaataatgctgggttaagcatctggcagggcacaaaaaggctcatctgccttttaaaaattatttatttaggataaagtcgaaaaggagatattggtaagtcaaaggttgtaaacatttaaaggagatagatagatagatgatagataatagatagatagatagatagatagatagatagatagatagatagatcagattgttgttcagtttatgcttctgccagccatgcgggagaggatttattttatcccacacacacatgcttccattcagatgtttcttgcttttaatatttgctaatttttaaaacacacacacaaaaattttgtttttatttgtatttaaaacagtaaaaaatatcaataactcatcttctaaatgagatgaaaaggaagaacatgcaagaggcagcccctggcttcctccatctcagggcagccagcttggggtctcacctcctattacccctgcagggctccaagggggatgggcggcacgcctggaccatgaagcacttcaagaaaccaacctactgcaacttctgccatatcatgctcatgggcgtccgcaagcaaggcctgtgctgcacttgtgagtaaatttccttcaaacctcttcccccaggcacthtcttgctctgcgcatggttggttgatccattgcagagaaaatgttggtatttctgcttcccagcttgagggaccacccatattgtcccaacagaaggaataaagcgaggccttcatgtcctgtttttaccctacccaagtccaatggacaggtcttggactatttattattggaggctttttatgagccactgaccccctagaagaaattattaaagtccacaaataatttaaaatttctcatactacttttagttgggttttctagtcaatatttattctgggtatgttcagaggaaacttattttttaaaaattaataagcatttggggccaagtacggtggctcacacctgaaatcccagcactttgggaggcagaagcaggtggattgcttgaggcctgtagtttaagaccggccctgccaacatggagaaaccttgtccctactaaaaatactaaggtgctggaaaggatgtggagaaataggaacacttttacactgttggtgggactgtaaactagttcaaccattgtggaagacagtgtggcgattcctcaaggatctagaactagaaataccatttgacccagccatcccattactgggcatatacccaaaggattataaatcatgctgctataaagacacatgcacacgtatgtttattgtggcactattcacaacagcaaagacttagaaccaacccaaatgtccatcaatgatagattggattaagaaaatgtggcacatatataccatagaatactatgcagccataaaaarggatgagttcacgtcctttgtagggacatggatgaagctggaaaccatcattctgagcaaactatcgcaagatcataaaaccaaacaccgcatgttctcactcataggtgggaattggacaatgagaacacttggacacagagtggggaacatcacacactggggcctgtcgtggggtggggggaggggggagggatagcattaggagatatacctaatgtaaatgatgagttaatgggtgtagcacaccaacatggcatatgtatacacatgtaacaaacctgcacattgtgcacatgtaccctagaacttaatgtataataaaaaataaaaataaaaaaataaaaaataaaaatactaaaaaaaaattagctgggcatggtggcatgcgcctgtaatcccagctactcaggaggctgaggtgggaggatcactcgagcccaggaggcagaggttgcggtgagctgagattgcaccactgcactccagcttggatgacggagtgaaaccctgtctcaaaaacaamaaacaaacaaacaaamaaagcattttacattctgtaaaggcaataggaattaaaactctacagttgtttcactttttaattcctttagtaaagtcagagtggaaaggtggaaaaaactacaagtggtagaggaaaaagcagagaggaagactggaaagggagacagcaaaaagagatgggggaaaagagtgataaggagtaggaaagaaggggacacagggagcaggaggagaaggcagaggggctgcagcaagaaggcatggcaggcaccagaatatgtgggtgcacagagccctgccgccmgccccgtgatgtggacagcaacactcagcctgaacccaccagacaccggggagctgctgctgcagggaggcccgctggctgtgctccaggctgaagtgctttatccaacatgcacgtgtgaattaggcagcaagtgacctcagccacagaagtcgccttggcagagctgggcccgctgtccacaaagaccaagcatcaacgggctaaagaaggggtccrccaggcctggcgcggtgattcacgccgtaatcccagcactttgggaggccaagacgggtggatcacgaggtcaggagaccaagatcatcttggccaacatggtgaaaccccgtccctactaaaaatacaaaaattagctgggcatggtggcgcatgcttgtaatcccagctactcgggaggctgaggcaggaaaatcacttgaaccagggagtcggaggttgcrgtgagccgagattgcatcactgcactccagcctggtgaaagggtgagattctatctcaaaaaaaaaaaaaaaaaaaaaaaaarggggtacaacagtctccccagcgccagttcaaacccagctcttacccacattttatagatcaatctcattcccattaagttctaggcccgtgggcctctgctgttcacataatggtagtaaaaacaacagcaataatgtgtggaatagctactctgacccagacacgtgatgctttacacaaactatctcatgtactactgcaacaatccctgcaaagagaaagagaaagagaggccgttttcttccctttttacagaaaaccctgaatttcagagaggtaaaacaatttacccaaggtcatgtggattgtcacgggggcctgcctagccttcaaaagccctgaccttggccaggtgcggtggcttacaccagcacttagggaggctgaggcgggtgggtcacctgaggtcaggagttcgagaccagcctggctaacatggtgaaaccccatttctactaaaaatacaaaaaattagccgggcgtggtggtgcacgcctgtaacgcctgtaatcccagcaactcgggaggctgaggcaggagaatcgcttgaacccgggaggcggaggttgcagtgagccgagatcacaccattgcactccagcttgggcaacaagagcgaaacaccatctcaaaacaaaaaaaagccctggcctttctattcattttccaatgtcccgggcatgcaatacagtggcactggcatagccaggaggatgatgccgcacactccccttcagsaaaaagcgcctttctggggatgtgytcctgctgtgttcattgcctgcagaggaaggcagtgaagcaggtggaggtgcagccgcagcagataagcagggtctctgtcctccaagaacaattagagactgttttgaatttccgttaggcaagaccagccccatgtgtcccctgcccctcgccagccacccaaagggaggtacagaccttggctagggtgggagggcagctgggcctttcctacgtggctattcacaagcacctgccttgactttttttcttttcagactgtaaatacactgtccacgaacgctgtgtgtccaraaacattcctggttgtgtcaaaacgtactcaaaagccaaaaggagtggtgaggttggtgacatctactgccttgttctactgcatgcctcatccaggaaacatgtccatcaacatggattcctgggcaggaaggggcactgggagcttcatccagtcccttctctgccttgaggaccacctgtaaaccatcccgttcatccatccatccattcagcaccttcctggtacccactatgtgccaggcaccatgctagggggtacacaggttgtaagagacgctccccagcctgctcaagaactatgctgtctagaaggagagacgggcatgtaagcaaagaacagaatagtgagatgtgtgctacagtaacacagctgtgtggaaggtacagtggaagcacggggcaagttgcacaaaggagctggcattgcagttgtgtcttgaacacaaattgggaggacttcatgaggcatcgaggaggaccagactctccaggcagaggaagcctcatgtgtaaaggcatgagacayggcttattccgggattcatacttagtttggcatagctggggcagaggatgcttaaagggaagtggcargagatgcactcagaaagtggtgagatctggcctgaagcaggtcttatgaggccagctgagtgagaaaggtgttttctgtgcagccgggggccactgaagagcttcaagcacataaagatgtgatcgaatttgtgaattaggttaatagctctgagtgtgatgtgggagagaaatcaggggagggaaactcttccaatacttgaggtaaaaggcagtactgcgctgagggcccgactggggtgggatccacactcactgctctaggatggtcctgtgctgagggtcccccaggccatgctggttattgggtattttgactgtcacactggctaaaggagagaaaatgaagggagagcttgagaggtaatttggaagtaccaccactaggaccaggacatggtgatggggatgcggaggatgagagaagggaaaaggtagggaatggctcccaggtttctaactcggtcattgggtgatgccattctccaagtctggaaatagacttaccttaaaattagcaggggaagggcacttagccttcctgaaaagggaagattacatggaggagtgtgagtcaggagacagttagccatgagagtggtacccagccctcctgcagaaggactcctggtagagaaaggcacctcctagaatttgtgtgcatgccccatggacactgcatggtctctcgtccacgccttctgcaccaccccatgcacaccctgctccatgtccatgcctttcaccgggacacacggtgtacctgctggacgcaggccctaagcctgcactctggccacctgtcacacagagaacagagtgaggccaatgaggggccagcagggcacactcacaaacttctcagcctgcaggagcaacccagtctttcaccatctcctcagatcccaaagagaatgggtaaggcgatgtggtgttggggaaacagccctggacttggggtcagaagacctggctaggaaaccctacttggccgcttaccagccttggaacctagggccagtcacttaacctctctgaaactttcattttttcctctgcaaaatggaaataataatctcagagcaaattcaattgtggccatgtagatgacagattaattggcaaactgagttctttacaccctcagaagtgcaaggcacaaggtgataagctaccaaccaaacgtgacacatcttccaaagcaataattttgccaaaaacattcttaggggaggccttaagcaacttaattgctaagtaatttaaaacatttattcttggaccaagtgcagtcactcacacctgtaatcccagaactttaggaggctgacaagggccaatagcttgagcccaggagtttgagaccagccggggcaacatggtgagatcctgtctttacaaaaagaagatacaaaaattagcctggtgtggtggcatgtgcctgtagtcccagctacttgggtggctgggctgggaggattgcttgaacctggaggatcgaggctgcagtgagttgtgatcatgccactgcactccagcctgggcgacasagtgagactgtctcaaaaaaacacgtttattcttatttaatacaaacctggacagaatcacgcagatatttcctgggtttttaataccgtgcttgtggytaggcacttcagggtatgtcccccaccttctcccagagtccatatmcacttccttctgttatttgtggtaccatagtgaaaatttttgagtgagaattttggtgagaattccagggggagggaactgagggttcagcctcccagacagtggggctactagccagctgctcttgctttagccgcactgacacacacatacaaaaacaatcccactattcccacctgtttccaagtgcctagcctgccctggtggtctttcctggtcacggagcagatacaaccagctccccaggaaacaggtgtgaaaagcaccaatggaccctcactaacttctttggacttttctctaacttccttctagagtgctttttagtctcggcttcacgttataattacccagagtgctttaaaacatattaatcatgtgccccaccctcaaagactctaatttatttggtctggagtgtcggctgggcattaggatgtctaaaagctcccccaggtacttctaatgggcagctaaagctgaggaaggagaagggcattacccaattgtgggtactcccaaagggccaggactgcaccagggaggcccttcaaaatgtgctatctcattgcattgccccagtaaccccagaggtgggacttcttataccaattcccacaggtcagggacctgagactcagagaggtctaagaactggccaaaggccaccacttcaaagggactccagccagttttgtctgtggcctacccaagccctccagagttcctctgcaccatgctgccttccagaagagggcgcatacaaacacatcactctgcaaggcgttstgcaagacaaacagatggactgccagacaagatgctgctcagaggcctgccttccagggcgattgagctgttcaaaatgtggcaaagcgagcttttaatctactttgattcgcataatggcggttaggcagggaggaaccacatcgtgccattaggcaagccacccaacatccaataagcatcctctaaataggaaacagtccctctggctcccccgcgtcccctcccagatccttctcctccagcccagggccccggggacatggttctgccattttccctggcatcgttcgcttccctcccgcaggtgatgcagcacgcatgggtggaagggaactcctccgtcaagtgtgaccggtgccacaaaagtatcaagtgctaccagagtgtcaccgcgcggcactgcgtgtggtgccggatgacggtgggttggcgcccagggcggccctgcttcttttcaacgtttttttgcccaagctgcagcccaggagcagtgaatatccggccagagggcatgagcaaagccaggggagcgaggctaggaggaccccacagcgcctattcaatgccctcagcctaacgatgctccagtgaattaccaagctgcccagagagagggcacccccgaacsaggggagtgaggactgctgaagaagaagctggccagtccactgtctgtgtggcctggcagctgggatcagcagccccgactatgaacttcttttacctggctatcacctagggccggggacactgacagagtgggagaaaaattggacaacaggagcatcataggagggggtgcctgccctgaaggcacattcctcagagcagccccactgccygggccaaaggtttggacctgctgccaccagccacagcacatgctagagtccacagccccactagacacccagaatgccactggcagccactgagctggccaacctgcctgtcaaaactcactgccagctcttgtccttctccccaggtatcagcctcaaaatgtaggtttctccaaaccagactgcagaactctcaaaatacaaaggttgaatcacaaggtttactctcagccatccatgagtttgttcatcaacatctccctcctcccagagtctcagggcctggagagcacatatctaagggggctctggaatcaacatggggtgccacactgaagggtcacaggccggctcatgactgtgtcgcttcagtagccatgagcggctcttggcctctttgctcagcccacagcagactttgcacccttaaccacacacacacacgtgcacacacacacacacggcaatactgtcaaagccagcagtgcatcaggatttgggggagcactagacagctcacctctcccccaaacctctccaccttcatgtttgatgtttctttgctcactttcactcactctctttttcatttctccccccagtttcaccgcaaatgtgaattatcaacgttgtgtgacggtggggaactcagagaccacatcttactgcccacctccatatgccccatcacccgggtaagtgctcctgccccggcgagggctgtagcttctccgggttctggtttcagatgtaggcagctttcagacattcacatccttcccagggcttccctgacaactctttgggtttgtgttttcttttctttctttttttactgttattttaggttagagagtacatgggagggtttgttacacaggcagacacgtcttgcgggagtttgttgtgcagattatyttatcacctgggtttttagcccagtgcccagttgttaatcttttctgctcctctctgttgggtttgtgctttcagtatgtgcttgaaagaggtcagcgctgcacagatcagattttgagagaaatcttctctgactaaactgttgccaattgctgaccaccccgagtaccctgaaatgacccagcaaggaaagcacatttgttctaagccttttgcaggcagagcacagcacaaggaacctcagtcaccacctatgcatggccaggctcccaacctccctcatctctgtcaatctccctgccacatccaaacagtatctccctctacttcctgagtttccacttggatgtctcagcctgatttggaaatgaaagcagcaaaattaagctcctttacccccacctggcacgttgtcgcctgtgttgaagactcctctttcaaacaagcrtcaaacacttaattttgccatcttcccatcttaaaaatgttgcaagtcccacccattcctcacatctcactctggacttgaccagctacttctttstcattaaaaacctgagaaaaaggccagccacggtggctcatgcctgtaatcccggcactttgggaggctgaggcaggcggatcacctgaggtcaggagttttagatcagcctggccacatggtgaaaccccatctctactaaaaatacaaaaattagccaggcgtggtagtgggcacctgtaatcccagctactggggaggctgaggcaggagaattgcttgaacctgggaggtggaggttgcagtgagccaagatcacaccactgcactccagcctgggtgacagagtgagactctgtctcaaaaataaaaataaaaaaccctgaaaaataccaacacattggaaaatcatttagcaatatttactgtattggaaatatacaaactccataactcaaaaattctcctccagtgcatctacctggaaaatacaagcatttattccaccaaaagacatgcacaagaatgctcatagcagctttattcataacagttaaaaactggaaacaagttaaatgaccattaacaggagaatagatgaataaattgaggcatatcggcatctggcattcatagaatgggaaactacattgcaatggaaaagaacaaactatgcatagagtaaaaacatggagaatctcaaaaacataatgctgaaccaaagaagctagactcgaaaagatatgctctatgaatccattatatgaaattcaaaagccaggcaaaacccatgtggtatcaggagtcacaacagggttatgcttgaagaggtagtagttacgaggccatccccatatacaaaattcatcaagctgtacaatttagatttgagcattttactatatgtgagaaaaccttaataaaataaacattagaaaaacaaacaaaaccaagaaaaatgacaatatcatatcattagatagtgctcagcmgaaaagccaagtckacggccaggcgcagtggcttacacctgtaatcccagcactttgggaggctgaggccagcggatcacgaggtcaagggatcgagaccatcctggccaacatggtgaaaccccatctctactaaaaatacaagaaaattagcaattagctgggcgtggtggcacgcacctgtagtcccagctactaaggaggccgagacagragaatcacttgaacccaggaggcggagcttgcagtgagccgagatcacaccactgcactccagcctggcaatagagcgagactccgtctcaaaaaaaaaaaaaaaaaaaaaaagaaaggaagaaaagccaagtckccaagtctaagaattttcttctcagagctcaagcttctaaatcaaccaagtggaattctgccactttcagtgctccccactatgtcccttgcctcaaaggtaaagtcagcccgtgatgtcatcactggaggcctgaagaatcctagaaaaagtcataggggtacatttctttatttaggtcagaagccctatgttgaaaacctcgtctccatactacactagctttctgatctctttctttatatcagccgtttgtttttcwtctgatctctttctttgtgttaggcttctttttccaaaagatgcttgtctttcctttcttgtcacaggacaggccaggtgagaagtctgatggctgcgtgtccgccaagggcgaacttgtcatgcaggtacctcatgagctctaaatccgattgcaccttctaagttgttccagggctgtggcgggcaagrcggggtttgggttctayagaaaagcatctcagcatttgccttctcatctgactaattataccacccaggagggcatttatttgtggcctctggtgttacctttgacagccacactgtcagcaagtggtgagaggaaaggttgactgatcccattgctggtcttattgggctttattactattttaggaaaaagttacataaaactttaatatgcagatgtcctaaataataacaaagatgtggcctaaaaatagacaaygggtttttcaagattgccaagctgtctccagaacatgatctgccaaaatgaagctaaccagatctaaaagttcttcttaatccttaaatgtatacttaagaactcattttttttacttgggttcagcaatgaacattttttgtgtcttccacagagttccaaggaatgcagggaaggcagcctggtgaggaacaaagagtactagaaaaggaaatagaaaaccggggcctcctgctctgcctctgagccttaagtttcctccgctcaaaggagacacagtaatccctgccctgcccacctcccagaggtgctgtaagattaaatgagaatatacagattcacgtgttgtgaaaagtaaaaggccgggcgcagtggctcacgcctgtcatcgcagcagtttgggatgctgaggcgggcaaatcgcctaaggtcagaagttcgagaccagactggccaacatggtgaaaccccatctctactaaaaatacaaaaattagccgggcgtggtgggaggtgcctgtaatcccagctactcgggaggctgaggcaggagaatcgcttgaacctgggaggtggaggttgcagtgagccgagattctgccactgcactccagcctgggcaacagagggagattatgtctcaaaagaaaaaaaagaaaaagaaaagtgaaacataaggccgaatgaggggagaatcttaatatgtgagaaagctctagacacctagaagggcagaaaggtgggaaacacacacaggcgcatgcatatccacacccgatacatgtatgccagttgtttagggcaggcagccatcgggttgtcttgcatctgttctgatggggcagagcccccactgtaggactggctgttaaatacgttgaatatcatctccagaggtgagggtttattcctcagcctccaagatgcttctgggcatcacatagtcaccctgggcaggtgagacaaattttttagatcatcggaaatgctactatccttttcaaacaacatggcactgtgtttgctggacttttagcttgagatctggaaaagcaggcattagatattgaatatggagcagagctgtgcgtccacattggtgtatccttccactgaacccacaagtatttgctgagcacccactcttgtgtctggtgctatagggtccttggtagtagggttacacacaccccactctgctcccaatgcattttaaatccagttgatgttttgagtcatttatctaagaaagtaaaaaaaaaaaaaaaatacaaatgaacaacaaaagaaactccagaagatagtacatggtgcgtttgtttgcttgcttgcttgcttgcttgcttgcttgttttttgagatggggtttcgctcttgtctcccaggctggagtgcaatggtgcgatctcagctcactgcaacctttgcctcccgggttcaagcgattctcctgcctcagcctcccaagtagctgggattacaggcatgcgccactacacccggctaatttttgtatttttagtagagatggggtttcaccatattggccaggctggtctcgaactcctgacctcaggtgatccgcctgcctcagcctcccaaagtgctaggattacaggcatgagccaccatgcccagccaatagtacatgttttaagtgcaatcattttagttgcaatgatgaagggaaacttcatagagatgtctcttgaattgagccctgaggataagcaggtttttgttggtggtggtggtgttttttgtttgtttgtttgtttgtttgtttttcttttccgagacggagtcttgctctgtcgcccaggctggagtgcggtggcgagatctcagctcactgcaacctccacctcccaggttcaaacgattctcctgcctcagcctcccgagtagctgggattacaggcacctcccaccacgcccggctaatttttgtatttttagtagagacggggtttcatcatgttggccaggctggtctcgaacttctgaccttgtgatgctcctgccccggcctcccaaagtgttgggattataggcgtgagtgatcatgcccagccaaaaatttttttagtagtctgcaaagaaggaagtgggcatttcgggrcatggaatgggagaagaaacaagcacgagcagacccatgggtgggaatgcaagagacacactctagacttactagaggagcaagagcaggacttggctgcacctgcagctgagggttagcaggaattaggagataacagtagaatagggctagactgaaaaggcctttgatgccaggttaggaaatttacattttatccacaaaatccaaatcctcctttaataatgagatgtctttacaagtttttgggcaagagtggtatggctgacctggtgtcctgggaaggaactgtgtggggatggtgtgcaggacttacctagggtgggaaaggcacaagcagcatggggctgtggcagctaccagaggtaaagggacatttcagggaaagacttggcaggacaagaccttccttggatggatggatgaataacagaaacagggaaccaagagaaaggccgagtttcatagggagagaagatgggtcatgtatgaggcatgttgagcttgtactgatggtgagacgtccagtcgacagtactacccactggccagtgagaaatgtgggaccagggttcaggaggaaactggggccggaaatgagcatttggaaggcgccagggtggaagcgggtggttcactccacgagtgctatttcacttacgcgtatgatcagacggccgtgctttctaagatcatattcagctgtgtctcccacaaaatttcatcttgtgctgtaggtacaagaccacgtcatcgttgaatgatttgaagctacagcatcattgtcccatcgctgatcctgacctcaaaccctcatttccgttaacactacttaaaggccattcaaactggagacacttagctacttagcccctccgaaaattcagccagtggaaaaacacctgactgcctgccctcctgcttctcatctgcctctccgaagctgtcttggcttcaactctcatctcacgccccctattggatgaagcagagctaatttctttttcttttacctttcaagtataagatcatccccaccccgggtacccaccccctgctggtcttggtgaaccccaagagtggagggagacaaggagaaaggtacgttctcttctgtttcaaagtggagcaactagggcgacacgactcaggcccttcctccccttggcaggaacacagcaggctgtggagacaggcagactcaaatcccagcactgccacctgccactttatgacctggcccaagtgacttaatgtccccgggcctcggtttctccctctgtaaaatggagataattatcaktcctcctctcacaggtgagaacagacacggtgcttagcccacagcctgccacgtgagccattattaagaccactagagttagaccacgctctgagatgcctgtgcctttctagcctctcagatctcttgatttaagagatgatgggcagcccgttgattaggacctgctgggctaccgtcacccgtgagaagccagtgcatccacctcatcagtttgctgaaatgcccagttcagyggaggctagaaattgctgaacagcacaggtggacagggagaatggttaaagcagctctgcctcccaattccgggatcattaacagatggcaccgtgatctggaatccaggttaaaaaataataattagtagagttaaagcaagaactatgaggacccccacccctgtccaaggggcaggacacccctcctgaactgacctgacaattccaagctggagccaggaaagcaggcctgggtgcagtcacggcctctcagcgccctccctcccccacagcccaacaccacctcctgcgtttcctcctgatcccaggactgcagggggcctctccctggggaggagggggtcctgtgatgcttttgtacagtctgcagagggcagaatcacactgcctagaccatacagaacatttgggagaaggtctctgtggaggataaagctttagaatgaaagttctgttctctgggtttctctgccctgtcctctttgtaaggggcgatgcttctgggcttaggagctggagtctaggttggtagttcagccttgaaccgggagtgataacacgggtgatgccaggtggaacctggacgccagggtcagcaggcartgccctcccctccggggtttaaatgaaccctcatccctgccaccagtgggctccagaggtgtttgccctaatgtgacttctcacgatgacatattccttctctgtctctctctctccctccttttcttyttttttccatagaattcttcggaaattccactatctgctcaaccccaaacaagttttcaacctggacaatggggggcctactccagggtatggagatcacaatctttacctcttatttctccccctcccttttaaactccaatgaagatgcctcttttgtcaccttttttttctttcgtctctcaacttgttccttcctgscattttactccctttctctgctttttctcacgtctgactctgactcctggagatactcaggatgcccaggaaggctaactctgtttgagaagtggcctcctgtagcttgtcctagaaaaagttattttataagagggggaaaactgcacacacctttcatttgattgacaggaggaacaggctggtaaattattttaacttatttgcaaggctctgttagctggtgtcttcatactgaatcatcagagaagagaaagttttcttatcattgtcagtcagcagtttggaaatctagacagtgactcasagttctgccttggtgttccgttgtggggtcattttaggatcaagacaattacttgttcaatggaatyacttttgttttctaaatcattcgattttgaggttgttttgctcctcctgccacttactcattggctattctcttctcgttagcatggggttgtaaagaggcctggtgggaggcgtggtccctgtgtctgcggctaatggtgagctgcaggtctctgtgatgcggcccctacagcacctgggctagaaggccaggaaagcctgggcttcctcccagtccgggccggtgctcgagagccctctactggccggccccgggcccggggctgtctgcatactctgggctgggcttgcccagcacgcagccatttgcccaacctccaaaccaggatttctrctccgggttcagctagacccctcagagaggttggagtaaggactctgaaaagagaatttgaccctgtctttggttggctgacaccaaagctattrtttatggcagcggtagtacaaggcccagttaaaaagagaaagaaacataagtgcggattcagtacacctgccatgatttacctgtaaaagtaatttcagaacagagcccacctctgtacaccactgcagttgccatcacagtcaccgtgattgccatcactgctgaacagtacagccttgtgacggagcagccccccacagacacctttaccagcccactgtcaaaactggcagacagtcctccagcttmacctcgtgtattctaaattgttttcatctgagacgacgagccaggtggctacttcccgggctgatacgccctgagggtctctcatgcgcatgtcactctctaatcagacaagctgcctagctggagggagcgtctgttcagaattcacttcccgtcggagagtagagttctgcaagagaaggaatgttaatttgcctacacatgcatcagtgattctgaaagctccagggctcttctcagaccaccaggctgggcagattggaaatattgaccttaggcttcccaagttccacccccaaggtgtccgcagggcacattcattctaaagcagaggttcttaacttttttgtgccaggaacccccttggcagtctggtgaagcatagaaaccccctcttggaatatttcttaatgcataaatttaataataaaaggtgaccagggaaaccatatcaaaaaacagttattaaaacagtaaaacaaattagtgatatgagaatatatgagcttcaccaatacgtcaaataggaagacccagaagtgggtctaataactaccgtaaattccaagcagtgatgagcatggcagtggtatgaggcatctgtcacaaccataatgaaacactaacatggctgtgattttgaccgctgacaaagtcatgggtatggttccaacctctgtggtctgttgcctacatgstgaattgaaggaaatactactaatttcagtttgagcttagggaaaataagaatgtattattttctcctccaagttaatggccctctgaatccaatccataraacccttggaggttggtggaccccaggtataagcaccctgctctccagggttaaggctcctgagaagagaagggcatcactccactcactgtggcccacaggagagtgaagagaagatccagcaaattcggtgcatcttgcttaccagggcgggtgtcaggacagagcaggcaggagagcccgagaggagtgaaaacactgggggctatttgtattgaygccaaaactctggactcctctgcgtaactagtacagaatttctagaaaaccattttccatttgtgtcgaatgttgagtcagattatccttgcacaaggatggcccccttggccttggctccatattcaaggcactgcatagtaacttctggtttcagaacattgagtgaccctttcaaccacaaaaggaatcgaggtcttaacatactcctggggaacagggcagactctgactcaacatgtatcaatgtcagctgcaacctagtaacaagcccattttggcctttcttcttcttcccaggttgaactttttccgtgatactccagacttccgtgttttggcctgtggtggagatgggacagttggctggattttggattgcattggtaagcatgggctgagagggcgtttgctgcttatttatagtaagcgtatttacaatcagcagaaggcaataaaaaagaaagagacatggagccatgtctgttcatccttgtatcttcccctggaccaacacttgactaaatatttgctttgggtggaaaaaaaaaaaaaaaagaaataagacaatcgaatgattccctccaatacggaggtaacagtttagtttcaggcctttcctgtaaagcagatctgtcatggctggggtttgggcagtggcaggacaggccagatttggggggtgggaggacaggagtggaattctgggcagaccctttggggttggtaaaggccagagaactaagcatagatcatagcctgggacaaatcaccttgagatgaacacccggagcctgagtccagaaagtgcatctagaaagtacagatcagtgcaagcaaagaaggaccacactgagctgtgtccagtagagtacatctagataaaaaggcccaggccagaaggctggtarcctgagttctacccagctctacctggatctgtgggtcctcggacacatcagccccagtaagtgatggaaactgactgaaattctgggatggaagcagagtcaagatctaaccctacagaacccagacaaacactgcaaagtgtaatataaggacaagaaagcggccgggggagcactggggaggacagtcatcaaagtcagagactgggccctgagcgatgagccctgggctttccattcttcatcccaaaaatgctgcctgtgctccatgatgtgtcaagctctccccaaggcactggagatacagcagggaatgaacggacaaaaattccactttcatggagcacaccatgtagaggaaagagacaggcaatgaacaattaaataagtgagacatagtatgtcaggaagtgtttaaagtacagcagggaaggggcacagggagctcaaggctgcaatctaacacctgacagagaagacaacattggcatggagatctggaggaggggtgagtcaagtggatacctgaggaagggcagtccaggcagaaggaacagcaaagacgaaggccctgcagtgggagcaggccaggctgctggaggcaggccagcatggtcaaagcagagtggattcgagaaaagctacagcggatgaagcagaggtgacgaggggccaggtgactaggacatatagggcattctatggaatatggcttttatactgggagggtcccatgacattggatggttttgagcaaaggaggaacatgacagattaagagaagagggcagaagcggggagatcagttcggaggccactgcagcagtccaagtgagagatgtccagggcttggaccacaggagaaacagagtggtggtgagaagtggccagyttctggatatctttagaaggtgaaggcaatacgatttgctgacagactgtatgtgggagatgagaggacgagggaagtcaaggacaagccaggactagaccgtgaccagggcagagaaagccgtgcctccgggggctgtaagtagaccacctagctgggcgagaagsctgcaggaccgtacacctgccgcccgccactcccccgggcgctttggttgccatggacacagccctgccaagcagccacccacgctctcctgtcaccttgggctctggagttgtttgtgggaggagggaggagtcctccgggagccaaggaaggaaaagctgatctgcagagggtggatggctgcggtaccggactactcacacggctccctctccaccatgagggagaagtaggctttggcggagagctttatgcagttcatccgcagaggacacaggtgatagaagctgctcaaaacagaaagaaggaagatcacagaaggaggaagaaacattagtttttttcacaggttagtgacccaaagagaaaaaagcagaagcaaaagggataactgcgtaagatattcatccgttcactctcatttcagcacttgttcagtgctctgcagcgccyccccatggtcccctctctgatctgttctctccctacacccatagcgatctttcctgcatgtcactgggtgcatggtgtgcataaagcacaccagtggcttccattattcttgggataaagacaaaacccttgaagtaatctacagggccctgggtggtccagctgctgcgcacccttccagccttatttctacctccatccctctccatctggactcaggtcccggcccatctctcagacccctgggcgttccagtctcccttgcacctcagggccttcacacaagttggccaccctgtctgcagtgctgccccagccttcactcagtcagcttccactccagatctcagctgacatgtggcttactcaggggagcctcccctgacacacccaccagcctcagtcaccttcttatacgacagtgctcctctgtttgttttccaacgtgaatgtgaaatgatgcattatctccatggattcctcattattatytgtctgtcccactggacagtcrgtaagcaccatgagaacccaagccacggcttttttgcccactctcagagccggagcacctaacactgcatctgcatatagcaggcttcagtcgatatgtatgaagatgctgtgagaatgagacccagtccccctcggggaggttacaatacattcagggaacaaacaaggagataattacaagagagtacaaagagatcatttctggtgctaaggaaatattctgacgaggcaccaggtccaggctggggcaactagggagggtctcccaaaggcagcttctgagctgagccacagagagctttgtgctttaaggaagtgaaaacacttgagaacggttgacatgttgcgtgggaggcaggatgtgcagaaggatgaggstagggagaaaggcagagcctgcttcctgggcctactgtggyaggctatggggccatgaggagccacacagccccatcccagaagtgaaagcagtgagccagtgcgagggactgtggttcatggacttcccttcttggtgaaagtgtgggtgacacactaggagggtggaactggaggcggagagagccgagaggaggctgttgcagcgataccagtgggaaggaatcatacctgcactcaggcatcaccatggggatagagagaagagattgcttggagatctagtaaggagacaacacatagaatgtgatatgtgaatggatgtgtgagggaaaaggaaaaacctagggcggcatacagctttctagcctaaacaccataacaacagttgacctgccgaggtggggacacagaagaaggggcagacacaggaaacaagagccttctaggcaaagggagcaggctgtgcaaaggcagggaggcagtgctctgaacacatgttctgaggacaacgagaggggccattgcattgttttgctctctatctcaagccttccagtggccatctcagtcctgggtcttgcctgcgctcagccatttctgatataggtcagacaacctggaggacctatgagctcccagtttgccaggacaaccctagcttgagccttccctgctgattcctgcatctctcctcacgccgcaatcacattgctcacatccaggggcaccatgcgtgctgaggtctcatggaaatacccacccacccccaagactgatggatgcctgtgccctcttcagctctcccagcctagacaatatgccacggtagatctgaggccagatgaaaacatgttctattgtgctttctctgatggttctgtctgatgtccttcacaactgtcagaagaggaataattaggaatctgtgtcattgcaattctgagaggtggtggaagtgacaaactggttgtgggggccaaataacacctggaggttttgttcatttagctaatgttagtttttaaacttttaaactcgagtggtgaacagttgaaggtgagcatcttcagcttgtccaatgtcccactattccctagtgtcctagccccacctgttttactaatctgtatacctgcctggcccctgaagagaggaggggaatggacttggagccatagagatctgggtttgaatcctggctctggaattactttccctgtctgccattcaagtattgaccaggcctagctgctgcagtcagatgagattgagcgtgttcagggtagaatggttgtagactactttccctctgtcaatctcagtttcttcagctacttgaaggaggataatcccttacaaagttaggctgaggaataaatggagtaagtgctgattatcattaaggattaaaaacatgcaacttaatgttttggggtgtatgctgccaccccaaaggacagatttaggatgaaatttgaataaacatatgcaagttgcagggatacagatttagctcaatataaaatacaaatggacagatttaactcaattagtggtggttaacacgctgcagatgggatagatggctttaggaagtagtgtgtttcccatcagggtggtattcaaacaaagaatgctatggaggggttcaagcatcagatcagggataaaaagacaactcaaacattctacagtcccatggcatatggttctctgttcctctgtgtgtcttgcagataaggccaactttgcaaagcatccaccagtggctgtcctgcctcttggaacaggaaatgaccttgcccgttgtctccgctggggaggaggtgagtttgcatgctaatggtggtaccctgggaacaggtgttcctgtttacagagatgctctacagagctaggctgaacttacccttttatggatcacattccgcagcataatactcaactctgcagtcatgtcaagtccatgaccctttctctgccctccatcccatgctgaatctagaatagaagcccctcttctgggctctgggagctttttctccctcagccccgagtttactatcatcctgaaaccatcaacttagagcctgctttccccagtagaaagcaatcaactgtagggtaaagacaaagtctcatatgtcccatccccagagtcccatccaagaaggtgctcacttagatgttttctgtgtgaaattccctctcccacaaatggctgatcttctgaattaggactaaaactgaggaccaaaatgctacatctccagttacttaccgtcactagaagcattcagatcatcctaagccccatagccatgggccctcattttgaaatttccctaagaggaaacacagagtggtaaccagtgtataagacaaggggcagagaactttgcaaactgcagtagcccccatggcgttggacatgcgccagaaaatggagaagttcagctcaacacatggagcagacagatcaggctgccggccagaaaaggggtggggactccagatggctgctaattcagagartgagtcaagaccaggcagtgcaatggtcagtgttcaatgatcagctatgcttggtgggcagtgtcaaagcaagcaggacctaggcctagcggccatcttaaaattctgcctgccacactgtccatctcccacatgacacagcccagaaggatctgctgttctcccatgcagagactcccagccatccagcccaccgcttctccagggtttgcttcgcttcagctacacaggcctgtgacctttagctagcacccactccctcccctgcccccagcctctgattactttcagttatcctgcccttctctgtggctcggggaacgtaagtgtctctagcccacagacacagtggggagtcccatagtcacagatgccctgggcttacctgccctgacaactacctgtgcattagcaagaatacagcctttctgctgtggtggcaaatgcagtgctgtcctccacaggttatgaagggggcagcttgacaaaaatcctgaaagacattgagcagagccccttggtgatgctggaccgctggcatctggaagtcatccccagagaggaagtggaaaacggggaccaggtcccatacagcatcatgaacaactatttctccattggtgtggtgagttggtcaaagatcacctttctgtatggaagggaaacgcccaggaagggttccagccttctgttgtcccctctgggtccctagtgtctacctgtcttacctgcccccccagccctgagttgggtccaagcattctgaaacttggcctgagtgtggacaccctgattgcacccccgctttattccccatctcttgcttagggagtaaattctctcctctgtcattttaactaacacaggaaaagacagaaaaattttcaaaagacatattttctccttctgcaatttgtagcagtcgtagaaaagcaacaccaagmaataaccgggggacaaggttggtaggaaactctcacatgagcttcaggaactgggaattctgatcttcaaaggaagaccatgtggtcccaagttgccctggctggcttagccctcagatttccttctctcctattctctcttctctcaaccccattccactcactccatgggcatcctaaacctctaggggagtctcctcccagctgaccccttaggctgaatgctgtgagcctccttgatgctcccacagcccttatgctcaccccattcatgcacactctgcattaggttgaaggaattggtttaatgtacttatctggtgcccccccactgccatgcacacacacacactccctcagtgcaaggacagcactctgttcctttttcacccactagccccagcacatctagtgtagctcagcttctggtccaaagaggattggagtgggcactgcttcccaggctgctgtgaacaggatcggaacaggaggggacagatcaatcatttctataaatgaagctgggggttgggagggggtgggggtgcaacaaagacactagtatttactttttttaagaatgacagaattggtcaggcacggtagctcacgcctgcaatcccagcactttgggaggctgaggcgggcagattgcctgaggccaggagttcgagaccagcctggccaacatggtgaaaccccatctctactaaaaatataaaaattagccgagcgtggtggtgggtgcctgtaatcccagctactcgggaggctgaggcaggagaattgcttgaacctgggaggaagaggttgcaatgagccgagatcacgccattgcactccaacctggacaacagagcgagactctgtctcaaaaaaaaaaaaaaaaaaaaaagaatgacagaattattgaactatttgttctttttttcaacaaatatttatcaaattttttccctaaacttttattttaagttcaggggtacatgtgcaggatgtgcaggtctgttatgtgggtaagtgtgtgccatggtgagttgctgcacacatcatcccttcacctaggtactaagcccrgcatccattagctgtttcttcctgatgctctccctcccccaacatccccacaggccccagtgtgtgttggtttccccctcgtgtccatgtgttctcatcgttcagctcccacttgtaagtgagaacagccactagcatttattgagtacctgtgtgctctccacagtgctagactgtacatattccagccctcacagtagtcctgcaggtatcattatccygctcatctcactctacagatgaggcttcgagacccttgactcgcatggtggtgccttgttctggagccaggttctctcctctctgttcccttgtctttggagttgtgctgcccagtttcacatgcatatgaaaccctccagacgaatcctctgccccagactctgtgatacctgcactcctcaaccatcctcagctgtgtttcttttgaaattttggtattttaattttttttaaaggaaagagaaggagaaatgataggtggcttgaggggatagcaagtttaagtaaagggtgttgttttgttttgttttgttttgtttttgagacgagtctcactctgtcacttaggctggagtgcaatggcattatctcagctcactgaaacctccgcttcccaggttcaagcgattctcctgcctcagaagttggggttacaagcgtgcaataccacatccagctaatttttgtatttttagtagagatggagtttcaccacattggccaggctggtctcaaactcctgacctcaaacgatccacctgcctcagcctcccaaagtgctgggattaccggcgtgagccaccatgcccagcctaggttttatttttttaataagaaggctaaatagagaaccatgggagaagaaaggactaaaaataataataccttatatttacagaaggatttaaaatttaccaaattcacagatatattctgaagggcattattatctctattttatgaataagaaaacagagactcagattaagggatttgcctttattctctgactcctaatccggtgctctttttctattactaaagcagaagagggaagcattgctgggcccatgatcgggttctgagagggtggaggtggtagactgggagcaagtttaggggttcctatgtcccaatctgattcatcccactggatccccggcctcagctgaggggaatgtttccctagacctcttccaggtgccccctccagtgacccacgcagatgccctccctcctcttcgtgctcaaaggcccctctcctttttggaccggctgttcaggctccgcttcccccagcaggaacatgtgcagccttcagctcctgcaaattagacatgactgacaggtccggggttctggagcgtgggcttcccatcattacagttaaaaaaaactcatatgtctttttcctatagtaaccagaacataacttgctaacatttattgagtacctactgcacaccagacatagtttccctgccagtggaggcaggcattatccatttgtgttttgtaagaaggaaccatagcttagagaggtacagaaacaagttcaggcyggtgagtggcagagcttggaatcataatatttgaactctagagccaactgagctgtggaccactgagctttgtgcctccttgaagccccctccgtcttcatgttgccaaatgtaacatggtttgaaagaggggaatctcaaaatttagttgtggtggctcaccaccacctcttatcagaaatgtaaattccacccccacaacagatgctgattcatattccaactcagtaggtctgggtaaggtctgggaactggcatttttaacaagaccctgagatcattctgatgcagatggtcctgaccaagttctcagggagtgaagacaacctactagagcaganaagaatggtcaaaggaagtggctcttcgctggcatggaagccggaactgaaataaatggagaggvaagcaaggaaggaggggagaactagccctctaagcaacgggctggaagccagagctgaggagcaagactggcagagctgcctgggaacttctagacagcaggttacagcgcagctgcctgcagaagcttcagccccacctcttccctttctaacacacccagctctggctgacaaaaacatggttccccacacctccctgtctcaacacagtgccctgtataagatggccctccttagtatctgctgaccaaatggatgaacacacaaagaggaatggacagccttccctcaactaaatagccaggccctaaacccaagagccaagactattcagtaatcatagttttaatttattctagcaaaaaaagtaggaaaaaaggaaggaagggagggaggaaggaaggaaggaagggaggaaggaaggaaagaaggaaggaaggaagtcctgctggctggctaattaattgtccccaaggaaacacatataaacagattctccatcactctcagtggtcaagataatttacctaccttgggctgacttataataatccaatctattcatctttccaattatgaacaacttcacaatatctttcttgtaatttttttcatacacctttagcttatccatgtttaatattatrttgcagaagaatgagaaaccagggctgttctcatctcattggtgtgcccttggctttctctcaataaaatgtttgcagggtttgtatgctcgctctttaaaagttgaaaagagaaattcttgagaaaacaagtaaccaacacgcaaccctaacagagtctggggctgacatttgcagaaggtcttgctccctatttgacttcccaaactttgtaagagaagtaggtatgtaaaccgaggaagttttacttccttatgatgatcaaatagaggcggactccattggcaaagagagccctgccaaggtctttgcctcttttgaaggacctagaatatcttatgatagcaaacatctgttgctttgtatttataaagatgatgacaatgacctctgagacagtgcccttgggtgctgtgggtagaattttctctgatgagtttactgagaccccttgatgccaacagaacccatttaatagctgagggaataaataaggcagggtctcctggcctctccagggagtgactgtgccctcattgctacgacagccccatccacacatcagtttctcaccagtgagaagctaagatcgttggccttatcagtccttctaactgataatatctactggcaggagattttaaacacagtcattcaggatgccacttcctctgacttctctggcctgctcctccctgttctttatttttagattagcagaaaatgtcaggatggccaggtatcagtgacaggaagtttgggactacaaaataattcccaaagtatgtgtaactctgaactcctcacaagctctgctttcatgagccttaacaggacrggtgaacagctaatcccttgattcagtgaaatctatttctgatgctaggggagcccaagggccaaggagaggccacagtggttgcactgacccacgcaccgttttccaccttgcagatcgttcctagctatcaccagacaagcttcccaccatgataagcgtcctacacatagggaatttctcaacaagacataatttttcctgcagattcttggattctgctggcaccaggttatttgtcacctgtgagagccatgaagatactaatacagtgggactccccagagggacgtggacaagggtctatacccttttccattccccaatctcccataattttcagaacaaccccaatttcaaataatctgtcttatggtctcctttccatctttttatctccgtaaattgccaaagtgacttagacctgtgttatccaatgtaatagccatcagccacatgtggtatgacatgcttgaaatggggcttgtcttaattaagatgttgagtgagctgtaagtataaaatatacaatacttttcaaaaatgtgatataaaaaattaatgtctcaataattattctattccatgtgatgataatattcaaggcttattgggttaatgaaaatatattattaaaattaatttcaggccaggcgtgggggctcacacctgtaatcccaacactttgggaggctgaggtgggtggatcacctgaggtcaggagtttgagaccagcctggccaatgtggtgaaaccccrtctctactaaaagtacaaaaattagccagacgtggtggcaggtgccagtaatcccagctacttgggaggctgaggcaggagaatcacttgaacccaggaggcagagcttgcagtgagctgagatcatggcactgcactccaggctgggcaacggagtgagactccatctcaaaaaaataaaaaaatttaaaaatttttttaaatattaacttcatctgtttttttttgttgttgttgtttttttgtttgtttgttttttgtttttacttttttatgtggctactagaaaatggtaagttacatttacatgtgtagcttactctgtatttctattggatagcactggcctagatactccaatatctcagagtccaaatgactgatgcatgtacttggaaggggcccaaatttctttgtccacccatgtgcttggagttgtagttcaggaaagaggctctatgtccataccttccaccatctcctcttcaccccacacctgaaagaaaagacctcagagagtaaggctgtgagaaatgctatcatcacttccatggatttgtaattcccatctcctgccttcagaacagaagtctcgctttgccttaattatcatcaagaaagggtttacgccttaataaccaagaaagggtttgaaccatcgtagccctggtttcccaaatttaaatgaagtcactactgattgtaaatatgctcaggtcattgcctgacatagaagctccagagagtgaaagtgaatctcgactctctttttaatccccagatagagaaacgtggtcagagtcttcaccctcattgcctttttaagacttagaaaaggagctgctctactctcccttgctactttgtgtatttgccaagggattacattgtcaaattagggaccacgtgcttcactaataatgttttaaaggctggtctttgtaaaaagcatctttgcaaaacctagttatggaaaaaccaaagacaatcagaactgcatggaaggagggggcctgtacacatatcccggagaataaaaaagctgggagtcaatcagcagtattgggggtaggggatagcgaagtacaaattgtgccaggcaacatgtgattgcttttttcttccccgcccccctccactttttttttcctgacagacgaaaattagtgcttcaaaggaatagaagtagatggaatattttctcgaattttagagaagcatttgacaaatgtcacatgaatcttattgagggtgttcactgaaatttgctcagagagtgggaggtgggtacagtctgggagcatgaagtgctgctgtccagggaagcggtgcaggctggayaggcctcagggacagaggcctctctggggtccgcacatctcacccgtgcacccatgggggtgcctctccaagaccttaaactcttaatatatcttaagctaaaaaataaattggccaggcctggtggctcatgcctgtaatctcagcactttgggaggccaagttgggcagatcacctgaggccaggagttttgagaccagcctggccaacatggtgaaacactgtctctactaaaaatacaaaaaattagcccgacatggtggcggatgcctgtaatcccagctactcatgaggctgaagcggaagaatctctggaacctgggaggtgaaggttgcagtgagacaagattgtgccactgcactccagcttgggtgacagagtgagactctatctcaaaaaaaaaaaaaaacatcaatagctaaagtttaaattttaaactctcaaaacatcattttagcaaagaatgtttgccaatcacaaaataagcccatcttctcctcttgccctgccacctttcagatgtgggctgctggactcctatgccaggtgcacctcaccacacagagttcatgctcaaaaagcttcttcatagaactatacctcttgatgcttaaaaacacacacagaggccaggtgcagtggctcacatttacagtcccagtactttgggaggccgaggcgggcagatcacctgaggttcgagaccagcctggccaacatggcgaagacccgtctctactaaaaatacaaaaattagcccggtgtgatggtaggcacctgcaatcccagctactcaggaggctgagccagaagaattgcctgaacctgggaggcagaggttgcagtgagacgagatcatgccactgcactccagcctgggcgacaagagcaaaactccatctcaaaaaaaaaaaaaaaaaaacacagaaattttcatataagaaatagaattaatatgcatttgatgaaaattcaaaattcactgcatggaatttcaagtgttttgtagccatgtattccagtaaatgggtttgtatatttttcattgcaaaacaaatctagtcaactccctggtttctgtgtcaccccccatctccggctcaattagcctgtttatttctgaagcccagcacctgcacccaaagtaccagtatggggcctgagcggtgaaggggcgttacacattcttctgctggaaaatgagaccattgtcgagggtggaagaccgagtttgaggaggaaagacaagttccgtttcaggtttgaggcttagggttggctctagagattgacactttggagctatcatcattcagatgctggtaacagccacgagaactcacgagatggccacggtgtggagtgggggccgcaggtagaacccagggttagggagttgtggtcagaggatggagagcccaggagcacagtgcatgacagccatcctaactgtgagtgctggagtgcagggggccgctagtgtggcaaagggatgtgctaataggagggcagtgtccacatgatgtaataatgactcttattggccttggagggagtccttcgagtgaagtgatcaagaagcagaagccagagtttaattttgttttattatctagtaagcatgttatccagtgccactaattatttctattggtgtggatggttaagacttaatatctaatagcatctaccaatgtcaggtttctggttttgacaatatcctayagttatataaaatgttatcattgggggaagctgagtgaacgggacctaggaactctatgctatttttgcaacttaattgtgagtcaaaatattccaaaataaaaactattttaaaaagaactagtatggaaagtcatttccagagactcatgctcagccccagacacaggctcctgatctctaactgctcacagactctcagtctccccaaagggcaaaggctttccccttcactcacccctgaactatctatctgttctcagcgggtccgggctagagtgaaatagcaaggactccagagtcaactggcataggctgtaagagtattggtggtgctagctcatccccctggaggcagtgttgagcctctgttggctccgcggatgtgacctggagccccaccatgcgatagatagagtcccagggttggcatgactcagcgagtgcatgcgtgcgtcccttccctcygcactgcactgtcatgaccactcaccaaggatctgctttgtctctttcactttcaggacgcttccattgcacacagattccatgtgatgagagagaaacatcctgaaaaattcaacagcaggtaagctgcaggcccggctgcgctgccacccacccagtgtggccctggcggaacagaggcctttcacctgctctctggaaattttcccagccagggccgcyggggacttggccttcctgccacttgccggaaggagggtttccatttccaagaaaaaaaaaagtgtcagaaacttggcgcaggctaactgcctgtcctctcccaaaggatctgtgcagagggcagggctggagggcaggaggtgggtatgaagggcctgcttttgcaggggaggaggtgggagggcgtctgcccttgtctaactggaacccccgtcctgagtctctgctgcttccaagtacagcgcctccaaccccagcccctcatgattcttttggggaagagcagggaggctggaagagaccctagcttctgtcggtctcaaatgggaggaggtggcagctccgggacttggaccaggaggaccagaagggtgtctcctttgcctcccccgacagcagagggcagcagcagagaggtacctgcaaaggctggagacccggaacccwctaagtcccagcctcagcctgggcactctgtgaagtcaccaagttaggttcaaaaatgaaaggaaagaggaaaccagatcatttgcaagagaaagcaaacccttcttccttrtaggatgaaatttgccrgaacttagttgtgactgacgtatagctacccctttctccctctttccttctttgtctgtatcttctcattagtcaattttcattctttctttctttttctttgttgtactatttcaagatgaccactatttcagacactgttcccaccccaaccctaggtaggttgggagaagaatggataatgatttggactttgtttttgagcctaaaggtgttgacttttatttagcccacagaattgtctttttatttatttatttatttatttatttttgagatggaatctcactctgtcacccaggccagagtgcagtggcgtgatcttgtctcactgcaacctcctcctcccaggttcaagcgattctcctgcctcagcctcctgagtagctgggactacaggcgtgcaccatcatgcctggctaacttttgtatttttagtagagatggggtttcactatgttcaccaggctggtctcaaactcctgacctcaagtgacccgtcctcctcggcctcccaaagtgctgggattacaagcaagaattgtccttaaaagagaggttagagtgttcattgaagacattcatttaaagcccaggacccatcattttcatcactggccattttcattcctactctttgtcctgaccccacagcctgagaagtcaaccaagaagaaggaggtctttttagaggtcagaaactgaacactatagcttcagaaagagcgatctgtgggatccgatagcagctgaacgaaccttttaggaagtgcatcctgccacagcatcttcttgctctcacacacacagactatacacactcactgcacactaggaacacgtgtacttccagcccctgatactatagtcacaaacttacagttcagatgatctcctctaacggtcttttgcactcccagatacacacaaaccacttttttaaaaagtactcctcttcaacccattcctcaggcttttaaggtcctcttttcacacaagtatctttttttttttttttcatggagtttcgctctgttgctcagcctggagtgcagtggcgcgatcttggctcactgcaacttccacctcctgggttcaaacaattcttccgtctcagcctcccaagtagctgggattacaggcacccactaccacacccagctgatttttgtatttttagtagagacagtgtttcaccatgttggccaggctggtctcgaactcctgacctcaagtgagccacccacctcaggctcccaaagtgctgggattacagacttgagccactgcacccggcctcacacaagtatccttatacgtactcatgcacatgtgccatatgcttgtgaaagccacggggctctgttcattcattcatccattcattcagcagatcttttgaaaacgtaatgcacaccagacactgttctacaggcattttggacagacgcatgtaggggactcacagcctggtgctggaaacaggctggaaagcagatgtgcagaatggtttgtgttaagtgatgtaactggaggtgacctatgggagcaaaaaccaaggacacgaaacgtggcatggagggttttccaatgacagagaygcctgaaccaagacacggaaaaagaggagggcaacacagggagaaggaagcaaatgtaygaaaagatacgaaggagtgagagggtgcagtatacttgtggaagagcaagatgttcagtgtgatcagttgtatggtctcggcagaggaaagaaaccaaacatctgtaattcccagaaagcaaggaagcagagggagggagaaatttctccatatgccaaaaatcaataggcaggccaacatatgacataaatagagcaatcatccatcacccacatgattaagtacaattagaaagacacatccgtcagaaaaaaaaaaaaaaaaagattgtagcgtgcattttaatgcaaagtatgaacaaattcactgtgatctgtagractgtttttccttctcccttccgagatcctataaacaatacttctctctgagggtaggttctcagctcactcttcacctgactgaggtcaaggtagcatggatgacatggtgacaggcccacggatttgcacgtaaacctgcgtgctcgcctaacaaacgaagacagaagggctgaggtagcacctatttcacaaggtcaccgaacgcttcctatgaagaactttgcatacatactgcttctaccctgcctattcgcccatgtctaaaatacccaggagtgcccaatttgtccactgagaggcaggcaagcagccattttcttcaggcttccttatttagcattggagatggttttaaataggcaggtggttgttgccatggttaccccattacaccagcggctaaacttaggaaaggccgcaaggcataggaagaaagcttgatacccaggatttggaaatgtaaacggcattatcaaacaaggcytattttactcagctgaactgaggttctccaaagagtagttactgcttggccggaagcctttaccattactgcccaggtttggactctcagggataatcttgaggttaaatcttgggagttgtcattgctgtgttttgttctgttttgttttgttttcagcaagggagagtgactagtcaggtccggaacacttaccaggaaaccggaatcattcacgttgctgattcccttttcttggctattctaacaagaattcttaacctgggatccaagggcttcaggggttttgagaacaccttgaaattgtactaaggtactgaatgtatttttctgcagagaatgtccataactatcagaagattcttaaaggaacctatactcccaaaatgtttaaaagtcacaggtctgaggcctctttgaatcctaagaggcatcaaattatgactcaaatgttggggtttcaggaaattcttcctccatggcctctctagatgggttgttgccagggaagatagtgggttccagaaaaccaagttatgttctctgatggaatagtttcattaatggagcaagaaccagaaccgaggaggcaggaatacgagccatgtatgatgggcaaaaaagaaaaggcctttaacggcagagatggggttatttttggccctgtctacctcctagttatcaataggctaatcattaattgctaattgaggaatgttagggagattatcgtctcactgttggcataaagaacaaaagagaaatttgattcaactgagattctaaagtgtttgaaagtgatctggaataaagggcacataagatgtggcccctgccttcaaggaaatcgtcgtctagcaaaagaaaaggaaaaatagtgctcaagtattctttacaaaattattttaacatacaaggtggttacatttcataggtgatatagtatacaggaagtcgtataatatgtaagaacttattaatggtcatatcccaaacatcatttgcaaatggattgttttctttttgggggatgtttttggtcttttttttttttttttttttttttaraaagagtcattctgtcrcctggcctggagtgcagtggtgtgatcttggctcactgcaacctttgcctctcaggttcaggtgattttcctacacagcctcctgagtaggtgggattaaaggcacacaccaccacgcctggctaacttttcttcctatttttagtagagatggggtttcaccaygtcagcaagcctggtcttgaactcctgacctcaagtgatttgcctgccatggcctccgaaagtgctgggattacaggtgtgagccaccactcctggccaaattggttgttttaggtgtagcaatagtgttaaaggggaacctgactaagaactgttttcatttttttagctcctcctagatgccaagtggtgaactagggtctttaaatacattaaattatttaaatcacaaaacaacctttcaagataaatattagcattcccatttacagataaaggaactgacactggaagaaaccaagtcaactaacaaaagtcatgtattttttaggcagtggggctaatttaatttctgacctagctcttcactccagagtccaagctctrtttgccgcaactgctgtctcacatagatttcattgagcaagcactgatgtataccagacactctgataagtactttatacatcatcccactcattgctcacaataacatgcaagggtaagtgctactgtccccattttagaaatgaaggaactgaggctaaggaggatggagctgtcattggcatcatctgcctttatggattgtctctgtgggaaaatgcctgctgagttccaaaggggaggagaacaggtacaccatccagtcataccttgtatggtgtgagcattctccctgtttccacgtccacagcaaggagcaggactggctgtatgatctgtgtgacccagtgcaaaattaaaaatgtgaggccccttcctcaaaaatgggacagcaaagcattaaactaagcactgagccctcttaagtgtggggccctggagtccacatctcacacctatgaggtggccctggcaaggacagaggaattaataaaaagaagacacttttgccagtagtcacagagtagggtgtttgcaataaagtcaaaagaatggaggaaagagggtttcaacttagggagaaggagagggactctcagtcccacaaacaggcagcaatcagtactagcagaggagccaagaatcccgtcaaagtcttccagatagccaaaaaccagcccaccatgaagtttccagattaagtctccatgaagggttttgcatatgaaatctatacataaaagccacctaattctaatgtcactgtcagtgagtgtctagaaagagaagtctaactgtggaatgttttcattgttggttagaaactcagagtacttgcggaatgtgttattctaaacctgttgagtgtatccacttgaccgcgtctctcagcagttgaggctgaagcaagttatttcctgttaggcccttcagagggaccgaagcagtgcttcattcctactagaagctgaccacctttctcaaaagcccttgactaattaacaggttctgaaatattagctttcttggagcaggtcccatggagtcactgatgaggggctccccagaagccctaatgtagcttgagtttttaagaggttggaaatataccttgtaaataactaagcacttagtaactatttatagaagaaggcagcagggtatagagtaagttggcatcaaaacttggctttgccgcttattagctatgtgaccttgggcaagttaatcttcttaatcctttgctgcctcttttgaaaatcttgcaatgttgctataagtatttagtgacataatacctaagttcatagtacacaggaggttcgcaataaacatttgttgttgaatatcattgaataacaagcattgccttaaattgacgataaagtattgacaataaaagggttgtttttaatggagtgacaaattggattcagttatcacagaatcaatgctccattgacatggcctttaacctgaaaagttggaggacaactaaaagttggaggagaccccagcagtgatgcattgaatctgcccaaatccttctcctgggggtgggaatatggcaccactttggttggtttggattctacaggacagaagctctagaggaaatccccttcactggctccatggaagtccaagaggcagaggttggggatctggacactagagattcgaagtccagtgccaaatccaggctagcaggatcaagggagggggtcatagaccccaggtgaaatggcctcaggaggaaaagggcaggagtgagtaaaggagagtggcaggacagattccatgtgctccctgggtgcttctggcttactagcaggggtcatggactgcatggcaggtaggcaagtggccctgtggtcagatgctggggatgtgactacccctccctcacggatacttctttcccctcacccaccacgtacctctccccaaccctgacctcagataaagacagagatgttctgtggggaacaaaatagaaaccgacaaagctcaagtcacacagttctgaaaatgaaaggaagggcttcctctcttgaatacctgcagtatgctctgccgtcacaagcataaaatatatcatgatttacataagattttcttcttatatctaaaaatgaaacccttctaagttattctttcctggcgccctgtgaggtagcccactattacaacccagatgtgtgactttctcaaggcataaaggttcaacagcagcaaatatagcaaagttaaaaatccttgccatcaaagtcttcattctgtgccctgaattaggctttgcctctcttcatctaatatttggcacctcaaaagagacctgctgtaggtagccagaggtccagactgtctgcacctgcttccctcaatatagcaaactatttttcttaaatatctgggattcagaaaagccccaaatgaaattaattgtgggattttctgtgttttttcttattcctgtaggtatttataaagaaatacaaaccttatgttttgtgctcaagaacctttgattttcaagtcaattctgacagagcaactgacttaattacttgaatgtttatatactaagccacaaaaatgttttgtcccccaccctccccacctctctttgggagagatgcagagagtaaaatgaatgaaatatgggttcatgtttttttcatcaggtgctcaacgttacacaaatgcagaagtccagggttttttgttgttgttgttggattgtttatagttaactcttgattattcgcagaaaaaagggagcaaccacgtggatcatctacagtggtggatgatcaaagattttgggagtctgttattaatatttgtatgcagttctccctgccctaacattcgtagtattttaaataatatgatgaaatcacactgactcttaacaatcctttcattttcctcctgggtccctagtccgcgtgggaacagacagcacaacctctcagactgttacacagcagcagcctgtggcgtctcaagcctccctacaaggttacccactggccagaaccgtttctttctgtagcttaatgggctttttcttgtagcccctgctaggctagaacaggaaaggtcttattcatgtcaacaaagagtagaatcggtttgtgatcatatcagaaggaacttgaaagcacgctatgttttcaagactataggccagataatcccaaagttatcagtatttactgactgattgatttctagaaatatttccatcaaagaactcaagatgtaatgtgtaatcagttcacaagagttgaggttagcacgataaccttatggaagaaaatcaaagcacacaaattcaaagtaaggtaggaactggctggatcctaacgtgagtgttgacagtctggatgctttccagaagggagaggttgagaaggtgctggaactttagatgtcttcgagcaaaaggctgaatctggaattgtttcacccaaagaagagaagccttagagagaagtgatcattggcctcaaatatttaaaaggcttttcgtataaagcaggaattgtgttattttgcacaattaatcaatgaaaaggtgactggaatgcaagactgggttaagccccaaataggacattaattctactggtcagagccatcctcaagtgcagtgagctattggagaaggtgatgagttttcctattttacgttcaagcccatgctggcaatgattttggaagcaagtgcccagtaggaaaggttccattatcatacaacctggattcaaatcctggagttctcattaaccactatgtgtgaccttgaccaagttactctccctgaacctcagtcggctcacctgtaaaactgrggtataatattatgtgagtttcctgttgttgctgtcatgaactgccacaaacttagtggcttaaaacaacactactggctgggcgtggtggctcacgcctgtaatcccagcactttgggaggccgaggcaggcggatcacgaggtcaggagatcgagactatcctggctracacggtgaaaccccatctctactaaaaatacgaaaacaaaattagccaggcgtggtggcgggcgcctgtagtcccagctactcgggaggctgaggcaggagaatggcgtgaacccgggaggcggagcttgcagtgagccgagatcgcgccactgcastccagcctgggcgacagagcgagactccgtctcaaaaaacaacaacaacaacgacaaaaacggcactgctgtgttacagttctggaggttggaagtctgaaataggtgtcaccgggctaaaatcaaggtgccatcagggctacattcctttctggagagtctgggggaaaagctgtttccttgccttttccaggtgtcaccactctttggctcctggccccctcccattgttgaagccagcagtggccagtcgagtccttctcatatggcgtccccctgacattctttctcctgcctccctcttccacttatgagaacgctgattgcactgaacccacccagaaaattcaggatcctctccccatctcaaggtcaattgactggcaacttaaactctatctgcaaccttaattcccccttcgcccctttgccacgtaacctaacatactcacaggctctggggatcagaacgtggacatcttcagggcattgttccacctactagcctcataggcttatttcgaggatctattggaacaatgcatttaaagtgtctattacagagtcgggcacatcagtggtagctattatgattgttattaatattcttattacaaagacagatcctacatcagataataaccatgttagatgattcagaagccattaagactctgaattttggtgattctctaatataggcagataaacatctatttaatattaaatagggtgtaagtcatcaatgtagaaatatatggaattatttttctcatcatttatcttgtttaaamgtttttcaataaaatatcaatacatttatcatgtaattaaataatacatcagacagtgttattatatagcacattgcaatatcattataaataatttggaaagttcagaaaagttaaagtaagagaaaaaaaaccaatcactcatattcccatcatggagaaacacaatattgccattttggtgcattacagcagttaacttgatagatataccttaaaatatttgtgataatgtgtttttataaagctatacatatcatttttaaactaatttttctttatataagtcattcaggytcattgtaaaaaaaatcatattttgcatcccctcctccaagaaataaacactcagcgctataacatattttctttcagcattttaattgcacaattttattgacttgagatcatgctctagacactagtttaaaacattaacatagtagcatttataggttatgaagggaaggtgatagaaaggagctgaatggagtgagttcatctgctgtaggagttttattggccttttccaattaaaaagtcccaacgcttttgttcagtcattgagtgttttaaagataccattacccaagtcccttcacaattgaaataactatttcagatgttatgcagctctactatcgtgcagggtaaatgaaaaatattttatcctttcaacacgattctgggtcctgtctatagttttgctgtatctcaaaagaaccagtttgtgttttatttgaccaccagagatagcaagagttgctgtctgaactatgcagtagtatagtttttgtttttatttttgtttttttgagacggagtctctctctctgtcacccaggctggagtcagtggctctatctcggctcactgacatggccgccttcagggttcaagcaattctcctgcctcagcctcctgattagctgggattacaggtgcgcgccaccatgcccagctaatttttttgtatttttagtagagagcgggtttcaccatgttggccaggctggtctcaaactcctgacctcagttgatccaaccacctaggcttcccaaagtgctgggattacaggcgtgagtgaccacacctggcctagtatagtttttaaagcatgaataaccatgagctcatttattaaagtgtttagaaaggtggttttcccaatgtaatcagtcctgctccaacccataccaacaatagtagccatcatttattgagagctttcaagaatctcatgtacattatttttaagtggcacaactcaccaagtktaagtattattgatccatcttacagatgagaaaagtgaggctcatagagatgatgcaacttgctcaagaccacactagttactagagaagctacgattcacacctaggcctgtccactccacatctcctcttagcctgctacaattccctgcctctccatgtgcccagttttgtgccccatgaccaaagatgcacccaaaaaargactagaaaagagccatagatatgattaaagggcccatgagaaaaccacaagttatccaaaatcacttttcctggagagaaacagagaacgtactgggaatgggcctcaagtgtgtgaaggattcacaacaggaaatagtgactgcacctccttactcttcatctcagttcaggaaagaatgagagagggaaaaaatgtgctctaaaagtaaagaattctcttttggatgggagcaggaatcttctggcctggagacatattaaagactgaaatgagttattgagagtagttttggaatctcttgcaaaggcttccaaaaacagagagttgcattcatccaggatgataaacacaccaccttctctgagcccagcagtgtactcattgcacccaccaggtccccacccagatgggagctttctgtctcccactccacaactgaccaagctgcacagtttaattgcacaattttatttacttgtgagaccgcttgcctcctgtgctcctcacttcccagttggtccccaagatgttccatcctcaggatttcctcagccaccctctggcccatctcgatgcccttcccattcaggcccaccctgcctggagctgcccattagtctccctgggacacgtttgtggtcctgttgctgctgcacaagcacctacttccaccacccccctcccacgttacatcccatgcttgcatttagcrccctttataacattctcctcctcaaacaccagcctcaccttcttgcttgcttgctctgttactctcaccttccccacacagctgctctcattccctcaatccctcaacctagatgacatctcctcttgtgacctagtcatcacttgtttcaaaatgcagcacagaatattctgaacgaacctacttaaccaacccatttggtactccactttctcttacactccatctccaatgttttgttgttgttgttgttttgtttgtttgtttgtttgtttgtttttgagacggagtctcgctctgttgcccaggctggagtgcagtggcgtgatctcggctcactgcagcctccacctcctgggttcaagcaatgctcctgcctcagcctcccaagtagctgggactacaggcgcccgccaccacacccggytaatttttttatttttagtagagacgggatttcaccatgttggccaggatggtcttgatctcctgacctcgtgatccgcccgcctcggcctcccaaagtgctgagattacaggcgtgagccaccgcgcccagcccatctccagtgtttttgacacattctgtcccactttgctgcaccctctttgtcttctataattcattgtttgggatgctaaactactgttatgtctccaacttgttcataagctttctcactcggagaggagtctgactctcttcaggatccactgaactaaatccagaagggtgatgctaagcatgtttcttcattcagccaaaatgagttgagcatctatttgtgttagcatcatgctaggtctgagaggaacgatggagcaccacagcccctgcttttcaggagttcgtgggtataactgggaagatgagcacatacagaagttaataccaactatatcagtgtcctgggctgccataacaaagcaccacagctgggtggtttagaacagcagaaatgtattcgctcrtagctctaaaagctgcatgtctggcctggcgcagtggctcatgcctgtaatcccagcactttgggaggcagaggcaggcggatcacttgaggtcaggtgttcaagaccagcctggccaacatggtgaaaccccgtctctactaaaaatacaaaaattagccgggcatggtggcgggtgggcacctgtaatcccagctacttgggaggctgaggcatgcgaatcacttgaacccgggaggcggaggttgcagtgagccgagatcatgccactgcactccagcctgggtgacagaatgagactccatctaaaaaaaaaaaaaagctacaagtctgaaggatgtcagcagggttgattccttccccaggctctgagagagaatgattttctgtgcctctctccttgcttctagaggttgccgccagtctgacatccttagcttgtagatgtatcagtcacgcaaatctttgcctccatcatcacacggccttctccctctgtatctgtgtctctgttcaaatctccttcttcttataaggacgtcagtcactggattggacccaccctaacccggtataacctcattttaacttgatgacatctgcgaggaccctatttccaaataaggtcacattcacaggtatagagagtgaggacttyagcatatcatttttgggggggacacaattcagcccacagcatcagtcttcccccagaccttcacacaagaaggaaatacaatgtaatatggtagctttgttttcacgaagggacgtgaacaatgagggtgttgtgagagactaggatgaaacttcaggaggaaggtaacatttgcatgagcgctggagacagaaatggaaattcgccaaggagagaagcaaccggggaaatgctaggaggagggaagcagtatgggagaagggctgaagtgtgagaggacactggacatgagcggagaggccggaggttcccgggtggagtgaaaaggcggggggagcagttgcagcagatctcgctggtctgcaccagagtttgcatcttatcctaggagtgggtgagtggacagtgagggtatccatcagtaagtgctttttgaacagattaatgaaggaatggcttacctttcaaagtatttgtggagcaaaaatttcagggctcctagaaacactgggactttaaaatactgaaccttgctgaagtgttagaatagtacagacagagtgttagtcagaaagacccagaaaagaggcaatccccagggggagagagaaggaagaggggcatcaggagagaggagaaggagccaactctgctgccctggaggagtcagtacacatcagggctggaaaaactatggaaaccaacgacagagctttcttataaaccttgagctttaaagcatgctatttggttgtgaagtagaaatccatattgaaaaaaagaatccgcatgtcattctctcttcctcaccaccacaatttcagatgccttcagggagagggcaacttaggtggcttttaaagttagtttaacatgtctctttgtttgtttttagctccagaaaaaataatgtcagagtttgttggccttctattgtactttactaattaaaacttcagaaaattgttgcccttttgcataagagtatttttggaaaattattgcccttttgcataagggtattttggtgatacaacagagtctgtatctgtatttacggctgatgtgattagcatattcagtcrcccatattttctttaaacttttcataattgcatgcgttttattatgaagaaattgaaaaacaaggtgaaaaggtaatagatgttctcaaaaaagattcaagtgattaattttaactccccacttaaatcaacatttactaaaaaacgttgtaatgcacttattattgggccaaaggaaatttcaaaagcaagctttcactgtacttatcaggaaacgcagtaactctcttctgtgaaataatttacttatttcacagtaaattatytcacagaaaccctgaacaaatggctttacaactctgctatgccaggtcgtggtcaccctcatgtgaaatacagacacaaattcctgagtttcattgcattcagcatcaaaagaactgagtttcagcccttactctgcctcttacttactgtgtgccattgggaaagttactcacttctctgattcctaatgttctgatgtgtaaaatggaaattacaactgcctgacaaggtgcctgtgagaattagagtagataaatcaatggatttgaagtttatcaggtattggtatgatgctgtattgattactacagggatttgtaaggagaacatgcagcagtatatgagaatccattgtagaatctctaatttaaaggcatgctgtcatgattcctgtctgtaatagtaacttatagactcctagctttggatgggactttagatttcaacccccttctcagtgtaagcatcccctctntaaacgctcctccaaagggggtcatcaaatctcyactttgaagactgtagatctctattatgaagattgtaggagtgtttaaatttgaaggggttaggaggtgcttaccacttcatattttactaagaaggcattttcccaatcttctaatgctcttcaatgaaagaggggctcttctcacttcaagaatgtacttataccctcaaattactaacacagcagggaattacgtaattgctgaatattcatgtttattgaacctacacttagattgaaattcttcactctctagtaacaagatgttttctattctgttaaatggagtgtccctttaatcctgaaagtgggcctttttggagagcattccaaactgccaatcaagccaagtaccctaccttgcctttgaactcaataagctgaaagcgggtctgtaatctccagttttgggttaccacagagtaagagggagtgagaaagtcctgggtaaatgaaaactgcaaactgttgatctcagtgaaacttttattggagctctcaacagagtgttgtaattagtcaggttccccctttcctcttctgtaccaccttgcccctgaacttgggtggggagaggggaagcggctgctcataatcacggtttctgtatatgcagggttggggtggagataacaccacgggatgccctctgatttgagctgacgttctggttcatgccttgtacacatttccccctctggccccatctccacaactggtaaaaattgcactaaagaaaaatgaaatggttaacagctgatgggttagaaaagaagaaatttgaaggattggattatctacttactaaagaatttgtcccttaataatcaagccttggtggtataatcttaaaattcacaataatcatggtttgtacaaagtggtgagttcagggaaaaggtaaatgtgagcttaggctacttttctagtagttagagtcaagttcatttctcagtgttccatgattgtggaatagttgatctatctaccaggttgtgccctaacttccaaacacagagcaactgcaatattatttcccagaagaggtagatttggatgatattttatttctgtgcatgtgatctttgcaaatgccaatatgattcatctctcaccctgctgcagctggtcagcccttgaaatcagacatgtattaggactcataaccaaagacaccagcagctcagacaggaaggatctgaggaagaaagtagcggagacacttttgaagcatcgtccagggaaattcccaggggaaaactacagcggtctatatgaggggtcacaaatccaaacgcatgcagaggcaggcagttcatgtaaatgagagaagtgggtagatgtgaggctttagggagtggtgagaactctagcctgagtgctgtgtaaagggagcagccagttctcagtggccgtcgatcattgccaggttggaaagcaatccagtattaacagatctgatttctcaagagaagctgggcttcaggtgtgtatgtaaaattttccaattttaaacaccaccatgcaagccaaataaacacattgccaggccccataagagccttggccctccaacttgtcacgttgatgtccaggaaatataaccttagggttgtgatgggggccaattatttatttttcttgcttgaccttggtcacaaattattggtgctataaatgtgaactgatctcctgccaaaggagagaatgaatgggcttgaggagaattttaaagcattgacaaagggttcctagatgtcattaaaaaaaatgattcarggccaggcgcaatggctcatgcctgtaatccctacactttgcgaagctgagaggggagaattgtttcagcccaggattttggagctacagggaactattaatataatcgtaccacttgcactccagcctgggcaatggagtgagaccctgtctcaaaaaaaataagtaaataaaatacattaaaaaaaaaragaaagaaatgattcagaaagaaaagggactcagggggacaaagagaacataaagagaagtcactctgattaataaatagatatggaaataaagaggaaattcccaattcctgtttggagaaaaaattaaaagtatagtctctgcacaaggagaataaatttggaccttctggagaagggagacacagcagctaacagacttaccatgaggttcaactcctcatgagcctgcagaggtagctacccagattgtcttcttccagcatgtrttaaagtatgtagcattggttaaaatgccttccacaggatgttaaaaagaaattcacaagaagattggggggcgggggggtgtcaatcattgaatacacttggaaaattgagtcaaacataattcttttctgtttgatattgtagagcttttaatgtagattctaacctgctgagatcatgcaaaagcaagagaaagtatttcattcccaaatttacctgaccacagaatccccttaccccagagcctcttgagaccaatattttaccgaattcactggtgaaagcccctgcattcgagtgcacatactcatataacttacagactctttctcctgtctgcctgcgggcatggtggcaaatgacacatttggaggaatcctggttagtatctctagtgacctttgatgtcttgggtagcaagctaagggacatgggcaaaggcaatgctttagtctcttcctcagccgtgagtcataattttagaagaaacaggcacatatggggaacacagagctgctctgtagctgatctgagaacgactgttcttctggaccatggattttgatgctggaataagaggaccctggcaaggaattgggagcttatcacayaaaccaagcggaatatttttggccagatacttgaggaccaaacagaagagctttaaaatgagatttaagtaggataaagtagagtgttcaaattaaactctaaaatcacagcccacagaagggcagcaggtgcaagctacaaataagaggcgtggctaaggtggtgccaagcagctctcccaaggaactggctgggaggaccactggggccacacctacagctgggacaagtttgccaaccacacagtgagaggggcaaactgaatgattcgtattccttaggggagaggagcacgaccttagagattgcagtcagagacatggtggggcaggacacacagctgcaccaccaggccaggtgaggatgacaagttcacataaattgcagtctctgaaatgggtggcagggatgtatacacaagaataagaagtcacaaacgtcagagtggaagcaaagtagagagcatatggatgagattttcaaaaggatgaaatagaaaggattttgctggcagggtctaccgcagtcttctcaggcagagcgaggctctggctcatgctttcctatttaagattttttaaactggcacaggaagaagatggaatagggaagagaaggggggtatttatccaggcatctgccctatcgagtgcatttttgacttgccttgctaacaatttcatgatgggaaaggtaagggaaacaaggagggagcgacttaccgtggacttaattctagacaagatgcctctaaccagccgatggtggggaaggcacaggaaacataggcagaaataaccagaccatcctagagttttaggattgcaaaaggaagacacaggatgcatacttcagtgtgtgctctctgctaccctttccacttctgctgcttctcactctccctctggcgtctccattcccctcctaagtagaactccagcccagacttcagggtcaccgccggggatgtagggtagaggagtctccaggtttctttcccaggaagttgaggaaagcaaagatccccaatcccaattcagcggaaaagatgtgctccctgtactttaagttggaactcagaatcatgaggccacgaagccagttttatatacaacaatggagttctactgtgcctttattggagtgtatatcatgagacatatatatatatatatatatatatatatatatatatatatatatatatatagtatacatacacgtgtgtgtattcttttgtttgtttgtttgtttgttttcctgagacagagtctcactctgtcgcccaggctggagtgcagtggccacctctgcctcccaggttcaagcaattctcctgcctcagcctcccaagcagctcagaatacgtgcacccgccaccacgcctggctaatttttgtatttttagtagagatggggtgtcaccgtattggccaggctggtcttgaactcccagacctcatgatccgcccgcctcagcctcccaaattgctgggtttacaggcgtgacccactgcgcctggcctaatttttgtatttttagtagagacagggtgtcaccatgttggccaggctggtctcaaactcctgacctcaagtgatccgcccgcctcagtctcccaaagtgctgggattacaggcgtgagccaccgcacccgaccatgtgtgtgtattcttaattaatattgccagcaacccctgcaaggtaggtcatattgtgtcaattcaaaaatagagaaactaagagacagactaaatgatttgcccaaggtcacatggcaggtaagtgactgaactgtggcttgaacccaggcctttctgccttcccaccagaactccttcagctccagtaagctctctctaaaacgagacattgtagtttgggtacctaatgggttaattggctcttgtgggttagcctgggaacccaacctcaacatcacattgtttctatggggaaatgtgctcagagtgacaaacaactggcttaaccaaggaacttttgtaacccgacctatcataaagcaggcactgcctcgtgttcagaaagactggctggggagcgagaggggagaacaggatcagccagcctgcatcccctcagactctgtgatcccgttccagtctagctgtaggtttgccaaggaacaaccatctcacacgtctacaaatagccaccatagtacctaccgcagggggtagacgtgaggatcaaaagagcgcgacccttgggtgcataaagcagccagtgtaggtcagacccacggtcaacatttatgaagtgggaagtgagattcctctcaacagctgggggccggcagagctcagctggctccctcaggacccacccggcggtcacggtagtgtgagggtgtggacctgcttccagggtttgcctctgctcctccagacagttccaccttttagtcttggttgatcaggacccaggaagtcaccttccacagcgagaggctcagctccagcaggacagccaccttctctaagccttcaaggctcagtttctaacacgaggcctcacccacctgtatcttcactgtccccaccgccttcagataccagttcccagggctgatggatgtgtaaatgctggaaagcacagctaaggaatcactacagaacctcaggagtgagcattcctgtccgccttttccccgtccctccaggcagggatttctttttgtcccagtatttgactttgctctccgttaactgccaagagcaagcttattccatgccctccaccctccgccaaatcagcctgaaggggattttctttccacgaataactcttcaaagggagaaaggattgctaagaagcagccaaactgtgagggttttttctttctttcttttttctttttggatgagggaaaggagctattttctcttggcaaggacagatactaactggaaaaacaccctggagacccaggccatcaggaaaggaaaaccctgacaacatggtcctggccttgcctgcccctcagcattctcccctgagggccacccccaaagtggtgcctttcacagcacagtggccattctccagtcaggctgctgggcctttggagagactctctggcctcagaggggcagtgtctgcgagcacatttggtaacagtggatcatgagtctcagggaagccttcttgttgcggcctgtgtgtgtgcccgcacgtgcacacgtgtgtccttgtgtgctgcactgggaaaggatccgatttcagactttggcaatcttcgtgcttggagtcctgcccttaggaggagatactgtcaggtgccagacagaattcggagatcctatcaatggagaatgtgtccttggtccgcagaaacacactgtcttatatggaagagaagggtcactgttcagaggcagtagattcttaggggcccagaattacccttgaaggggtacagaggctgctctaaatatgaggcttatgggtttggccctttgttactctgggacaagagtggagactggagaccaatggggaggcccagatcatggactctgctaaagagtgtcagggtcccagccaacctcaagctgggatcctacagccataccggtggcgcatgtggtagatgtgagtaaacccagctcacaggcatgaatgagaatgactcacagctttgcagtcactagctctggtgacttcggttgacttttccatttctctcaggtgcctctggggcatagcaacaggagccagggagagtaaaccagtaaggagtatgggctggaagacggggtttgtattccagctccatacctcccagctgcatcaccaagaactgatctcggtttcctaagctgtaccgtgagaaggctgccatggcttagaagagaaccaccatggagccctggtatagagtagtaattttacatgtacccttttactatggaatagtgcactatttttattcattctcccactgcctcccaccatgggtgccatatygagtaagacttttttcagccataaagctcttctaagtaatcatttgtttccccattttgattattcaggattcaattgccattcaatccgtgtctctggttaccaagcagtaactgatataactgatttaattccattgcacatcaaaaaaattatagtttaacccactagttagcctatgctgtctttattatgattaaatgcacaaatactattttacattaagacatattgacagcagctcctggactccatttacactttggaagaactctttggaacctgtgatcccctggctataataagtccctgaaccctgaagacctcttagttgcaaacagtatgtcatctgtgattttacagttaayttctcacacatggaaatgactcaagaagtgtcttcagaggttattaagaggattccatagttatacaataaaatacatcctactcaagtttctccctccttcctcagcctttttttttctgagccccttcttgagatctcccctttcctgttctccatctttctgcccactcttcctggtctctggcctccagtcttcccatcattcaccaccctagatttttctgagtgccatgaacaccagtcttgtcccaagtatggaaacaagccagggaatacctcgcgccttgaagctgaaacacatcgagccaacacaaatctgttggcaggaacagcaggcacaagagtcacattcagagtacaaaaacagctatttataaagcctccttcctgatttttgggtgttcactttcccttgaaccaaaggggccactgccccctcttggaaaagatgattccatgcacagctcggtgcctgaggatcactgcgtgcctgttctgatgagcagtgagagctggggacagcatgcagcgtggattagatgtggtgacacactctctgatgggccaaggcagctgggtgtgcgggtgacacagatggcctctgcagcacctgtgaggtaacagtcaggggccccttataggacttgacatcctggcctcagagcagaccccacctgcctttgcttttctttttttttttttttttttaactcttgatgtaaacttcggttaacataatcactaagcttccaaaggtatttgagattcaagtaatgtaaaatgttaacaggtaaagtactgtcaatattattactaatatttatcaattataattcaactcttgttgcatttggccgttctgcatttctgttatacctgatttgctaaattattatttaccttagtaatccaatgctagtctattatcttcagtagtggtagcaataacaccrctaataacccagcaaatcccaaatgggattgagatcatttgttttatattttaattgagatgaacctgatgaaaatttataattcatatacagaaatgtcctgttggctagctacagttttcccaaatgtgtagttttttggcttaggttcttaaaaacttgaattagttgccaattccaataatcaggagattttacatgaaaatatatttctggattctctttcaaaaatgtcagttctgacaatacttgggcccacactcctacacagcagcagttgtagaacacgtgagtcctcccatcctgttctgaattgtgtcatctcaagttgtctggggagcttggagaaaccttggaaagcagttggtccgagtctttcattttttttttttttttttttttttcagacggagtctcgctctgtcgccaggctggagtgcagtggcgcgatctcggctcattgcaacctccaactccctggttcaagagattctcctgcctcagcttcccgagtagctgggattacagtcatgcaccaccacgcccagctaattttttgtatttttagtagagacagggtttcaccatgttagccaggatggtctcgatctcctgacctcatgatccacccgcctcagcctcccaaagtgctgggattacaggtgtgagccactgtgcccggccccaagcccttcatttttaagatgaggaatctgaggcctggtgttgctgagtgactctcatgaagtcacatgctggtgtgtttgataatggggtctgggaggcagctctgcccgctggtgcagcacagtctccactaaatcattctgccctccccccatgccatacagaacaccatcttgtgggtagcatctgtttcaccaggcctcccaatctaatgctgacacccaaggcctaactaactatgtgagttatgagtcactcagagaacctgattatcaaagtccaaaccacaaagaggaataccttcacttcaagggcttctatttctagaaataactgtagtgttctctgtgtagacttctaagcccaaataaatgttttcatgttttgacaacttcaaaagcccaatgcccttaaaacttccttgattctcaggaaagggtccccagaagctcagggtggcataggaagctgagtgcgtagcctctgctggtaaagtgaatggccagcagctagctgggtttcactgtggacatccttgaaaacaggctattcatagctgtcaggatgatggatttcagccctaaattgctgacaaacataaaagaacatttttagttagtctcattttttctctcatctgtctaatgaaaagattcaactagctagtgtgcaattgatgttattttcttataagccagggggcaattaagaaaacccagaaatagagttgagccatggtgtcactgtttgtatttgccatttctccatgtggctgagagtcccttggagcacacaggaggatcttctgcctcaagaatgggttcatctggatagttcagagcctgacaatgaacctaggagtttcatggaactggaaatcagcctcagaacagctggttaaggattagtcatctccagctgaaaggtgattgtaagaggggaaaaaaaaatggtgggccaaagactactcaggaagagagatgcagaaaaagcattccagcagccatgaaaacatcgttagttttattttcttcaaaaaatatgggccacctacgatagactccccacagtagacccacccttacccctgcagcctgtggggaatgcgtcttcttccagtgattgtgtctcctagcaacaaggaagaacagctactgagcacttactatgcattaaacacctgcttggtactttgcatttgccacataagcctcacaactttgtgagtagaaaataatgttcccattttgtagaagaagtgaaggttcaaataatttaaataacttgcccagccagtgagtggcaaagccagtcatgaaccctagcctctcagctctcagatgccatattcttgtacaatagaagatgaaacagacaaaagctcagtgccacattctgcagcaacggtcctccaayaagggctaagagtaaagtaggaggggagatagcttcaaaagagaagaaggaacattgcactcaggctctctggtagtcagggagagtgggggctgcatctcccagctcaaattgtagggtaccacgtgcctataggcttttcctgaaggctttggaaatgggtggtggtggtggtgtgctggtgttgacaaaggaaaaggaagacgaggcagaggagaattcacttccatctgtgaatgtccttatttgtagcaataaggaaatcttagagtaacctacctgtaagcttcttctgagaactgaaggagatggtgtgtgtaaaatgtttagcagagtgcaaaaccaaagggccatgggaatagaatgcattcacttctagccaaaaagtgcctgagttaaaagaggagaaatagaagcatttccattttgaacatatctaaaagccacgtcccttgtgggtcagaggttcaatcttaggtcttggtgatgctattaaaagtgtataagctcggccgggtgcggtggcctgcaatcccaatactttgagaggccaaggtggatggattacataaggccaggagttcaagaccagcccggccaacatggtgaaaccccatctctactaaaaatacaaaatactagccgggagtggtggcgcatgcctgtaatcccagctactcaggaggctgaggcatgagaatcgcttgaaccggggaggcggaggttgcagtgagccaagattgtaccactgtactccagcctgggaggcagaatgagactctgccccaccccccaaataatgggggtttggggggtggggcaggggtcttgcttgtcttattcatcacttatctccaagccctacacagcacctggcccayagtaggggtccataaatgtttaatggatggatggatggatgaatgaaaagattaaccaaaaacaaaagtgctgtctttcagttacaaagacgactgccactgggaaatcaatatcctgtgcccctctctcaggaaatggcacctgtcatctatcacgctgtctaagacaaaaacttggctatcactgtgacccctcttttttgttccgtaagctaaaataactcctaaattttagcttgtgagtctcccccrctcttctcttctaatgctattgtcatgacccttgtccaggcccttcccagttatctcctggatttctacaccacctccaatctattttccaaacttccagtctgtacctctctttccagtcccttctccacacatggaacagaatgatctttaaaaaacctaagtctgattaggtcactaccatcaccccatccccctccccagccacttgaggatggtccatgactccctatagaatttttttttttttttttttttggagatgggggtctcactctatcacccaggctggagtgcagtggtgcattctcagctcactgcatcctccgcctcccgggttcaagcaattctcccacctcagcttcccaagccgctgggattaccagtgcccgccaccatacctggctcatttttgcatttttagtagagatggggtttcaccatgttggccaggcgggtctcgaactcctgacctcaggtgatcctcctgcctctgcctcccaaagcgctgggatgacaggcgtgagccgtcgcgccccaccagattttaagataaagcacaaacccctgagtgtggcgtgcccacccttcacagtcttgctcctgtctgcctccagccttacctagccaagccctaccttgagttctgtgtcccctccagcaagactattctctctcttgcctgtcccatggcctagcttctttctttgcctgaaatgctctttctccaccttccctgtttgccttctacatccttctaagaattgggtgtccctccagctatgaactctggtgcctggttcttggccaaccacactgtggtctgcttcctgtctgtcttttccagatgtccaggaatgctattttgttctttgttgtaccaggcacaccttctctagtccctggcacaatgaatgtctgttgaattgatgaatactttgtctcacaccaaacatgcactttctccgaagtatattagcaattagcatcgctttggccaattgtgtgaccagtcaagataattaatcaaggattagggcatggtatgactctggaaaaatctattaaggacatatggggagcatatttttttcaccaaaaatcaagacacataatttaataaatatgatcacattttttcttgcccagaaaaatattaatatataatatctatagctacacatccttatctgtcatttttgcctcactatattatccaaatatgccagctcaagacactgaaataataatagctaataagtaagtagctggcattcttgatgagcctgctatacagcaatcctatgtgaagtgctttgctgttatctcatttaacttttcaactacctcttgaagcagatatttttcttatctctattttagagatgaggaaactgaggcttaaaaacattaaatcacttgtcaaaggttacacagccagcaatgaatgagtagtccgtttgatcttctcagttattctgcgatgctgacctaaccgtgacctcttaacctttattagctcatcagaagagctactactgggcaaaaatagctgtggcttccggaaacttttattgaaactctaaatctcctggcaataactttcaaaagtcatgattcaggccagcagtgatatttgaaaatggaatcacaagcaagtctcctggctacaaagatgctcttgctgccaaaaaggaatgctcagctttgacatttatgacaatctgtgtttttcctgttacttagtcttttgccatcattgactgtggaaaggcactgaccctcrttctgtcctccctggagaattctctccttcaggtttaactggttctgtccttttccatgttttcatttcactgggatctacagcaatgtcctgtccactgaccatctgcataatgatcacttggacacacataaaaatgcacaatcctgggccccgttccacaactctctcatagaatctctacagattggagccctggaagcagcactttaatcacattccccaggtaattcttataaataccaatgtttgagaaccacaggcatagtctccagatccacatgactcacagtatcccctggaccagcagcactgaagatgaggaatcttgggccctaaccctaaatcactgaatcagaatgtgcatcttcataaaatccccaagtgattagatatgcacatgactgtgcatgcagagaaccagtcatctagaacaatgtttcccccaattattttacatcatcatggcatgcatagaaaatgaaaatctatgtgtggcrcactgggaatacaaatgagaatgtttgccatggcattggggctcagcctgtcccagatcccacctggctgctctgcaggctgaggagactgacatcccaggtacgcctgtgccacagcacatgggttgagaagcaccggtctgcttacagtacacccagctcttctaattttgttcatgaggcataattcccagagcttgcttactcttactttcttcatcatttattagttcttttcatgcatactaagagtcagagaagctatttcccaaccaactagatctcagaagtcttcatacaatggaagaacacagtttcatcttcaagttctaggtagactcttggggaaatctgcagaaaagagttgtgtctattattctggagagtcatctgctacaacctaaggaacatgaggaaaaaataagagccctcttccctctgaagactgctcctttccccttcatctgcaaacctgaggagagaggattagcgccatgcaaggtggcatcctctcttctgagtgccaagaagaatgtgattttgtttaatccttccttagcaaaatctgtcagctcgtaaactggacaggtgtcccttctcttagccaacccctgataatggggtgacagttggggtggaaggaatggaataccttcagaaacacttcccagtgagaccatctgatcaaaagcaccaagtgtcaggacacaccatctgactttgcaaagcccccagctacacgggaaccccattgattgattttttttttctctcaaggaaaatgctgaaaatttttaaagctcaaagtagtgaactcttactttgaagcaaatatgacaagtcttgcccttaactgaaggattgccatggcctaagcaaatacatttgaggaagaggggaggtgattattgctaccaatcaactcttctttttttccaacttgcctgcaagtctgtatctaattcttgccactctgcttcccccagtcagagcctgggcaatgcagcacacattttagctgggttagtgtggggctatccctcctctgtcctaagactgcacatccctcaagtcttagaaggatcttccctttacaccccaaacatacccaaaagagagttctgcctgagtaatggaaaggacagtggccagagcactgtattgatatttgccacctctggcttgacttctcgtagagctctttccttaatgcagctacagagaccttcttcctgttctgaccaggaaactcggggagcagttggtagttcacccagggttgccgtgatgtctaagaaataagtggattttctctaagttccgagcaagaacagttggtaaaaaatttctattccttgatcatctgattaacaagtgctgaaaatgtaagattggggaaattgctgaaggcttgggcctcccaatccaaagaacatagctattttacatgagcatttcaagtatggaatattgagacatctctctgctttgtggtccaggatgaagaacaagctgtggtactttgaatttggcacctcggagacttttgcagcgacctgcaagaaactccacgaccacattgagttggaggtaagttcccaagtggggagaaggcttcctggatcttggttctgctcctggactgtcacacatgcacaggatgtatcctcttgggaccttaagaggtgacccagagcgtagtctctrttgtttctccatcctgttccaaaacacctccatacgctcactcagaaggctccagtggcctgtctagagaatccctggggggctttgggactcagaggccccgagagcccagagccacacttcattccagccctcagccctccttccaccgtggccttgcgattccctcttttctgagagataaagtctccattgccgtcagcacagggagaggggctgctgttggagagacaatgtcccaagcctggtaaaagtctgggaactggtgttacagggcagcaggggtggggagtataggggctgcagccagacatcccccagctgacctgccttgattttcacatctgcttcagcragctgactcacaggtacccagggtcagttttgtgggtgtgcaacctgtgtggtcacaaaatgtccttgtgcttagaagggcccttgatttcatcctatgctgtcactgtcttgaaatccttgataattttctaacaaagaasctggcattttcattttgaactaggccccgcaaattatgtagccaatcctgttggtgcacttgtgtttcactaactcttccggcacttgtaggggcctgcctcagacagtctgcctgctggctcccctcccctggttgataagctgcccacttcccaccctctcaccccacgttggctgggcttcgctccggaagccctctcattgattgccatgaggacagctccttggtgtctggccacctgaaagcccaaacttctatgcacacctgctccgtgggactttacgcccattggttctcttgcccagagttcttgctaccaggcctaccttcccgtgggatttaggcccgtagtcttcttttcacttgaggaaaataagtggaagaggcagccagagagttcagccagggtgggctcctcttggcccaccagcttggcctctaagcccgcactgcagtccagtggggcctgggcctccctggaggaggcacctgtggcctggagtggtgtaggaaagccctgcccctccctgccggaagggcccctgtgctcctcactcacagggagttttcacaaacaaaacacgaagccagaggttctgtgcggctgcatttgactcatctgcctgcctctcctcttcggttgctgggttaccaacgccagggtgggaggcgccgatctggctaatcccctgaacttttggccagcttggtaagagggcagagaggccaggcgccaggttgtgtgtccccaggtggcacacagggagtctgagaagccggtcctcctctcttgacgtgtgaacgcagtgctgggagctgaggaaggaggagaggccttggcaggggaaccgagtgtggctaacagggatatgtgtgcattttttccccttggcacagccgtctgrtgaggtctctttaaatataccacaagtgagggacagccctggcctaaccacagccagctgcaggcgcacagcgactgcttgttctccctgcagctggccttgaaattgtgcccagaatacagcaactcagctcccctgcctctggcctgccctcccggctccaggccccacagtcccctctgggtttgagagacagaggctcttcctcaaccgcagagggggcctcgttgctaaagacactggtggcctctggagggggtggggttgttcactggtctggagggagggtgttgttgggagctttcagaagcacttcctgttttccttatctctccataatgagtctttttagtatttattcatgaggattagctrggggagtggggctgagcgtgtcatgtgatgggcagcttctgacagccctcaggattggggcaggcaccatttcygtatccagagaatagcggtgaatggtcctgtgccttgtgatctagagggggactaagagagacggacagggcgaggcatgggggtaacaggtgtaaggagaccgcagagccttgcagggagatgggagagtgtcaggggcctcaggaagagctggtaagagcagctatgctaagggaccttctaaacgtggttgctgcagacaacaggccaggcctttgagaaccagcacacgacccaccagccccaggccagcaaataaccccactgaggcattgctactacatttcgccatcttcagttccccaccatagcctttatttcaaagtcacacaaccaaccctgtgagctaagtagtccagagattattatccccattttatggggaagcaagctgaggcacagagatttagaagggtaaactaggccaggtgcagtggctcacacttgtaatcccagcactttgggaagccgaggcgggtggatcaccagcggtcaggagttcgagaccagcttggccaacatggtgaaacactgtttctactaaaagtacaaaaattagccaggtgtgggtggtgggcgcctgtagtcccagctactccggaggctgagacaggagaatcgcttgaacccaggaggcagaggctgcagtgagctgagatggtgccactgcactccagcctgcgcaagacagagaaagacgccgtcttaaaaaaaaaaaaaaaaaaaaargaagagtaaactgaagggagagaaaagtccagtgggacaggaaaaagtcacgtgctttgactgccgaccataacatgtcctaatatgctatgacaacgcagcaaggcaactattatcacattttaaaaatgaggcttaggtacattcagtgtctcaaccaaaacttcattgctgaaaactgrtaagagagaagattccaggtcttttagagtgaatttagcttggaacccaataaacagagatttacctaacaggtgctagaagcagtaaagtcttcagcaggaggcactgtttcttcttccttaatatgctgatttcctctcagctcatgcagctgggcaggtgtgctgagaaatgctttgcaaagaacagaagactcagtcctacttctcatttgaggaaggaatagattcaggctggatcataggagagagagtcagagaggaggaaaactgcgttaaagtttgcaaaaggtcttcccacacagcatctcatttattttgatgcacagaacaggcagggccaatattaatgtcctcactttacggttgagggaacttaggttgacaggttcagtgaccagaggaagggcacagctgtaaggaacttagggaaacagtgaagtctatttaggtwcttcctttttttttcttcttttttttttttgccaatctggtaaaaagttggatggtgaaacttaaagctcaaatgagagactgcagggaaggtttccattaaaagccattcgcgtggygaggcgcggtggctcacgcttgtaatcccagcacattgagaagccaaggtgggtggatcacctgaggtcaggagtttgagaccagcctggccaacatggtggaaccccgtctctactaaaaatacaaaaattagccgggtgtggtggtgcaggcctgtcataccagctacttgggaggctgaggcaggaggatggcttcagcctgggaggcagaggttgcagtgggccaagattgcaccactgcactccagcctggggaacagagcaagactctgtctcaaaaaaaagaaaaaaaagaaagaaagaaaaaaagccattcaggcgatatacaggcgatttctctgaggctagtggctgtttgagaaggaataggagacttggtctcatctctgaaacgaagcttgtggccaactgggccaactggacaaaagagaaactgaagggagtccacagaacacacaaaagckgttcaatatggcgcttgcttacctagcgctaaggaaactagatgcaaggagtcctgcagagccacgtgagtcaaatcactcctggccctgcctgtgactcaggcaggggagaaggtgactctaaatctcctgctcacctgtagacacatggccagggccctgacttggagtcacaaggcctggcagtgagccctggtctgtgcttaggttaagccacttattgaactgtatatctgagcctcagtattctcatctataaaatggggggcataggggttagtctacctcccaaggccattattaggattgaagttttcagggctttttgtttttgtttttttatgtaactggcagtggtgctaagtgcctcatggaatctgcaaagcagccctaagtggcaggtgtcataatcacctttccagagaagggggacacaggctgagagaaggtaagaagctcacctgaggtccataacctacaagtgatcagatcagscttcaaatccagatttgccagacacccgagagtttcggggcagtactggcacttgagaakctcagtctagagcagagactctcaaccaggtttgggcatatccaatgtccttattcccagtctttattttgacatttcagataacgtcaaaagcaggaaataattttttccatttgtcaaaatgggagcataaaaaaatattgcaaacgttcaccctagatgcttcttctatgagaccacaaaggaaggcctgtgaacgtgagtgctgtacctggaaactgggtgctccataaatcattgtgggccctaattaagaagccagcatgtcagctgggtgcggtggctcatgcctacaatcccagcactctgggaggctgaggtgagcagatcacctgaggtcaggagttcgagaccagcctggccaacatggtaaaacctcatctctactaaaaacacaaaattagctgggtgtggtggcacatgcctacaatcccagctactcggggggctgaggcaggagaatctcttgaactcatgaggcagaggttgcagtgagtggagaccaggccattgcattacagcctgggtgacaaaagcaaaactctctcaaaaaaaacaaaaaaacaaaaaagaagccagcatgtccccacacccccaccctcaccctcaccatccctggtctaaggcagtctctcagggtactcctctctgacatctcttcccttccagaggctcttaatattcattctaacctgatttcacctgattaagcaggtggggggtggggcgagggaggcacacagtgagtcacctcccccaccccaggcccagaataaccttgtagaggtttctggatgggatcataggtagagcaaaccagacaggcttcaactcaagcacttattttacattttgtagagatgtttcatttcactggctaaaaataagaacttacaaaattccttgtttttttgttttgttttgttttgtttttttgacagagtcttgctctgttgccaggccggagtgcagtagtgtgatcttggcttactgcaacctccgcctcccaggttcaagtgattctcctccctcagcctcccaagtacctgagactacaggcgtgcaccaccacgcccagctaatttttgcatttttagtagagacgggatttcaccacgtagggcaggatggtctcgaactcctgacctcatgatccacctgcctcggcgtcccaaagtgctgggattacaggcataagccactgtgcctggcccaattccttgatatttaatccaatctttaaaacatattcacaagggaaggtcagccagctccactaatatgaactaatataaactttgatggaggggaagtaagtccaaatctggaagctgctcaaaaaaaatatctggttatccagtatattttgggaatctctgcacatcaattactccttttaattgaggattttttwaattttttttttagtatttattgatcattcttgagtgtttgaggatttttttaatacagaaaagtcttgagaatagtatatcaaatactcccaactccccctcactcagaattgatattgtcattattttgtcttatttacttcaactatttttccattttttgttgttgtggttgttgttttggtttttttttgagatggagctcttgctgtcacccaggctggagtgcggtggtgcaatctcagcccactgaaaccccttcctcctgggttcaagtgatcctcctgcctcagcctcctgagtagctgggattataggtgcccgccaccacacctagttaatttttgtatttttagtagacacagggctttgccatgtttgccaggctggtattgaactcctaacctcaggtgacccacccaccttggcctcccaaagtgctgagattacaggcgtgagccaccgcgcctggcgccttcaactatttttcaacagaagaaataaaatattacagataaagctgaaggccccagcctctttatgctccaaacttaccttttcactcacctttatgttcttgagatcactccatgttagtgctgatagagcaggttggtcacttttttttttttttttttttttttgagaaggagttttgctcttgtcgcccaggctggagtgcaatggcacaatctcggctcactgcaacctctgccttccaggttcaagtgattctcccgcctcagtctcccaagtagctgcgattacaggcacccaccaccatgtccagttaatttttatatttttagtagagacggggtttcgccatgttggccaggctggtcttgaactcctgacctcaagtgatcagcccactttggcctcccaaagtgctgggattacatgcatgagccactgcacctggcctggttcgtcacttttaactgccctatggagttccatgaaaacccagccactatccgtgacgaggagcagaaatgggaactctcagacactgctggtgggaacatcagtggtaagccactttggagagcggttcagcaatacacgccaatccgaaaatgcatttatagcctatatgacccagcaagttcttctcaacatcgatctagagagtttctcacacatgagcatagaggtgcaatgcaacatttttttattgcaacaaaatggaaccaacccaaatgactatgttattctaacactttaaaaagacagtgtgactaaatgccactgacactttaaaatggttaaattttaaaaaatttaatttaaaaaaaaggacgtgctgggtactatgctggtgatatttaatccatatcaccatatcaggatatgggtctcacctatgagaatccatattctaaaactaacatttagcacaaataatgagtcagattactgtcctttaagattgggcagatacctttagctattccaatctaaaccagcgccattattattattattattttgaagcagggcctcgctctgtcacccaggatggagtgcagtggcgcgatctcagcttactgcaacctctgcctcccaagttcaagtgactctcctacttcagcctcccaagtagctgggattacaggcacacaccacaatgcctggctaatgtttgtatttgtagagatggggtttcaccatgttggccaggctgatctcaaactcctgacctcaatagatctacctgccttggcctcccaaagtgctgggattacaggcatcagccaccacacctggccagtgctattatttttaaaaaagagacatcaaggacttcacaggttaagtaccttgactaacttcacccaaaccagtatgtgcagaagagaactcacggctcttaagctccagctgtgggcattctctactctgtcttagcatccacctgcagtgctgcacactcttaaactagagggaaagaggtcttcaagtcttggtctctcctgatatgatctgaaccttcttctcagctaccacaggtagagcctttccctggagtaaggaaagtaggaattggctgacgtacagcctgtccatgccgccacagtggaagaaatggaaacacgcatggggaagggaaagttgagaagagcattagaagggattttgagttcgtggaaaataagagggccaacctgattacatatcaaaccatggagtcaaaagtaaggctagaatggtcctgagagagctcctccttctagtttattccccttcctcaatccagtccagcagctccctcattccagcatcaccttcactgtgagaccatccaaggcagctcctgccacttctggttgcttcttcttgcccattcaccggttctcaccacttggtttctttctgcttcctcctaatcggtttctttccgctactcctaatatgtgggctaacctcttttcccgattacaaaggtaatccaaattcatggcagaacattttaaaatacagaggggcaaaaaagaaaataacccccaatcccaccaaccaggaatcagcactgctacaacattggcctcgtttcaatcttagggtaatgttagcccttgtttctttatcatcaggcctcctgaggacctctgtgattctttggcttattaaatctttattcatttttaaatgcagctccatcatccccatctctgtctctttcagtcgtgcactgactacgagtttccttcactaatgcttagaatcgttcagcttactaaagaaaaactgtttctgtcaactttcccttacaaaattccattgtttgcttgcagtttctggcacataaaactttttctttttcttaaatgaccctcttttttatttcttactaatgtgcaccctgtagttcacttcaagcctctattcattcatatgcttttattttccggttcttttccatttcttttgttctttgtgaattactttgattttcttttgtcttcagactcctggctctatctactttgtgtcttccgtggacttagaagtaacttttaaagattatgttttatgcctacattttcacaaagtagttgttgagggatatgcagcatgtttmatagatggggcccaagaaagtctcagaagaccaaagttgggggtcaagtgattcagcatgttgggtcagaatgctctcccacaatacatttctttctggaagatcctctcagccaacttctgtcccagccycaggaagcatatgtcttctaccaccaaggtcccttactaaaagaataactttccccaagcaatgtctaccaaacaaatgcatcttttaagtaataataaactgcgaggccccatcagtgggaaatgacctagactttttagaatattcagaggaattcatgatcttcatcaccacacatgggagatttgggaacctcagggaagagaaacattacaatccttttcttcctctacaatcacaggttattaaacagagaatattatatacaaatatgtcttgttggctatagtggatatgtctttgtttttctaacttmtcctgtgaagtcataaacttactaatcttagtcttcactagaagaggaattaagaaggtagaagaactgaatctttaaagaaggtcatagaatctacaaggggttggataaataccactgtgcacacacacgtgttatatctcaagcccattaggctcaacaaatgaataacaatagcagcaacttactgagtacttaccacgtggcaagctctgtcttatttcatctttataacagctctgcatggttgtgtattattcccattatttacccaaggaaactgcatctcataaaacaagtaagtactcccaagatcagatgagtttcaagcctcaatctgtgatccccagcccatatgcccttcacaatgccacgggacctgcagtaggagatgacctctgcattaccttcctgcttttagaaaagtcatgtgtccatttagttgataaaggggctcccattcaggacttggcatatctatcaggcagtcagctttctgaagcaaggactttatcttattcattctatacccctggactgagcacaatgcctaaaatgaactaattcctcaatagttgtttgttgattataaaattgaaccaagtatagggaattccacaattggtgtgaacattagcaatgatcacttggccagcctcaagtcccgcctttttcttggaagctaccagaaaaaggggcccaccttgctgcatttgtaacacaaaggggaagatggctggcactcatgccttctcctaactgygcagtgagtgagaaggcctcccacgcccatctctaggaagctattggtggtatctttgatagtagcagagggtccgggacaactgtgaaccaggacaggaaatgccaacattctcccacctctttcccacccaacagaattaagacagtgagtgggcagagctcatgtggcagtgagggtgccaggtggctgtagggtggaagtcaccctgcagggcagaaagggtctccattctgagccctctctcatggctcagaagcctacctgcccatgatccctgctggcccccaggccatcaggccctgctttgtctgcaggaaagtgtgatccctcaaaaagccccatccactccaggttggcctcagcttcccagacagacagcaaagcctattaatctgcatccagagcaagaatcccttaacacactagtttaaaaaaaaaaaaagaaagaaagagaaaaaaacacctggggagggtggagcagtggataggaaacagctttgccttctgtccaactctgaagcaacccatcactgtgaactctgagaaacagcagttttgttttggaaactggcacccagtgccggctcactcctggaaatgaatttgggcacccccacccccagctgcaatattctacttccagtctgcctgccaacacccccttccagctgcccctctcaaaggcaccattgtgcccgcctggcacagcaacagaggagggctaaagaggaagaaaacattttctgcccatgggatgttcttaagcaggttgtgtgtacatggcttcaatgccgcattccttgagcccacacaaacccgccagaactccatcatccctgtcacagatgcagccactttccagtctaactggcccacctcagctcactgtcagagaactcggagcacacaccagggcggacaaggctaggtggaagtggggggtcaggatggcactctttcagcacagcgcacactagcctgccaaaacaaagctgaatgtagatgtggaattttggaactggaaggggatttagttccacttaccactccacaaaagactcatcctagcacattctgataagtgggcacccagcctcctcctgaatactccaaagataggaagctcactacttttcaagaagcctgctgcgttactggacagctctgatcttcagaaagttcttcctgatgttgaacaaggattgtgtgtcccattccttgtcatcttcttccctagacagcacttagaacaatacttggaacaaaatcagtgcacaataagtgtttacggggtgcatgactgaagtcttcatccactgggcccattttcaccctctaggggcacacagagcatcctccacactcctccacatggctgcctttcatagsgctggagatgtatcttcatggtgtctccttttcatcttcactgagctaaacagcctcagttccttagaggacttgatttatagacccacaaatatcctggaccactcttctcttgatacactccatttttttcatggtccgccttaaaatgaaaaatcaaattcctgttctataatactctaaatgcgatctcataggtaacaaagcacaagagtaagaggcatcgggagcatgcactctgtaagttgggctgacttcttgatctcgtcacttgcatctcatgcatgaaacccgcaggttcatgaggactatcatgaaccttgacaaatttggaaagacattccttccttagtgtcaccgagtcaatgtttcctcatctgtaaaaatggaaatacaaggccgggcgcagtggctcacaccctgtaattccagcactgtgggaggctgaggcaggccgattgtctgaggtcaggtgttcaagaccagcctggccaaaatggtgaaaccccatccctactaagaatacaaaaattagccggatgtggtggtgtgcacctgtaatcacagctactcaggaggctgaggcgggagaatctcttgaacccaggaggcggaggttgcagtgaggcgagatcatgccactgcactccagcctgggctacagagcaagactctgtctcaaaaaaataaatgggaatacaaatactgacattgtagggttgtgaagattagacataaaatatataaagtgctggttcacaatagttactcaataaatgatatatattaataatatataacatacgtgtggattaatatcattatctaactgcccacaatagacatcagctcctaaaatgatataaaccagcacctctgaatgcaggagaagccactgttctgtaagagttgctacaggccaggccagtttgtgtatgtggataatactggactgtcctgaaagccaggcgtggtggctcatgcctgtaatcccagcactttgggaggctgaggtgggcagatcacgaggtcaagagatccagataatcctggccaacatggtgaaaccctgtctctactaaaaaaaatacataaattagctgggcttggtggcatgcgcctgtagtcccagctactcgggaggctgaggcaggagaatcccttgaacccaggaggcagaggttgtagtgagccaagatcgcaccattgcactccagcctgggtaacaagagcaaaactccgtcttaaaaaaaaaaatactggactgtctttccaataatgttgtcgccactcaatacatcaccttttcttcctttctgagccacatcaggttattgacactagaaacattctctctagtttttctctgcggaaaacagatattgttgtttgccctgtttttctttgactcccagtactttctctattatggccataggccctgcagacatgcaggtaactacttccttttcttccccgttgcctccagccagcagtgtgctagagcaagcttgcttgctggtgtatctcttcccaacttgccttttggtgatgtcatcatggtcacttgaaattggccatagtaggaatattgacaccaccatggaacacaataacaaaggctttttttcctccaagggagtctgctgttaagcactgacagcacaccactgcctctrgtattgacccactggaagtaccttgaggacagggactgtgtcccatttctgctccatccctagagtctagcacagaataagtaggttctcatcattcttgatagatcagtgagtactcctgtcttctgcctcttaatgtctctctcatataaaacatgccccatgtgccctactcttgttacctattcaggtgttcaggtatggattwccttcagctgtgatcagaggaccacttgatggagacttggattaaccttccatgtctctccctatcctggaaatttggtccactttatttgttcactatattcatccagagaggttgggggaactcatacggaagcaaagaaaccttatcacgtttcttcaaagaacacctgggtttccattttaggatttttgcacacattatttctttcaactcacaaatagttatattggacacctgatatgggtaagacatgccaggaactgtgaagaacacagagctgtcagatatggtccccgccttctatgagtttaaagtctcctaggggacagacaactatgcaaaatgcatggcagaatatacattccctttaagaggagaaaacaaggcagtgaaaattcagagaaggggaagattcatttctagcaagagcattgaggaaagcctcatagaggagaaagcttttgagctggaagggtatgttaacgggcataaaagagytgatgggcagtttaggcagcgtgtacrgcagaaaacaatgtaagtagtccgcaactctgtggcctctatgcagaattcaggctactataactgacatttactaaggctcagctaaccctctccctcagctactctcctatgtccaaaccaaatgagaccctacggcatccagccttcaccgtagtctgacttacattccaacctgccaagctaattcacagagagaggctgctccccgcccacggtatcagaaatgctctcgctgtaaatgagcaccactgcctcrttcttacctaagtcccacaggccccgggggctgcacagrgtggcttattggtgctttctctttccctatttcctgccagtgtcctgttccctcaaaaaagaggcagtgtgcggggtggtgggggatttcactcaggtctaggtcagycacccctctgccttttagggtctatctgcggctctgatctggagcccaggcatcaaaggaggccaccgtcatctcctgcccatgcccctctcagcccatcagaacccctattcaagtgtgtcaggatattgtccgcctcttcctcagccctctctcttccttctcactgtaactgaagtgctattttccccrgacatggcccagcatttactacttccatcttcaaaagagctaccccccggccaactctctcactcgctgagaaaggaaggaccctggtatcgtccccagatcaatgtcccagcactctgttcagcatcttctctttccctctatctacttcccatcctaggcatcccaacttcctcttctcatccattcatccaacaagatgtattgagtatcttctctgcctcaaacatccacaaaaaaaccttttcctcaatcacattatccttttagatcccatcttccctctccagcctgtgtgccaccaaaccacacggtgactctgactctgttccctcactaccaccacccgactcaccccagagtccctggttaagccctatctctcccaggagagagctgtgtcatctaggaaggtcaacttaccaactttagacctcactgttctcattttggtaattaggaatgatctctaatgtcccatgttgctttcccattctaagattctgtgcttcagcccttatccaatagccaaaattcctctttataaagttactcatggcttcttggttgtcggtccaaacaatcacaggtctaattctggatcagctcactctaattagctaagtaacattgggccattcccttaacatctttagcctcagttttctcttctataaaatgagatatttggactggttcacctttcaagcccttcaggtctttgattccatgagattacagatgcagagaagagaaaaaggctgggcgcagtggctcatgcctgtaatcccagaactttgggaggccaaggcaggtggaacacctgcagtcaggagttcgagaccagcctgaccaacatggtgaaaccctgtctgtactaaaaatacaaaaaattagctgggcgtggtggtgggcacctgtagtcccagctacttgggaggctgaggcaggagaatcacttgaacctgggaggtggaggttgcagtgagccaagatcacgccactgcactctagcctgggcaacagagtgagactcagtcttaaaaaaaaaaaaaaaaaagaaagaaaaagagagagagatccttttaagagactatacgagaaataatttatggagaaaatagcatctgtagagatttagaagaaaggtacagggaaggtgctagggtatcctaccattaggggactatattaatgggtcaagacaagaactgtataatagaaggtataggctgataacacctgaatccactgatcagtctaaaaatcacaaaaaagagacaaccaaattatgtgcttcctaatgagatgcaataggaaatatacagccccactaataaagtaatcttgccaaaaagccaaccctaaatctagtcaagcctgtagatctaaaaataccaatttagtgaaaatacaagggatagactatgtttaaaagacaccccagagatgcagttggcaaaatccagaatctgcrcaacactacagccttactactcaaagtgtggtccacggacctgcarcatcagcatcaccaagaagggggtcagaaatgcagtctcgggccgcacccagacctcttgaatcagaatctgcattttaataagaccctggagtgatctgcatgcacattcaagtttgagaagcactgctctaaggacaaatgacccatttcttcaataaataaaagacaaggagaaaaaagaacaggagtctatagatcaaaagagacctaacagatatatatcaacaaatgcaatgtaaagacttttcaggcaagctaacaatttaaaaaaatgatactatcaaggaaatttgaacaactactggatacttattaaagaattttttaaagagtaacaatagtattaaggtaattcttttttttgtttgttttttgttttgtttttttttgttttgctataaactagttcagtctggtggtgataaagtgaactggggtagagttaaaacaagattagctgcctgttgctagaggtgctaattacccagactgggttttggggtacacgggggtttattatactctctgctttccctatatgtttgaaaatacccataatttttttttttatacagagtctcgctctatcgcccaggctggagtccagtggcgcgatctcagctcactgcaacctccgcctcccgggttcaagcgattctcctgcctcagcctccagagtagctgagattacaggcgtcccccaccacgcccggctaattttttgtatttttagtagagacagggtttcgccatgttggccaggctggtttcgaactcctgacctcaggtaatccaactgcctcggcctcccaaaatgctgcgattacaggcatgagccaccttgcccggctttttttttttttttttttttttttaaagaaagaccaagaaagagtcgtggaagatgggagggacaataactcagtgacagggtacccaagaaagagaaaattcccagcagaaaggggacacatgcctcccggagctaccgagtcctggcttccacctccgatctggcctggtggaggtcattcctgagagcagacaaagccgagtggcaggcctataaacagaaccgtctgcgtccaaaccaaatctgtggcacggtgaatcgaggttagaagaagggggaatttcctagttgctaaaaactgaaacaggtcatcaaataaattgtggaatctccttccctaaggcccttcagaaataggatcgacagggctggagtggaggggcccccgcccgccgcccttttgaggtcacggcgcaggagagaaggagggcgcggaaacgccggcaccggctgggaagcttcggtgctccgggtccctcttggcgagggcggagaagtcggcggcctctgcctagaattctgtgattgtagggatcgagacatcaagggcgggggtgcagaggattacaagttccctagcgcgtctcatttgcacataaatgtgctttgcctcctaaccttgtctctgttacctgtgcacctgccttccaccaaaccaaccaaccacccgtggctcaggaagaaaccagaactggggggattgtcttcccaagggggacacagttgaacgtggccggcagcctctggcctcccgggcctgggttcagacggactccggcgctgcttccaagcccgacatcgggcacctggccgccggcgcacccaggagcacgatttcawgcgtgtgcacgctctctgctcgggccaggagctctgtttcagccccactccgggctataaatccctggttccgcccagcgcagcctcggctcggagggcagcctgctagccaggtcctgggttagggatggcccacggtgcgcgcggggaccgccacactccttagcgccacgctggggccgcgcgggccggagcagggggagggggcccgatgacgtcatggaacagttggaggatttagctcgggaacccgccggggagcgggccccggggccggcgttccatttaggccgacagcgtcccgggctcggctccactttcccagacggcacggctgccttccacgtccagagcgggcctggggttctgaaggaaatcagtgcacgatcgcgaggccaggaactctggagaatgggcacgcaggcgtgcgcttgccaaggctcttaccagcctgggtcgggccaagaggccrttaagatgcctccagcaaagcctcaggtagggggagtgaattcaggaagataaatgcctcatggcacagaggttggggaacctgtgatgataacgcagacagttacacagtgctactgcattccagacacccatcaacccaccccttaaggcagatgttattcccctatcctccattttacagatgacaaattaaacctcagaggggtaaggaaacaacctggaatcacaccgctggcaagtgacagagccaagatttaaacccatgtctctctgccttcaagcccaggcaggcacgttctttccaagacactacattggctctcactttccaagtaggtgcattccaagagggagggaggacatcagcgtccagcagacyccaggcttctcccatctcctctacttgccctatctacatgggacccactgcggtaataggggaaggggacaacctagaaagcagagtgaggattgcctgctcttccaggaagaggtaaacgtttaccaagttaatagcaaacacacttagctggctatggatagagatggaggggacagggtacagttaaaactgtagtacggaagaaaggtgactttgtggaatactatttgtcaaggactgtgctggtgatgtacttttttaaaaaacaaacctggtgcggaggcaagatataataatattaatatccaacaytgatgtgccaggcattgctctaagcactctataagatagagcagtagtgggagatctcaattattcaaacagctggaagtttaattttgctataagcctagcatcagcaaaaatcccgatttgcctcactgactcatctccagcgtaggatctggcatctgccttcctaggtttgcatcctggctctgccatcttgtagagtrggaagctrtggagccttgagcaagcatcttaacccctaagaggccctgtcagttgggggtagcaatgctgcctccctcatcatgttcatgtgaagatcgcaagagatactatgggtgaatcccagcacagtgccctagaaagctctcaccaagcatgagttgctaatattattcttattactgctcagaagggaaagggatgttttgaccaacagtgaataaattgagatgatgtagaagcaactacagccaagatggggaagtggctgcttcatctagagggtgataaggataaaagaaaatgtgggccaggcccggtggctcacccctgtgatcccagcacttccggaggtcaaggcaggtggatcacctgaggtcagttcaagacccggctggccaacatggtraaaccccatctcaactaaaaatagaaaaaaaattagctgggcgtggtgacrggcacctgtaatcccagctacttcaggagtccaaggcaggagaatgacttgaacccgggaggcagaggttgcagtgagccaagatcacactaccgcactccagcctgggcgacaagagcgaaactctgtctcaaaaaaataaataaaggaagaaaaaagaaagtgtgatccaatgggactctagcctaaatctctaattaggaatatgtgtatgaaggataggagggtagaagacattccaaaataagtttctaagaagtcatgaatcacactgaaaagaaaagaaaaaggagtcrgtttttgtttttcaatcaatgtgacagcaacagagagtgttggttgagcctatgctttcaggaaactgtacacatacacgcaaaggcagagcctgggcatgcaaccaggtaggaatacacaaaagcaattcagacctgtgagcctggcttcaggctaactgaaggcccagctgaatgctagacaacgtttgaagygaaaaagaacatagaaagcatagctcaacaggactgtgccattctggaagagttttcatcttttccaaagagagtggccttaaactaaaaatggaagaaaagatgccaaaggtggatactagaacccaaggtaaatcaatggagaactaactggctttgaaacacacacacacatttgaatccaagttgctggacaagcctgtaggtgtcattcaggggccactttgacaaatccagaaaacagagtaggttctagccaataagaggcagacaaatatggctccagtgttcaaaaaataagaatagggtacattttggaaaccacagactgatacactttattctgatccctggcaagattctagaatagattattaacaaagtatttaggctttgcacacagatattggtgacttagttgagttatcttattgcttttctaatagagrttgtagggtggtcacttaggaaatgctgtttgatctcggcacaatgttttatgttttcatggaaagaacgcaggattgaggtctggagacctggatacatatctagctccaccactaataagtcagatgaccacagagaagtttcttaacctcactggggctcatttatgaaagatgaggcatgaaagatgagaggcatcttcccttatgtgcctctcatctctaaattccatcatctgtctaataacaaaaagtaggctgggtgacagtccagtccagaagatgcagctccgatagagcagccataccccaaaggatgttaacgcataatgtttggtgttaaactgaccaaggagagtgctcggtcactgttttttccttttatgcgcacatattaatgacttaatccccaaatgatgggaacgcgatgacaaaaggtcacagaatgaagattggaagtaagctgggtagactagaggaaacacgggctgagagccagatgaaattarttaacataaatgtaargttttatgtctatgttattttttaaaatctacacaggttcagaatggcgaagaactggatgaaaaatagatcatgagatgatctgggcaatgaagatgaccacccatttaagctgaagtgatgttgtcatctagccactaacaaaatggccagtgcaatctttatcaattggataataaggataaggataatgatartggataacgtgctgaactcttacatgagctttgcacgtcatctcatttctggggcatgatagtatcataaaatttcagccacaagaagtactggtgtggtagccacctgcccccattagatcccgtcgttgatgtagttttcaatgttgggggtcttgccaaatagcagggtaacaaactagagtgtgtgcaaaacagggaagccgggatgggaaaagatctgaaaaccaagtctcatgggagaagatgaagagagttgacagtccagaggtggcacaacctggtagtagtgtgagagggaggagaaataaaaaacttgggctctgactacctgcccttaaatctgtgtacttccacttgtaagttgtgaactttgggcaagttacttaacctcctctgtgcctcagtttccccagtgtaaaaagaggatagtcatagtaactaacttataggattattaggaagataataaatgagatgtgtataaaattgtgtgtggtagatrgcagtgctgaatacatgtgcacaatggtgatcttcatcatcatcatcatctatctagggggtggcctatggaggaggaaggagggtcattctgtatgggttcagaagggagaacaggaccaactggtggaaacaagagtgagagagaatccagatcaacataaagagacctctcaaattatcagaacttcccagtgaaaaaatgagttcgcagttaccagagttgctcactgtatgccatcttgtagttggggaaacaagataacataatgtaagaactgcaaagaaatcaggaggtgagtcactatgaatggcaacaagtcttctagtcctgctctgttgataagtctctggaagtttgggtttgtacgtaacctcagagatagtgggtttttattgtatgcctttgattttttctttctcccaataaacaacataaagaccatgtactttgtactcaaatcccccaactttgaatccctgctctgttatttattagctgtgcaagcttggataacttagctcaagtctctgggtccagtgtttgcttctgtaagtgaaataaactacctactatcctgaggaacaaggatcagagctgatatttcttgctgtgttggtaagcacgatgccaaagtgggctgactttatagacatgtgagatgaaaattcaagccttctggctttttgtacctggtggggactgcaagttgtggagattggataaagaaactctgctccttcagcaaacacatatgccaaaattgcatttatgatacagatacaggagacaggcagattctgaaagccttccaaagcttaaagtcttgtgcttctcacagagagataaaataggagggggcaaaatgaaaattttctggccaggcgtggtggctcactcctgtaatcccagcactttgggaggctgaggcgggcggatcaacaggtcaggagatcgagaccatcctggccaacgtagtgaaaccccgtctctactaaaaatacaaaaactagccaggcatggtggcaggtgcctgtaatcccagctactcgggaggctgaggcaggagaatcgcttgaaaccggaaagtggaggttgcagtgagccgagattgtgccactgcactccagcctgggtgacagagcaagactccatctcaaaaaaatatatatatatatgaaaattttctgtcatttgttatgttctgaattttctgtcatttgttaggttctgaattcagttccactaaatcttctaatggttaggaaggggcaagattgatgataatgagattagactggagaacagtttgacaattgacttaagaaccagccctaaagcacttctagacctaaagatgaccctggagcctgtactgtattccccggagctgaccaggactggatctgtcatctcaccacagcagtcaaagcattaagtctgagcgactttgcccatgatttctcttctgacagtggcagggtggtggctgaggacctgtcacatcctttaagagagtacacacacacacacgcacgcacacacacagagcaccttgggttgtgacacactgaggacactaacagatggccttttctctccgtcctccagtgtgatggggttggggtggacctgagcaacatcttcctggaaggcattgccattctcaacattcccagcatgtacggaggcaccaatctctggggagaaaamaagaagaaccgggctgtgatccgggaaagcaggaagggtgtcactgaccccaaagaactgaaattctgcgttcaaggtaagccaggaatgaggataattgttttaggtcaatgcccagtagtaggtgccctcaggtggatgtcagcaggcctcgtaaggccccacagcccagcaaggactccatgctctgyggatatgctgactcgtcatccgatgttgcaaagtttacaacttaatccagaagacaaaaattcacaataagggtgtcctcaatgacagtcagttgtcaagctgtggggctccatgaggttcagagtcaaatgctgccaatgtcaaggttaccagggttctccaatagctaaatccaatagtcagttcctaaccctcatcttgccacagctgtcagtggcatgtgacccagctgatcactccctcttcctggaaacgcttggtccacttggcttctaggacttgatttgctcatggttttcctccccgctcactkgtcactccttctcggtctcatttctctctgacctcttgatgctggaggatccccaggcagggtccttgaccctcttctcttcackgtctgtacttaagcccttgatcaccccatccagtcataagactttatttaaataccatgtgcttactcatgatgcctccagcctgtctccagctttccctgagctccaggctcctatgtccagcagcctgtgtcatacttcccttatgtgtttagcagacacctcaaacttggtatgtccaatgcagagctctgctgtccctcccccaaaccttctccactcacagccttatttctctccattggtaactccagccttcccatcacaagagccaaaacgcttggcatcatccttgactcccctttttatctcacggctcacagccagtccatcagaaaatctgttagctacttttaaaaaacatccaggattcaaccacgtctcaccacctgcattcctgccatcttgatctgagccaccatcctctgtcccctggattactgcaaagcttcctcactgggttccttgcttctgtctcactgccctaggtagcctgttctcaccaccacatcagagcagtcaggttatgacactcctcttctcaaaatcctgcagtggcttggagaaaaagccaaagatcacgtggcctagagggccccgtatgttttggcctctcattacctcccagacctcctcttctgccactctctccatcgctcactctgcctcctccactctggttcctccaacacagcaggctgctcccatgaaccaactattctttctgtctggaacaactgggtagtatgctttagaggccaccagctgggccttccacttttaactcaccagaatacaaacacagctttctgagaatgtccttaaaaccacctctaccccagccccaaaagtagccattttccaccagtgatccaaatggagagattcaatcaaagctcctggcagctgattcccctgtgggctcacgggtcctcacaggtcctcaatggacaggtgagctggaggagaaagccaggtgtaaaagcgctggcagaaacaccataccagcaggcaggagacaaaattctagtccaagacctgctactaacctatttttggcaccccagttttctttactgtaaaaacaatatcttgtatcaaagttttgataggtggatggatggggttgaaccagaaccttggttcttaaaccagctgcttgttgaaaatgaagatttgtggaccccagcctagatctacctaatcaatctctgtgctggttcctgggaatctcaattttaatgagctccccagatgactctgatgggctgccaggtttgaacaccattgctacaggcaaatgccctcagtctctcccatgcctggcattccatggctctgcgtctgtgtgctttgatgttccaggctgttagtgctaaggtgggatgtgatcccaccactagaagaaaacaaaactccrctgacatcaaggcgggggttggggaagttattctcttgtttcacacccgtctatttgacaatcagattgttatattccaggccaggtcatcaggaaacatcatctccacacctctgtcctttaagagaggattcaggaattgttgacctctttttttttttttttttttttttgaggcagagtctcactctgtcacccaggctagagtgcagtggcrcatgttggctcactgcaacctcctcctcccaggttcaagtgattctcatgcctcagcctcccgagtagctgggattacaggcgtgcaccatcacgcccggctacttttttctatttttaatagagatggggtttctccatgttgaccaggctggtctcaaactcctgccctcaggtgatccacccgcctcagcctcccaaagtgctgggattacaggtgtgaagaaccatgcccggcctctgttgaccccttaagtcccctttatttcacacagtaaacttttcagtgtataaagctgaataatgtgttcctccttcctcccttggcaggggaagttgtgggtgctaacagagggtaggggaagcattgaaggttgtatcaagttcctgcaaattttcctaccctggtgctcctatctcaacccccgctstggtatctagctccctcagagcagagaagrgaatgagcagagctgaatccccaccaccaccctccctgctccccacttcgactctccaccaccctagggctgggggaagctcttgatgagatcatgtgctgatcaaggacaaccttcatcttcctcttacatgtctgaccttacatcttccccttcttcaagcaagaccaaagtgtctgctgattgcttttgactatcatgtacaggaactctcttccccaaatccccctttctcacccctacaatgtgctttcagagctagaagtgaaaccacttcctgttctttagatgaggacatcagctgatcagagtggggcactgacttctgggctttgcagagatgccagcactgagctttcttcttgaaagggctatgatctcatgtaagttgagttgttaatgggaaaagctaaagaggcaacgtattttagtgaaaaagcattcgcctgggagtcagaagactggagttccagtccagactctgcctgtcgctagtgtgtgacttgaggcaagtcctttccccttcttgggtctcagttttctgtatctgtaaaataagcaagtctgacaattatattttaagattccttacagttccgcaaaattaaggcatagtcagattttggtctatgtggactctttcttggacagaattatattcaaatttctaccttctctcastgtattttgtcccgggatttataggctactggctgaggaggcagagagctctctctgcagcctcttcatgtgttgcgattcttaactccttggcagtttcattggagttggaggagagggagaaatcaggacacagtaggagggaatgagcttatcataggaaatggaagaggaaatgatgatgggaggggttgctctcaaatctctcatcaggccgggcgcagtggctcacacctgtaatcccagcactttgggaggccgaggcaggcgaatcacttgaggtcaggagtttgagaccagcctggccaaaatgatgaaaccccatctctactaaaaatacaaaaattagccaggcatggtagcacatgcctgtaatcccagctacaagggagggaggcaggagaattgcttgaacccaaggggcggaggttgcagtgagctgagatcacaccactgcactccatcaaagattagtctttctcctgggaaaaacaatccgagtaagaaggtcattcaagattagcatggaatgggttctatagaaacattggctgataagaaagcaataaggggtattgggaaaagccccatgcttacagttagataatctgggtttaaattttgcctttatgcttctagttttatagatcttgggaaattacccaaccrccctaagtctcagcttcctcatctgtaaaactggcataataatacatggcttattaggaagatgatggatgtgaaagtgcctggaacatagtataataagctcaaacctaaaaaaaaaaaaagtccctacgcctataattctattttgtgttggagaatgccagttgattcacatttgaagttcttgtcctaagcattactatccacctgcactaccactaagaaagagcagagctcagccgggcatggtggctcacgcctgtaatcccagcactttgggaagccgaggcaggtggatcacctgaagttgggagttcgagaccagcctgaccaacatggagaaaccccatctctactaaaaatacaaaattagccgggtgtggtggcgcatgccagtaatcccagctactcaggaggctgaggcaggacaatcgcttgaacctggaaggcggaggttgcagtgagctgagattgcaccactgcactccagcctgggcaacaagagcgaaacttcatctcaagaaaaaaaaaaagaaagaaagaaagaaaaaaaaagaaagactagagctcctgccaaactctagcccagcctttgtcgtagcacattaaacttatattaccaattgtacctactatctcctttcctagacctttcagattccaaggatggaggctggttgttattaatctttgtatccccagtgcctggcctcaagtagttaccccgccccccccaaraaaggttcttagctacatgagaagcatatggaatttgctattttttagtttttgtaacaacaataagaatagtgagaaacagtctcttgtatttctatttcattttggcttgcaaataattttgcatgtattaacttagtgtaatcctaacccgaaacccatgagcaaggttatacccagcctcctccatatccctatttcatagttgaggaaaatcaaggcccagagaaagggtaggatttatataatttacgtccagtggtggcatcagaaccaagattcaagcccatgactcctagcctagcccaagtggctagtgtttagaaaatgcgttagggagtctactgtgtgtcttgcatcagccacgcactcaggaaataggaagtatttagacccagtccgaggaaaggctccacaactccttgttgaaattctgctccctctgcaaggcctacctaatggctgctggaagcgagcccagcctgtgaattccctgagcacttaattttgccttctatctcatcagtacactgatcagaagtctgcctgtgtcacgggcatgtgtgttctcatcataygttttccctgccattacctggaaaatgaggatcacatgttctttatctttgtgtccccttcaaagcctcccaccctgcctggctcacatgtgttctacagaaacgtttgttggaagaggggagagagggraaagaatcttgcctccagtttgccagtgggcagtagattctggagtaggacaggaacaggtacttagtgaaaaatctttagaaaaaaaaaaatcttagagttacatgtgagtatttgtgaggctgagaatttaatttcatggagctattataaactcatttgataagtaagatgtgctggccattttcaaataggtaattcaaatatagcttagaggacttgcaattgagagagggtagagkagggactcaccattgaactagaattcagaagacccagagcttctcagcaccagtcatggattagatgagtccctggacatctccagcctccatttcaacacttacaagatggaaacaagtatggtctccctccctcagccttgttttgagggttaaatgagatcatccatgtagggactgagcagagtgcctggaacctggtgagcccttggtcagcagtaatcagaattattgttaggtgtgggggaaggtatttataatataagaaaggggccaaatttagaatttcactctcttgactacggcttcaggatttcatctattatctttaaattgcctgtggctctaacaacctgtaattctagggttatgtattggctctgtgcctacacatgtttggctattgctgcccatgtggagttccacctgagctggctgtccagtgaagcaaggggagggggagggtgcccagtcttggatcctgaggaagcaccaagggcatggcacaaggctgggtcggtccccctggggttgaggagcaaagtcctggggagctatgccattgtttctctctggccccagcctaaaatataaatgcagaggcttcctgcatatttcctcagactcttcactgatcctcatgcctgctcctatccagccttcagtctcaagccagcagtggtctcgagcctgtgttatccacacctggcccctctggctgtctgatattaaagcaactttcctctcagtgatttcttggtcaatcctatttgaactgcaaatggtgtgtcctagaaaatgttttattttatttttttgagatgtagtttctctctttttgcccaggctggagtgcaatggtgcagtctcggctcactgcaacctctgcctccaaggttcaagtgattctcctgcctcagcctccsaggtagctgggattacaggtgcctgccactgtgcctggctaatttttgtatttttagtaaagactaggtttcgccatgctggccagactagcttcgaactcctgacctcaggtgattcgcccacctcggcctccaaaagtgctgggattacaggtgtgagccaccacacccagcmactagagaaggttataaatgggtagcacaaaatctccccaggatctcactagataatactttttgcaattcttggtaaacaaagacagggagacagataccctcggtagtgttcactctgagtcattttcccagcagtggggacaggcttcctgtcagtttatttaacacatacttacaaagcccccaccacgtgccaggcaccatggtacaacggtgaacaaaaccaaaaacaaacatagtctttatagccactgggtgtgggggagccaggcctcaataarataaccccacagacaggcatataattaggaactatgctaagtactaagaattgcttagctacccagagcccaggcaaggccagcaagccagtgtgtagctcataggcatgcccgtggcctcactagcctagcactcaaaccaactgagcagagcaggcacaagcactcttcaggcaaatacgtgtagtcatcagatctgccctcctagatgtgaacactttacctgggaagggcaataccttggctctgctactttgcaagcacgtatggttcaatctgtctgtgcactgtgcccatgtggattctcactaattgtatggactatgccctgaatcccaaagcaagggaatgggatgccattcagccatctcagattcatactcccaggtgaggaactagagatcagctgagacgccaaaataattgtgagcacgagttcactgtttctcatggctttcttttcacctttatgaagccataccagaatgtggcctcaggggttcaggagctgtccaggtctgtagattcccaattttcccattcagtggagatttgacagtcatagtgagaaatgatcagccaccactcttccgagttgagagaaaataaaaatgttcctaaaaagtttgcatttaacagagatcctctctggcccaggtctctcctgtgggctgagacagagcaagacaggtgacccctrgggagccccagaagtactatgggtgtgtgcactgggactcttcttagctctggggagtaaccatggcaacatacatgtcattcccgttcaacatttgcaggcctacggagacgctgttttgcttttcacaggaaatcacagctttgtcatttagtccttcaagcagcccacgttgaaatcaacatgccccaaactagtcattatcttccccatctttacacatccttccccctcctaaaaacactgcctcctccccgtacccatgttccctgccttattgatgtctcacctgttgcccaagctggagacccagagtcacatgtttcccttcacgactggcttgaggaactctcatataattatttatttacatggtgtttctcccatcagactgtgaggccctcaggaggccccagatgtcataatcccttctgtatccctgtgcctggcagagtctcagaggcctcaaaagggcttgtcaatattggttgaccaaatgcacccagtcaggggcacatgragcagtgagttaggggattgtttttgaattggtctctcagcaagagtgaatttgtgtgagtgatgctggcgtgcgctgtgccagggcccctctgccagcatccacctgtactggagctcaggaggtcggcctccaattctcactcttctctcctctcaagcccttttctattcccaactgactctacatcagaaagtagctgtggtctgtttccgcagacctctcatggcatctggcgggatctgacttgctagactctgccaggttagggcaggtatgtttttgcagcttccaaatgcaggccattcaacgtggttctcagatgcctatttctatagaaactgtgatgttttctacataatactgaaatcccagaatcacaggctgcctaggaatgtagatattattttgttccctggataaggaaatgtagatattattttgttccctggataaggaaagtgagtaccagcaaggtgaagtggcttgcccttagccaaacccagatagaaatgcagatcttttggctcacacagaccaatcctcagtcctttacagtaggggctggcaaaccttctctgcaaagggccatgtagtaactattaaaataattaggctaggtgcattatacagtctctgatgcaacgactcagctctgtccacttagcatgaaaaccaccataggsaatatttaaatgaacgggcacggctgtgttctgataaaactttatttacaaaagcaaacagcaggctggatttgatcctcaaaccatggttagtcaatccctgcactagaacgccgtgtggtccatgaaccaggagccttggccttgcatgggtgtgtgtcagaagtgcagactctcaagtcccactgcaggcctactgaagcagagtctgtatttcaacaagatctgctggtgatcgcacatacgctgaagtttttgagaagmactgcactggtaggtctggtttctcctccaaagaatatcaagaataaattttataaattagaaaaaggaagccaagggaggttaattgacctatcaaaggtcacactaattggtgcatctggtactggacccaagtcctagtattccaaacgtacaattctttctacaaaccccagagtaaccaccccaacccgaccccagcttcgcagtttctggctggtcctgacccaactcaaattcactggaaattcaagtgaagcaatcattcactctttctcagctgacgtctgaatgaagaagactctgactccagctgtgtctcctcccctctcccactcmsttctgcaagacctgggagggcctggcgaggtggaaatgtgcctcaggaggctgctcagcatctgcagaggaaaaacttgctcacacaggtttgagctggagttgaactccaacttaattcctgcctcaggaggtttgctgctcaaaatagaaccacagagccaaggaacctttcacttttcacatacagaagaaaattctaggctaggctctttggcaggactagacaccttagtttttccctcttgcacttgcccatcttgacccccaaactagtctctgttcccctgcagaattcatagaccatttcatattgggcaccacctaagstccatcccacagcaaaactccgtcctggccacatgctctgcacagcctgaatgttggtattctctgtgatctgtttctatttggtgcaagaagtgtttttcttagtgagttgggcttccgtaacagaataccatggactgtgtggcgtaaacaacagaaatcgatctctcacagttctggaggctgggaagtccaagatcaagccacaagcactcttggttcctggtgagagtcttcttcctggtttgcggatggatgcttcttgctgtatcctcatgtggagagatcatctctcttggtctcttcttataaaggaactaatcacattcacaaggactccaccctcataatatgattatgttcctaagggcctacctccaaataccatcatattggaaattagggcttcaacatatgaatatggggggaggggaacacaaacattcagtccatagcagggtttaatcttcttaatcagcaaatatgtgttgggctattatttattgaatacctacttatgggacaaaaccattgcataattatttaatccactttatgtctcaggacactgaagctcagtaggattaagtgactgggccaaaatcacacagataacacacgatagagcctggactcaaacctgtcttcaagtatctaaggtgctccaagtctrcagaggaggagacaagaaaacaatatggtccaggcctcaagtagttgrcaatctactatctacatgtaagaaatatctttagaacaatcgtgttaatattggcataatgagcaagcaccatggagtggaagagatgagtttataagagtgtgggaggcaaggaggtcttcccttcagcacatgtgccccagctgcccagcaccatgcaatgcagctagtaggtgatcaacaaatgtttgacgaacaaatgaatgaacaagatgaaatgcatgtgtgttagtcctgggagctcaaaaagatttgaaaagacagggagtaaaagaaaggcaacatgggctgggcactgaaacccagaagtagcaaagcaaagaccggaagatggagactgttcatggagtttgaacatgatcctttgaataataagaagagatgaagctttttcagccgggagcaataggatctgagagtcatgtgcagtttggatgagaaggaaggggaagaacctggcagtaacaaggccagtgargagactaatgcagaatgcgggcttatggctccaaggcctcaaattgagagtcaacaacccaaaggggaagaatggacaaagccaacagtaagcaagggatggacagaggacactgccacacaggtgattcctccctccccaaaaaccacccagcaggacccctgctccttctcccaacaagctcagcctcttcctgcctgcctccacgcccaaacctctccccatcaccaggggcttctgttagcagagcagaggcatcagcagggacctttgcccctttgcacctccagcatgaggccagcgcccatctcttttcatcctcaggtctatttatccagcatgtgttaatcacttacttggatctagcactagatgccagaaatattttacattcatcgtctcattttaatcctctacagcacccccgaggaatattttatagattagaaaaacaaggcccagggagggttaattgacctatccaagactgcgttagctggtggatctgggactagagcccaaatcctagtattccaaacataggattctttccacacacacccaacaccctcccacacctcccccattctggccaaccctgacccaaccaccagaataaggccctccctgtcgtgactctcctccaactttgtctttctggagaatctgagatgatattagtgaatgtgattagttcccttataagatctttctgagatgatctctcaatagtaggtgctgtaggcagcctgttgagctgtgataagtttggccagtgcagatctctggaatgtaccttgtatatgccacgcctgagaatcaggattgagttaaggtggaaaatcttaccactaattgatttattttattacatacagtgtacccagaataagattcctgagctcagtgggtaaagtaatgccagataatataccaactagtattttaccttcgagccaaagaattcagcattccatttaataagatcatgtagccaaggcttccctgagaggagatgagaagaggctcacccccacccaagctcacctccctgccttcgggtaccctgtcactgcaaggtactttgtctctgccttgcgtcctttcaaatgagcttattttttgaatcgggccttggtttgaattccagctttagggtatgccagctatctgatattaggcaagtttcttagcctctgagcctgaagggtttgttgttgttgttaagttgggatagtagtttttaatggagttgccacaaggattgaaagaaaaacctttgttggatgcatagtttccaacatttttctcccattctgtaagctgtcggttaactctcttgatcatttcttttgctgtgcagaagctctttagtttaattagatcccatgtgtcgattcttgcttctgtcctttgtaaagctctaggctgcggagtctgtgcccagcactggacctcaccgggaccaccagatcaagattccatagctctgctggctcccaggccttaaaggacatccccacccttggcttctcttagaggcaggctcctgtcagacccttgcttcagagccactgggacattccccaccacacagctctgccggggcactgcctccccctctgaagcacctgaccctcatgcacagagctttcaaagtccacctcccacaacatacagcgccttcatcggagccctggagaatcccagaagataaagccacacagaatggaggacacatttttcccgtcccacccaccacacgagcaggttttcaggaaccaacaacaatggccattgtgtgcagggcctcacactttctcttgcctcagtgtagggctgtactgaatgttctgtcttctgcacagtgtgagaacaggtgaggtctcctacccatctgcccttgactcagcccattaggaaatccagcctccatcttggctggaaaagcataaatagaccttagggataggatgcctccatcctcaactggaggaaactgaggccctgaggagggaaatgatttttccaggtcacacaattagacagagccagaacagacaccacaattccagtcctgcccgctgggcccacatgtcgcttctccctcaggctctgcaggcctctcctcctccaaaagcagtggttctccctgcttctccttcctaactcttcccaatgggattatccagactcaaaggccactcaatgccctctggccacttacatgctttgatggggctttacagagcsctgagagtagcagaaacccacaagccagtgtggcaagggcatggcacaaaggagcggggtacccaactggcctaagagtatccaacccatgccttaaaggtgtctagaacctgctctgctcccaccttgctcagcccaggaacaagagaaggcaacctggatggttgtgggattgcaacacacacacacacacacacacacacacacacacacagccgcagggaaaggaggggagttcattttcagataaaagggtgagctcctccctgttttggagtaaaaagaaaaaaaaggaataaagatgcttcacttgccagaggggcaagtcaccctaaattctcaaggtcataatctctctgctctttaccgtctctctgcctttctctttttcagaatcctcccccaaccttctcctttttttcacttatccttcccctccctccctctcattgccttcctcttcctccataaccttctctaagttacattaattaccatctacagaaggccatgcacttactgtgtagcaaagtcggaacttcttgagtacatccctttttaaagaaacataaaatcgcagtaagagcaagtgtttcttgagggccctctgtgtgctgctctgatcccatcctattcatacaaggtacttgagggcatcccttctaaacttcgagacaaccctgccagtgacttattgtatctattaatacattttccagataaaaggcagactcggaaaagttaagagtcttctcccaagtgacaggatcagacccaactctgtccgaagctcgtgctgtttcacaacctgtcacaggggtacattctctgtgctgggttcatggaagaccaaggaataagccctctgcctctctcctcatgacagggtcagtttctctggggaaagcattaatcacagagtattcttcagcttagttatggttgggatgcctgaaggcctggtgctttgagaggccaggcaggaacatgggggatgaagatggaccagttagagctttccttctttactcgtttgttcctggggaaccccagtccccttgccctgtggaagatcaggaaacagtctttagggattctttccgtttccccacccctaggcttttttcaggctacattgcctttgagctgcactttgaagctctttcgccaggagcagtgtttcatctgtgcagaccagtccaactgggaggctcagaggagctgagcagtgcccagccttgttgggctttgagtgcccaagccaccaaggacacatgcccatctccatggaaatttggaggcaggagaggagcccgaggacatgcctgccggcgccttagtgggctaagtctgcaaagaggcctgayagctcccactcacctgtctagactgtggggactgaatctggccccactgtaagcagagctgggcttgtgtcttttctttctgaggaggttaagaggttcccacacacacccagcgcttgtcagcttctcagtagcacaatgataagggacatggctttttacagatcactttcatattctttatctcttttgttctcaaaataacacagtgaagtagggtttatgattatccctgtatgggccgaattgtgtcccccaaaaattcgtgcgtcaaagaagccctaacccccagcacctcagactgtgactgtatttggagacagagccttaatgaggtgatcaagttaaaatgaggttatttgggtgggccctaatccagtccaactggtgtccttataagaagagatttggaaacacagagaaacascaaggtccatatgcatggaggaatggccctgtgaagaggcagccagagggcagccagctgccagccaaagggaggggtctcagaggaaacccaccctgctggcactttgaccttggacttccagcctccagaaccgtgagaaaatacatttctgttgtttaaggcccccagcctgtggctgcttgtttgtggaagcctggtctgactaatacagcccctattttcaagatgtgaaaacaggctcagagagaacaaatgacctaccctaaatgacacagcaattaagatattagtcccatcctcaagaacttagtgtagagtttcccagcttttttctttacctctgtgactacagtttttctatcagtggctatttattaagtagtgacaaattcctgtttgcatttctaatgaatcagatgcatacccctcccrgtaagagctcaacatgagcattggctaactagcattacccactgaactgacaggattccagcccaaacaatagcacctaacatctcagcacgccagtgctgctgtaacccaggtaaacagacagggcccacaggttttatcacatgacacagatgctctaaggtatggggcaggcttccttgccaccatggtggtgtggtttagaaattctgttggctccatacatagtcaggggccctgcccctccattcagggttgtttgattccctgggctgctccatggcagccccaagacctgaaccctggtgtgctgatggaaggggaagtrgagtgggggtgggattgagggtagcaaagcatcctcttaagctaaggatatcccacacttcccaaaggcattgcaaaaggcgagtccaaatcaggacacccagagattcccctgcctcttaaatgattgattgaattttcactaatgcaaaaaagcaagcgggcactgggcgcggtggctcacacctgtaatcccagcactttgggaagccaaggctggcagatcacctgagatcaggagttcaagaccagcctggccaacatggtgaaaccccatctctacaaaaattaactgggcatgatggtgggtgcctgtaatcccagaaaattgggaggctgaggtgggagaatctcttgaacctgggaggcagaggttgcagtgagccaagatcatgcgattgcactccagcctgggagacaaagcaagactccaaatatcgggggaaaaaaaaaaagcaactgggatgagaatggacagaaaaattatgcaataaaggagagaggcaaaaaccaggctgggtagaaattgactgtcatatgcagattacatgagtgaattcatggaaagcctgttacccagtacaatctgggcaagtacagtcaggtttctatattcatgggttctgcatttgtagcttcaaccaagagcagatcaaagatttttttctaaatggatggttatgcctgtactgaacacatgtagacattttttcttgtctctattctttaaacaatacagcataacagctgtttacagagcatttgcattgtgttaggtattataagtaagctagagatgatttaaagtaacaggagcatgtgcactggttatatgcaaattccacactattttatatcagggacttgagcatctgttttggtatttgcaggggtcctaaaaccaatcccccattgataactgcagacaactatagttattattattattattgattattatctctttccttcttctggccaaacctgtcaaagtctttggctctaaagcatctatattattcagtttattcaacaaacatatatcaagaaccttttatatgccaaaggctggtctagttgctagagatacaaagataaacaaaacaagaacacagtcctgccttcaactcgcaatggagttgagagagtgatatgtacagagacagttgttgggtgagatccactatctaagcacagaagaaggaactagcatggtgcttggggcatcccaggaggctaaacaggagttgtccaagcagagggatgtttgcacacctagctaaggaacttgaacattgtttttgttttttgtttttattgtttgtttgttttggcttccagatgttcccaaagaaagactggacatgtcagatgtttcccagagtgttctgctagcatttactcatcagtgtcaagctcatctggagttctgacttttacaggaagtgtaaaactatgaggaatattgaagatttaagaaaatggttttagccttaatattatggcctagggactcttgtacacagctctaagaaggtagatagactgaccattgggagttgtccgggtgaatgtggagaaaaaggaaagtgaaactaatgtattttgggtgcccactctgtgccagccactttcacattcaggtctgccatttaaatctcataaccccactttgaggtcaatattattatttcaaattttccattgaaatagcaatagatcaaagcagtcatgaaataacttgttgacattcttcttcactccaacttctgtatatattttgggcagttttcttgcctaaggcccaagttctcaaacttaagtacgcctcagaatcttccagagggcttgtcagaacacagactgctgggcccaaactccagactgtctgattgggtaggtctggggtgtggcctaagaatttgcatttctaacaagttcccaggtgatgctgaggctgccggtccaggaccagactttgagaaccactgaccaatgggaatgatccacccaataacttagcccagtggttcccaaactgtgctcattttttcatcatctggaaatctttaaaaacaaagaccgatgcctagctcctatgctcacacattctgatttaattggtatagggtgcaacctggcattgttgtttttaaaagctccccaggtcattctaacgctcagcaaagtttaggaaccactggcctagcctcatttctcctagactctaatcccaccctccaacatccacttcagctgcccaccactgggactacaggtggaatttgtgcatcggctagtgcttttcacagcacctctccccaaccctctctttcactgtctcagaacagctttttctagaactccttaagtctcttactcaccttctcccttttcattcagtccatctcctttcctattcaacccagaccctgtggcacagtaattactgcagccatctcctgcccacagccaatatcatcaatgcccttatcttccttgttctttctttgactatatctacctgggagggtttgaggaggagcatctaagtcaaactgcaggcacagaagtttgaagttcattttgaacttgtggaagttgatgacacttgacctgagttttgatagacaagtgaaagtgggagaaagtatatgtagagtacatgtaaaagcacagaggaggaaacagtagggtttgcctggggaatgacatgttgtgtatgtctgcggcaggcatctagccccacaaagacaggaagtaaaactgcagaggcagccccttgccagatgggaattggaccttgggcatcaaaccagggaatgtgagcattatttttataactgtgaagagcagttgatatgtttttatacatgacttttgttataacattaatgcacacttataaaaaataagaaataccaaaaagcgtaaagaagaaaataacaattacctttaatttaattacctagaactcaccactgttaagattttgttgggatttgtccttttcttttatgcatattcttacctagttgagagaatgctatacaagtaagtttatatcctgccttcacacttaacattttaacataaacaatatttaatgttattgaaactttgtaaatattttaatgtcagcaaaaaaatttcatcatatagataccatatcacttatttcacttatttaactattcccatacaggaagaaatgggggtaggggagatttcctgttgcaaatgatgccacaatgtacatatttgtatgaacttagtttctatcagtgattttcatgatcaataccaagaaagaaattaatggatcaagcagcaaggaagttttatacttagtaaaattggccaaattgtttccttcctatcagtttacgttttcagtgtgaaagtatgcacactgcatattccgttccccagcacttggtgttttgtttgtttgtttgttttaagacagagtctcactctgtcacccaggctggagtgcagtggcacaatcttggctcactgcaatttctgcctcccgggttcaagcaattgtcctgtctcagcctcccaaatagctgggattacaggcacccaccaccacacctggctaatgttttttgtatttttggtagagagggggtttcaccgtgttggccaggctggtcttgaactcctgatctcagatgatccgcctgcctcagcctcccaaagtgctgggattacaggcgtgagccaccatgcctggccagcacttggtattatgatgagtgccactgaggatttttcatatggggatgacataatcagatttgcatttcctggaggctgaactggatgggccagattggaacccccactgttgtccttgcttttcctcccttgcctccacattctcctttttctattttcccatttgttatcatcctcttttcttggagtgcttatattatatgttcactacacacaaaacactgtacaaggctttgctaccaaggaataaataagagcagtattgaaagtcctagctctatggatgtgacaagctcatgctggcccagagaccctcttcctctagctctggccaaaaagagtctctggacagtaattctccttaggaaaaaatactttttatattttccaatgaaattgccaagtaggtttattgcttaattatttttttcttcatcctgtgactttccagccccacacatgatcatccctgtgcctggaatgtccttcttccttcctcttttcaacccaaaaattaccttggcgctcattcatccttgaagacctcttttagaggtctgggacacctgccttctgtactttgccccagcagaatcagtcactcaggcttccttgatcctgcagttcaattgcagcattttctacacctaacttggtttctccctcttggctaagagcccttcaagaatagaacattttgcatcccaactcttacaagacagtgtctggcactgagttgttactcagtaactgttgaatgagtgagtgagtgagtgagtgagtgagtgagtgagtgaattcctgttttactaaggtgcatacacattccatcttaaatactagtcagttgaagagtgtaaagacaatatggagatgacatgaattgccaaaatcacaccctgaatcattgatgcttaaggtaaaacagacacctggtataccagatgtctcaatctaaacattaattcctctgtgtgcctagacactgacttgcattctgttctttttcattttaactccaaatttaagttgtacctgagtatctctgtgatagaggaagtaaaggggattaagtgatgccagaatttcccaaaatgcgttcctaaaaaatggaagcggtgggttgtttataggcatcacacacaagaaaagggtcttgtggtcttataactttgggaaacaatgttacatagatttctttacctcaagacctctgtaggcattctaggaagtagaaggaaagatgagttcggcaatggtagagaagtaaaagagcaaccaggtcctgcctcagtggtagtcatctcagcctctctacaccagggaaaactcaaaggcaggatggcaaacagtatgccaagatcctagcccctttccctacaaatctcctcagtcccacatctgtgtaagcccctgcccccacccacccaccatgctgatgagatcagccttcattacttctcttctagagccaggaagcaaggtaatgtgtgggaagtgatagctgcaaggtaatgtgtgggaagtgataacaacttcggagttaaagccattcaacrggaaaatttgttaaaagaccaagacattgtaaagctgaaacacttgagtctattaagtcccctgcttcttagaacattttgttaccagggaatgttttaaggagggaaaacattggactatcacagcaccatcagacaccaaagcctggtacaaagaacaacagtttccaagacatctgtctctgccactcaagagacttctgcaaagttctgcttctcttttctccccctctctcctatcccaacatcaaccctcaaaccccctcaccyctagacatactctatacctttctctcctcctcctcacccttttcctctccctcctccttctctctgtctttatcttacacacacacacacacacacacatttatagcccatgttgttttcacagacactattggaatgacacagtgagctagaccatccaacgttattcaaccctctttggtaagaaggaggctaattaagtgactagaggtttagacattcattgtttattaggtccaaactccttcagagagcctggagcattctcctaaacaaacattaccctttcctggcttcttwttccaagtccaaatgagatggagtgtttaaggagacagtatcttttcacaaacatgaagaaaggagtactagggcagaatgtgattgtcagtagatgtagagggggaaagctatgtgcctgtcacagaaagactgatgcaagccgtgtatctgttggcagctgatgtccattagtgatcgtcagtaatttagactagcaatgttgacacatttgtggtcagcccaatggtttgtttaactgtcttcactaggaatacatcngtcaagagattgttttttaaacaatagttagccttctaaacaagagtaaagacaaactcaaatatctccttgccaatcttaacactgttatactataccaggaggcactttagaagacagaagccacctgttatataagcaatagcattaacatagacacagttttctagtttgtggatattaagaggatgttagtgattagccacaacttatgagaaagctactcttgccttggtaggcaaaggaatggaaagcttttttaaaatctgccgttttattttgcttctgttttaaataaatgaaagttgtgctggaaaagtgagttttgagcccaacatcaaacattaatcctgctactgctttcacaagaaactggggargcaccatccaagcctcagcaatgctgaagaaaaggacctcatctaggttgtgaatgagaagcaaatcccactgtgggagaccactggtcctgagtgactctgagcctgagcctcctacttcctgcccctccttttctactgtgggctcacagactctgatgttggtgaaatgttcttttccttggcttggattaggcacctggtgtcctgaaagaggtcattggttttcctgaggacgtccaaggaggctggctcaccagtggcttaccacaggccaaatttgaggttaattaaccatcagtcattgtcagtggggccaaatgttattcagacattcagagaagagagacttggtccagctttgggtaatggccctcattaacattccttcctatcctagttccaaaccaatatgtctttagctgcataggggttgaaaataatcagaaatagctggttcatcatttatgtcactctacatttgaagagacttcttgatatggtaacctatttattggatatatatgatgtctgaatcaaaatcttttttcactaaaactgaccatctcctcatgaaaaggtacatttattgatctttggggaaacaccctattcagagtgaatatgaaaaaggtgtttggtgggagatgaagggatacagacattggccatctggggaccagactttctggccagaacytgtctgaggaacacagagatgtgtatgcactacttttgctgtctcgctctgcagacctcagtgaccagctccttgaagtggtsgggctagaaggagccatggagatggggcagatctacaccggcctgaagagtgcaggcaggaggctggcccagtgcgcctctgtcaccatcaggtatgcctctttgtcacccaacagcytctgcatctccccgcctscgtacacattcatgcagacaactgagaagccatctttggattttagggcagggagagtgcagcacaaaagcttgataatgtttgtaaagaaygtctttgtagaccatttcccaaacaggatataatgcgcccatctaaaacatcaactggaggacacaccacaaccagtttgctgttctgttaaactgagctggtgaagttctctaaacaggagtataagattaaatggtccagagaaccaaaggtccaactccttggtgtttttatatttgcaaattaaaatgttagatagatggcagagggatgccagagggcacactctgataaaaaaragatgtctcttctctgctctactccttctcagacagtgacctgagaaacactatttcctatacacctttgtatgctaagccatcaacatcagcaaaactggcataattgacagacaggatgacaactctaggggatggaccacacaggttagccactgtaggctcctggaagagatgaagtctaatcgagaggatcctctgatttcagttgcctctgattaatcaatgcagctcatcacattttgtctgagattcttctcccacctgattatttcagaagtctttattcctttcctttttcactgaattactatggaccaaatctattaacatgccttggggatctccgagaggagtccacaggatactgggtttcccaaaggtatttgaccacagaactcttttctcccagaacctcctgggcaagtgtcatcagagcacattggaagaaactctgcccttggcaccacactgcattcctcagaaaggtccccagagcggattccctgaggtctcttagctgaaggtctgctccactgaccccttttcttcatttcccctctttgttttctgtcttttctattccccaaagctttgctctcctttctttctgagctgttgtcatgatggggtccctgttttccagattaattcttgaggcctgtctattctccaggactctaatactgaggaggtccagtctgttaacacatctaagccataacttatgaagaccacagagaacagaacatcctgatccttgaggaatctgaaagccatgtataaggaggaggactttttcttcacattcagtagctctatttccagatagaaacagagggggtgagccaggagccccatcctcctggccatttcctgaatactatccccagcctcaagagccaaaatgccactctttactcttgtttttgttagtagatttattgtttttattattaaataccctcagggtcaatcagagaatcatcacatcagaagatagcttttccctcccattttataatttcaagaacagaacagttgccatacccaggtgagggcttctatgtcaatgggtgataactgttccctgctcacccagaccagaggcctccaaaagagcctgccttttcttccaaaagcaatgtattatgaattcataactcttctgcagagggaagtcagaagacttcatctctctccttttaaaacctatggcgggctgtggtggctcacgtctgtaatcccaacactttgggaagcttgaggagggaaaattgcttgaggccaggagttcaagaccagtaggggcaacatagcaagacccccttctacaaaagattttaaaattagccaggtgtggtgatgtgcacctgtagtcctagctactcaggaggttgaggtaggaggatcgcttgagcccaggaggtcgaggctgcagtgagctataatcatgtgactgtactccagcctgcgaaacagagtgacaccctgtctctttttaaaaaattcatatgccaaggtcagaaaagccttgcctcaagcaagaaggcaacactttcacctctcctctggggagagtattcctagatgaccccctttcccaggtaagccaggcccacagtccatgcaaccccagagtgtgcttattcaggagatttttaaaaaggattgaggttgggccaggcgcggtggctcacgcctgtaatcccagcactttgggaggccaaggcaggcagatcacgaggtcaggagatcgagaccatcctggccaacatggtgaaaccctgtctctactaaaaatacaaaaaaaaaattagctggacatggtggcaggcacctatagtcccagttactcgggaggctgaggcaggagaatggtgtgaacctaggaggcagagcttgcagtgagccgagatggtgccactgcactccagcctgggcgcagagcaagactctgtctcaaaaacaaaacaaaacaaaaaccaggactgaggttagaatagattgcaaggcaagacacactcagacctgagctgtatgttgtataaattggagacattacctcattgacatgatgcaacctctcactcaacatagagaccaggccaattcccctttcagagtggagtttttggcacgtactctgggccttctagctgactgtttgaggagcacctgctcagtggtggcgctgccacgctcactggccactgtatcccagacttctgtggacttcactgctcatccacagcagtatttctcaaagtggggtctgaggaccgaggcagtagaatcccctgtagtgcttattaaaacacagacccggccgagcgcagtggctcatgcctgtaatcccagcactttgggaggccaaggcaggcggatcacctgaggtcgggagtttgagaccagcttgaccaacatggagaaaccccgtctctactaaaaatacaaaaaattaactgggtgtggtggcrcatgcctgtaatcccatctactcgggaggctgaggaaggagaattgcttgaatccgggaggcagaggttgcagtgagccaagatcatgccattgcactccagcctgggcaacaagagcggaactccatctcaaaacacacacacacacacacacmgacacagaaacacagaccactgggcctggcccccagacctgccaagttagactccctgaggtggtctcagaaatctatttttaacaagttctccaaaagagtcttagagaaccacacttaggtaggcagataaggttttcctacttctgttttcctggtgggaataaccttgattctcccacttgaaaaagctcactgtgttctcttggtgttctgggttccaggacaaacaagctgctgccaatgcaagtggatggagaaccctggatgcagccatgttgcacggtgagtcttgccaatctttgagatggggatgagaagccttatttttgagcccttttgggcactgacttaatatgaaatcactgaatctcagagtcgcagggactgtggaagattatctagtgcaacccctcttccactttattatccatccactcatttacctggcaactcttaatgaaaacctgctatatgccagacactgtgaagcgccggtcacaaaattgaatgagacatagaaccaacttcgaggagttcacagttctagtcagtgaattctgagacttcatctactgtatcctggacagcctcagcttgaatcatgtcaatggcaaggaatttactacctcaaaaggaagactgttctgctgatgaacaagtcaaattgcttccttacgtggaagccaaatctacacacttaccttacctagaatttggtagggtagcgcctttgactgctggagctcccgggagaaaattcctcgcagagcacagacatgcctcccagtcggtgcacccaaagccctgataacctacttgaaaattccactgaatgagtcaccacgcaggttatctattttgtttatggcactgtcacccagaacgtagaacagtgcctggtttgtaayagttgcacaataatacatgtcaaatgatgaataaaagactgaacaaatgaactaacaaaaatagactatctccattcccagacttaccatatccgttagctctccctttagcactaggacaggagccatgcatccttccttcttagtttgtcctcagttagaaatgcagctagaatctygtggtgaagagcaatcgtcgtcctggttttcagggcctctgctgggatactacatgcgtaataccctcaataagattgcagctatgcaaatttcaaaagacaaaagtggagtttctaagcttcctcactctagtggagtattcagatactttgatcacctgctatttcgagccctccagaacatcaaattgtcttctactaaaggaaggtttccatgaacctgctgagaaaaggtagcatcttctataaaggttatcaaaaacagaaatttctctgcaaaaatcttacctcaatcttatgaagaccaagaaaaaaatgaaaacacactatatcaaataatagctttccaccttgctggagttaggacgcatagagggaatttctactatttatcatttgatggaactgagttgagaagaatctatccaagttccttttatctccaasccccctacaaaaaaaaaggtggaagaaatcaaaccctctcctacctggttcagtcctagctgaaaactggattgctattcctataaattcaagcactggattttgaaatagccaaatgcttctccctatgcccacacccacccttcctccataccaccctttagagattacaactcactatgaaaaaatttgtgaaccaatgatttcatagtgtgaggcccagaaatcygtatgtaaaggtatatthgtctgctttgagtgccataatagaataccacagactgacagcttaaacaacagaaatttattttctcacagttctggaggctgacaacacaagaccaaggtgccggaagggctggtttctggggaggcctctcttcctaacttccaacggctgccttcttgttgtatcctcacatggcttttcctctgtgtttgtacactcttttctcttcttataaggacaccagttctaagggattatggcccccccgccccttgtgacctcatttatccgttattacctccttaaaggccctacctacaaatatagtcacactgggggttaggaattcaacatatgaatttgggggggacacaatttattccataacagaaggtaacagaaaatcattcttaaacttgcaagggttaaaacccatgtaccccttgttgaaacatcttcttgaaggtatacaccaactaagaagtgattcaaaattaaagccttaagaatggactatcacagcccaaaggaacttttggtaaaaatggaaaccagtgaaattagaatgaagtttccaaaaacctgctaaatatgtttatgcaataaatgcaaatggcaaaaaatcattctttgaaagagaagacatatcatgtaaatattaataacctgtatcccaaacctgagattatattaacaaaggccaaaaacatgcaggagacactgctgaaggaatagtaaagatatgtgaagtttctcattgtctctcttcactttgatgacaaaacgtataaatcagaagataattttaataggtagacaatcactagcgaaactaaaaatagggtgcacacctttcaaatctggaagaatttaaaatatataaaccctattaatgtagcacaggatagaaagcaaaaaataagccaacatttaaaaattttttgaagcaagttgaatgatgttaagactgtatatatataatatatatataaaagaaaaatagatgagttaaaattccctattaaaagatcaatactctcatattgagttaaaaatgaaaatccaaatatatgcttcttacaaaagatacatctaaaatgaaaggttatacatacgtatatataatatatatcttattttatcctttatcaggtataaagaaattaaaaggaagacatagtaatgttaattatgctaattttaggcaaactaacctttccatgtgcctaaagcataaagcagaataagtaaacacattttttatttgataaaaagtacattcaattatgagatatagtggtcataaaatgttagatatttaataacagaatcaaaatatataaaaaactatcaatacatattctgagaaaaggttgatatagaattgacagacagatattgagaagcttgaaaatatttgtttccatctttgaggttaagtagcaaaaaaataaatgcttggatgaaataactctataactcataaagaaattaaatatcatatttgttcaggcattcatatttattaaactagatcataaactagtttacaaggcaaaaagctccataaaatccagttgcagaaattataaaggtcattttctttgaccacaaagtaataaagctagaaattactaatagaagattaagtgaataaacaaaatttagtcacttggagacttaaaaattctcctaaacaacaagagatttatgaggagatcaaagccaccatggtagattactcaaaaaattacaaaaataagaaggctccagtttaaaaattatagaatatagcctaaactatatttggaagtaaattaaaagcctcataatcttccatcatataaaaaagaagtaaaatgtaatgaataatactaaaattagaagagcaataataaaacaatcttaggagaagcagaaggaagaaaataataaagataaaagaagaaaataactaaaaacaggaaactctagaactagttcttaaaatatgtcaaatgtttgaaaacctaatttttaaaagagaaaggaatcaaacatattaaaaggtaaaaaatataaatgtaatataaaaatataaatataactgtgtccgtggctttatttaaatataaaacaaggccgggcgtggtggctcatgcttataatcccagcactttgggaggctgaggcacgaggattacttgaggtcaggagtttgagaccagcctgaccagcatggctaaaccccatctgtaccaaaaatacaaaaattagccaggcatggtggcccatgcctgtaattccagctcctcgggaggctgaggcatgagaatcgcttgaactcagaggcagaggttgcagtgagccaagatcacactactgcactccagcctgggcgatggagtgagactctgtctcaaaagaaaaaaaattgtaaaacaaaatatacaatcatcttgattctaatgaacttgaacatcttaagaagatgaatgaaaatcctggtaaccattaatgaaactaaattatttcaaagaattacatactaaatgatcttaaaacagatggccttattggtgagatcttccatactactaggaaatacgtatttaggtgaactgtttcatagtacagacaaagatggaaggctactcaatccattttatgaaatgaagacatgcaataacctaacaaaaattacatttaaaaatagaagactatagactatagactatatataaatatgacataagaattctagttaaaagtattggtaggtagaattgaacaatgtattaaaagaatcattcacccctatgagcatattaaaggaacaaaggaaagtcttctactattagtttaaatagaaaaactacatgataaaatagatgacccaaaagtattcaattacattcaacatttctgatttttaaagataaaaactcctgaaaactaagatcagaaagcttctcccctactaatgaatacctttgttaaatatatgttaaaccataaccaatattttacttaatagtaaaacactagaggaattctcactaaaatcatgaacaagacatgtatttttaacattggaaattttagccaatgcaatatatacttgaagcagaaaagaaatgtaattagaaaatataattagaaaaagaaatataattatttggaaaagagtcaaaactgtcattatttgtaggtggtatgattatgaacataaaaagctaatagaataaactgaaaacctcaaaggataaattacttcaataaaaccctatagaaaaaatggacaaatattaagttttccggcattaatattaatagyataccagcaataatcaattcaaaggatataattaaagcttaaaatatcattatataagcaataaaagacataaaatactaaactgaactgtgtaaaatgcatgaagatgactataagatttaaccaataaagaaaaaaaaaaaggatttgaacacagaacatcccatgttcctgaacagggatcccaaaatcccaatgcaattgtttctttaactctacaaacaatgcaatttctaggatgttttataaaagaacgctgagaaataacttctcrcaagatattaaaataattataaagccacaataatttgaataacatgctattggcatgataatggatagataaatcaatagtacagaagcaagccttgagaaaccctagtatacataaaaactaatgaaggaaagagaaagattataaactaattaggtaggcatgaactgtttagcatatgatatccaagaaattgcgtttcagaaaatgtctttatatagaacctctcacctcaaactatattccaaaaacaaaaccaaagcaaaaaaaagccccccagttcaattacagtattaaatgttcttagctaccagaaaaaaaatagatgatcataattacactgggggcagggattttctaaggaaaaagggacatatttgactgttaaccaattttaatttctacaagtcaaaaatcaatatagaatcttcgaaagactaaggacaagatgtttgcaatcgctatcccaaagatcaggttaattctcacaaggtataaagaaaccagctattagaatccagcggaaaaaaaaaatactaacaatgcaatagtgaacagagaattcatagaagaagtgtcatgggctaataaatctatgaaataatatttaatatcacaagtttttaaaaaaggaagaaaagattttcaaattaaaacagtgagaaaggcatgccatgtttcactgaccaattagcacagctgttttgtctttatattcattgctgtcaagggtatggggagaccaggacactcatacagtgaggcaagagtatcaacagttacagccattctgaaaagcatgtagacccatgtgtcaagaactgttataaatattaatatacgttgatctagttcatttactttcacttttaaaaattgttcatatacttctaggaatttattctaagtaaaatacagattaccagaaatacagagagattgatatataagaatgtcacgtctacattacttatcattgcaaaaagttggaaatttcctaaaaatttccttaaaatgcccaacatttagggaaaggtttcagctgggcacagtggctcatgcctgtaatcccagcactttgggaggctgaggcaggcagatcacgaggtcaggagttcaagaccagcctggccaacatagtgaaacctcgtctgtactgaaaatataaaaaattagccgagcatggtggtgggtgcctgtaatcccagctattcaggagactgaggcgggagaatcacttgaacccgggaggcggaggttgcagtgagccgagatcacgccgttgcactccagcccaggcgacagtgcgagactccatctcaaaaccaaacaaaaacaaaaacaaaacaaaaccaaaataaaacaaaaacagaagcccatatttgtttatatatgtatatacaaacatatatatatatttattcrggaaacttgtctcattattattacactgtaagatgatctctcgtgcttcaccatcacagttaggtggcataatctgagcctcaaaattcagaatcttctcccagagttagacgatagcagaatctcaaagtcaaagatgatcctacttatctagtctggtgattctcagacttgagtatgcatctacataacctacaggggttctgaaacacagattgctgggccacatcccagattttctggttcagtaagtctggatgccagagagttttcatttctaacaagttccaaggtgatgctgatgctgctggcctatgarccacactttgagaactaatgacgtagttgaacttcccaactcatcaataaatcccacacttcttccccaccctctgcaaaacctgattgtccagttacattcttttttttttctttttcttttctttttttttttttttttttgagacagagtctcgctctgttgtctaggctggagtgcaatggcacgatctcggctcactgcaacctgtgcctcccaggttcaagtgattctcctgccttggcctcccargtagctggaattccaggcgcccactaccacacctggctaatttttgtattttttagtagagacgggrtttcaccatgttggcgaggctggtctcaaactcctgacctcaggtgatctgccccacctcggcctcccaaagtgccaggattacaggtgtgagccactgcgcctggccttgtccatttacattcgaaggcctctgatggcaggaaacactgtcaggaagcagcacattctaggatcttggagagcccggaaacaactaagacsggaaagccatgcaaaccttcctcctcccttaggctcaccatatttctttaacttttaaaatatcgcagagactatttgagaccttccagatttgtgcctttctatgcatctccagttcaaattacagcagacctcagacacttttcttttttgttgttttgttgttgttgagacaaggtctcactttgtcacccaggctggagtacagtggcgagaacacggctcactgccgcctcgacctcccaggctcaagcgatcctctcacctcagccttccaagtagctaagggcgcgcctccacgtctagctaatttttgtattttttgtagagacgaagtttcaccatgttccccaggctggtcttgaactcctgcgctcatgcgatctgcccctctgggcttctcaaagtgctgggattacaggcgtgagccaccgcgcctggcccctcagacacctttcaaatggtttgggaagggttcacacttcaggttattggccattttactaggcattatctgaattacacaccctgagaaggcaacattcaggaagaagtccctcaatctcttgcttctcttgaagtaataagaatgtgttggtttgcagaaaacagcccccaacaaagtcaatccccagcactagtgaagttcacatttttattctattttaaaggggaaattacatgctgtaatagttttgtgaacttcgaactatcatgcaagagtctagtgtatcaattctctctgtgatcaaacagaaaactatgcactaagctgctgatcttagcacttggccaggtgstgtcagtgatgtgaatagtttttaagaaaatcatggagactttagttaatggcctgactcgcccaattaccaaagaagcttgggtgctaactacagaaacgtgggatgacctctttctatcagggtttgaaaaggcaggcttagccacatccaactacctcctaaaataggatcataactattttacctgctagcccctaatttgagggtaagggactgatatctctttgactggaaatgaggatatgatttcatacttctttcggttctatagtaatagaatccacaaagctgaccaaaatattatgttacccaggagccccagactcctaccctgtcaagacctttgtcagaaccgctgaaaaacaagcaggagagatttgagttttacttcctcttccgtgccctggaggtactaactagcaaataaatagctcagctaaagggataaaaaagagaagcaagggtcttgtgtcatctaaataaaaaaaaaaaaaaaaaaaggccgggcgcggcrgctggtgcctgtaatcccagcactttgggaggccgacacgggcggatcatgaggtcaggagatcgagaccatcctggccaacatggtgaaaccccgtctctactaaaaataaaaaaattagccaggcatggtgataagcacctgtagtcccagctactcaggaggctgaggcagaagaatcgcttgaacctgggaggtggaggttgcagtgagccgagattgcatcactgcactccagcctgggtgatagagcgagactctgtctcaaaaataaaaaaatgtgggggaggggctctaccagcgggaaatgtaggcactagctaccatcctctgcttccaacagagccatctccactgccagcacgtagggcttatcagtcagtacttccacagtgtgttgtaccctgaacaggcactgcactggctcagagagtgccgtggtgaataagctgaagtccttcccctcatgggcatgggagatcaggagtgagagaaggctgaccacaggggaacatgccacaaacgtgttccacaggggarcaaagaatgctacattgcatgccacagataagtgctgtccgagtctccagtctccagcctatgcctcgcttccgtgcgtcctgggataaacataatgcccacaataagacacacagcacaaaatgatgttgatgcattctcggttttctcctctggtgactatcaaaaaacagagactctctccccttttaggtctctgggctggtggaagccaacataaggatcattttcagcttttagcaccaggttatgctaattgtccacagtgtcttctggttctatccttcccttccatttcctggagccctttatttttattttatttttttgagatggagtctctctctgtcgcacaggctggagtgcagtggtgcaatcttggctcaccrcaacctccgcctcccgggttcaagtgattctcctacctcagcctcccacgtagctgggattacaggtgcctgccaccacctccaactaatttctgtatttttagtacaaacggggtttcaccatgttggccaggctggtctcaaactcctgggctcaagtgatccgcccatctcagcctcccgaagtgctgggattacagttcctggagccctttcaatgtaaacctggcttacagtagtgccctcttagccaggcactcactaccccagctcaccttgacaacagctgttaaataatttccctcaaactcttttcttttgtgtcatgttattctccagcacagaatgccatctctcatgcttcctcrtttcttcatgtgaacccagtctttctgcctccctttaaaaccccacaccagctgccccacctgtgtccatgaccacatttctcatagtttgccctgaactcaacctgctcatctgtgacttctctacccactcccttttcatcaacacatttcctttccttccttcagattttaaaattctttcctccttgttcccatcagacttttctcattccatgcccaccttgttttggacaccacttggtttagccgacattgatttaaactcgttgatggttctgtgttcaagagttctgttgttccctgcggtcacactgtcatttcctataatgtggtaaaaaccacaagaatgagttcataggttctgtttcttttgacatccatctttctccttctctttctccataagacaaggattttactaactgttactttccattttacagtttacagtgggctttcattgacaatctattctttgatctttgtgaggaaaataagacaaatgttatcctcctcatttacagttcagtaagcactggctctgaagagtcaatgattcatctaaatgttcacagcaaagaagtggaagtgtctggactcaaacccaggtctttgaattctaattgcttcctgttcccacttcatcgtcctactctgagcattatcatacttaataaatattgtggatggataatgtagattattaaggtggcaaggccacactcaggtaggaattaactatttcaaagccatgacctgaggataaggttgggaataaaggcaaaaatgagaatacatcagtgtctttcacttctgattgacttaaagtttacaggaggaaacacttataaaccctaaaatttaaagaaaaaaaagttttaaaaagaatttggggtcttccctcgaaggccaagaaaagaggaaatacataaggcactcaattgggaactctccacataatggtgcttggtcagaggtcagaccaaagcctcggtcacttgattgacatctcagcactgccttggcaggaatgaccaggagcaatggaggctgggaatctgaagaactgggctctaattgtgctgctgctctgtttgtgaacttargctactctaatgggctcctgcagaggggtcgattgagtccctgaggtctcctctggctgtgacattctgagagtctgtgaataccaagaacacaagacaggtgtgagctgatcaccacgtgggaagctcacacctgtctctccccagtgcttccgcccctcacttccagccgtgccaaactccaggcccagtcagggtcaagttgccaattttgaagccgttcaaggacagttgtccttctgcatggggctccttccatcctgaagctggcctttcctttctctgcgactcactctcccttaggctactgagatttgcatgccactaattcatttctgcctctttgcttttagattaaaattactcacaagaaccaagcgcccatgatgatggggcctccccagaagagcagcttcttctcgttgagaaggaagagccgttcaaaagactaaacagtgtgccaaacaccagctaaaccaagagagaaagcaagaaactataatgcacactcacacacaatttatgtgcacactcacacatgcacacacacacacacatacacactcttctctaaccagtggaagcaaagccacccttcgggaagaaaacgtcaccttgccatacattctgtttcaacagtgggtacacccctaacagagccagtgccaacaaaacattttgaatggacttaggrcccatgaggttgtggctggcttaggcagcaacctccacattcccacaggccttgagcagaattttctgagactgaagggaaatcccsctttctttctaccagccctgcaagtttcctcatggacgctcgcgaggagcaggctgcaggtttcctgcctatggtgagatcagatgtggccaagggaaggagctctggttccagagaatttgcacaaagttccctctgtacagagacaaaamggcctcyggctctcagagcataatccttggcagggctcagcaggcgcacgttggtttcttggtcgtcctttgagtgacaacttctccgtgaacctgctgaagaggcagaaaggccgtggaaagctgtatttccattcttgggtttctgcgccgtcggtgggcacttgttattttccaggaaccttctcctggtgtctacatgtttgcttagaggcggctccaagagcccccagagctgcctgcatagcacaccttagatgtggtatttattttcttagttctgtgaacacctgggagggagagcggagaaactgggatttatttttcaaattggtgtcataatattgtgtaaaaagggaaggaaaaaaaaaaccacccccagcttctttctttttcaagccaaagcgtgtttcctgtttgagttccaagccctggtggcagactattcctgaaggcagaaaagatgggaaggaaggaactttgctggggaaaccaggagacggttccctcctgcttctttgcactcaccactcccagagtatgacctgaaggaccttctgatggtcttaacgtgtgtgcgcgcgtgtgtgtgtgtgtgtgcgtgtatatatatatatttagcctatatatttatatatatatatatatataatatttatttactgatggacttttcctcattggaaaaaaaaaacataggtagtatgagacagaaagtggtaaggaaaaagaaggttctcactcccccactccaccgtttcattgtcaggacgcatctccctgcggtgatcacaagggttaaggggaatgaaagtagctccctattatgaacgaagagaccgagaactcctattctggatcctcaaaacaagcatgaaagacctgctgggctggatttactctcccatttgtcagataagaaaattgagtctcagaaaagttcagagacttttccatggtgtcttggctaatgcagcttgagagtaggtgccgttacaaagatatttaatggagaaaagaacccacacatctcagagtagggtcatttctggtcactgaaaagtgagtccacttggatccaggttgccagggaggaacaaacgtacagcacatgcgtggatgggatatccccacacaagaaaacgagcgcctcatkctgcttcccagmggttctctctgacctgaatggaaaagaagttggtctgagatcgaaggtactaaacagatcatcagactgaactctccacatgtcacctcatcatggtcatcatagtctcttagtttggaaacaaccttggctgcagggatgacctcagtggagagtcacaagaaggactgaggcgtcttctgcaagatactgccagccaggacagaggggtctcagcagagctcagtgggcttcattcagcaagtgccagcattaccatcctttcccaagggcaaggccatgcagagcttcattgggcctccatccctctctgagatttatcagtggaaacttggacccacttgatatcgttccactgagctgcctctaatcttgcattggacaggagctttggacaaagaagggaatattaagattgtgtgtacaaatggcacttaactgtgaaggaccacctaggagcaagatcttggaccattctgctcaacctaacagtgcagaatgctaagtaaggggaaaaccaggccacctgaagaatatctttaatgatggtattcttggtgatgggaccaacaagctccagaattactacaggtactatcttggaagccacttgwttctgaaactgaggcaggttcaggtttggggtcactgattctaagacatttacagaagttcgtgcatgtgtttcagccatgatccccaagattgaggctattgagacatggcactatcaacaggtgaaattgattctcagagactcacaggtctcatgaaggggcagtgcagaaaatggcccttacctgctgcaccctagtgcacaggacttgcaatgttgcttgagagacatatcccaagtccttcttagaggcatggagtataacaacttcagtggaattgcacttccagtttggtaaccttagtaaatcttgtgttgttgtttaatcgtgccttgcaaatcatcctttaaacactatgactgtggtttcttgtkgtggagtccctcatcatagtgaccctcatagcaacctctgaggttagcagagaaggtattattatctcgatctcaatgaggagaacaaggcttaatgaggtttagtgacttctcaaagccacatggttagtcaggggagaacctaatcccttatttyttatcttattctgattctggccatgctacaaacatgttctcacctgccccccatgcttctaccccaacagcaataaaaactgtaaagcaggaactctctagtacattgtgttgtccctaaactgatgggctaggaattgtgtctcattatggcttagtctttgtgggttttccccagtgagttgagagtggagatagacctagtaggatgattatattcaggtcagagaccagctcctctcaagagagttctttccacagatggaaaagatacgttaaaattgccaaataaattaggaaatacttggcagaacctggaagagcctccagactggcgttacataacatgcatatacattatacatatgcacattatataaggtgacatagtacttaatgtgctgtatatattatgtaaattacatatttgtgagtaatcatgataaatatagagacccactaatcacttttttacacatactcagtgacagattaggaagttactttgccagagagtcttaaaacttactctcttctgctgctttggttccaactcctgccaaaaataattgcatcaacttttcccatctctagccccctcttctcttggccaaaactctcagttacctcctgtcccagctagtctgtgccttccgtgcaacactaccacaattgggatccataaaaatagaatcatggggatgggaaggatctagatgctcagatcccctatatgtcaggcctacacctcaacactcccaggcaggtgcatgtctaatgctaatattaaaagagcgggagttgggggaaggaggaagagtctaccaaccttccaaggaaggaaacttcacagtcttccttggccgccagctccgggctctaacagtaatcaatcaggaaattatttcaaatgtccagtctgagtccccacagcatatctgaaaccataatttcctaaaatgtgtctcccaaaacactagcatccatcaaatgttccgtgaaaaaagagttctgtggtcaagtgctaaatctcttctgggaagtacatagagagtctctgagaactcctagtaaagaaccatagagtcctttatttgtcaacatctatagattagaaaacactgccttaagaccaccatttattttgttgttctcagtggaggtggaaacacacaagtgaccatcctccacaataatatctcaaaaagtgctttttctaagacaagaagtctccattccctttttttttttttttttttttttttttttggccaggggctggggacagagttttgctgttgttgtccaggctggagtgcaatggcacagtctcggttaactgcaagctctgcctcctaggttcaagcgattctcctgcctctcctgagtagcttggattacaggcatgcgccactgtgcccagctaatttttgtatttttagtagagacggggtttccccaccttggccaggctggtctagaattcctgacatcaggtgacccacctgcctcagcttcccaaagtgctgggattacaggcatgagccaccacgcccggccaagtctccattcttaagaccctttttcttgtttctttatgagattgtttgcctatttttattgttcccctctacacatcttcaagcaagaatcaatgatctaggccctttgtttcctgagttgggaagggactggaaaggggattaaagagaagaaaaaatgaaagggtaggcatgatagcaggtagagatcagacttcatctgtgtaactccagagaccagaatcaggtctgaaaaacacagttgtagacaggttaacttctattcaatttaataactactcctggagctgctctaatatggaaagggctgccatgtatgggaatgaacatgcacctgctcttataggaaaaagctttgacctggttggatgggaaacaaacagtaactaatctaccttgccccaaaagctatttaaactgttttcataggcattaacgttaaatcagtaaatctattaattccctttgaacagcatttcttggtgtgtcccttattttctgaaagaatgaaaaatgactccaagagcaatttctggattgggagtactgaccatttagaccagtcttggacatggcaggattgacctgactcactggcaccctcaagggtcgctgatggtggttgtgattgctccttggtagccctgagaacttaaaaaatggattgtagtattaaagtcaaacagattttgcctttctaccgagatccatattaacagtttggaacttctaatcataaatatcagacctgtatcagacttgcaatagcaaggaaaaagaaactatcctacatctcaaattccaacaagttttaaatataacaggagagcagaattgtacaaactttcatatggagccattgattttagctcaacttgatgttctaccatattagagtgcatgtttcaactttctgctataaagagaraacaggaaagggagataagaaaggaaactcccagctgggcacggtggctcacgcttgtaatcccagcactttgggaggccgaggcaggcaggtcacgaggtcaggagttcgagaccagcctgaccaacatggtgaaaccccgtctctactaaaaatacaaaaattagctgggcttggtggtgcatgcctgtaatctcagctactcaggaggctgaggcaggagaatcgcctggactcgggagtgagagattgcagtgagccgagatcatgccactgcactccaacctgggtgtcagagcgagactctgtctcaaaaaaaaaaaaaagaaaggaaattcccattcattgcttactagtgccaggcacagtgtcaaggtcttttcatgtgctttcccttttgatcttcagaacagcctaagatattggcattgtactttttacagatatagaaattcatacatagaaaggtgaagtactttgtccaacagacagcaagtgatagaactaggacttgacacgggtctgtctcatatgaaaatctatgctcagccaggcgcggtggttcacgccttcaatcccagcactttgggaggtcgaggtgggtggatcacctcagttcaggagttcaagaccagcctggccaacatggtgaaaccccgtctctaccaaaaatacaaaatttgccaggtgtggtggtgcacgcctgtaatcccagctacttgggaggctgaggcaggaaaatcacttgaacctgggaggcagaggtttgcagtgagccaagatcatgccactacactccagcctgggtgacagaatgaaactctcatctcaaaaaaaaaaaagaaaagagaaagaaaatctatgctttttccactacattttagtgcctttaacattctattctaatwgtttccaaccatactagtatkctacttgaaataatatggcattgacaaattgatatcccatctgttcaacctctgtatagccatctaatcatgttcctactgaagaacttccagtgcttgttcatatttaaactcaacagcctccacggacagctggatcccaaaaccctggcaatcgaatcagtagccatcccttccttaatcctcaatgtcttcatgttctagctgaatgcaactcatttcccaggacctacacctaataggtttttttgttcagctctgtgagtgggagagcagcaaacagccttctcagatttaaatgccatggtcaacagtgactggccagcaaagggaaggagcactggggttgctgaagggagcctccagcaaggaggctctgtatgcaatcctcattagtgataggcgtgggctgggccatctgtgttccacaggagaacagaatggcaagctgcctttcagatgccaagagatgctatctaatgggaagatccagagagctcaaaaagcagagaagcatctttcctcataggcatctctgtgggaaaccagggacacagaaaaccaaggggttttggaaattagctacttaacttgctaggtgttctacccttgctgccacttcattcttcatgtccaaggtgcaggacgacaagcagagccttgcaacctcatctgcgaactaaactcccctagatagagctgtggtgaacctttgtaagtctgaaatctgtgcatggaatagcaggtacattatagcaagacatcagagtttacgattaagcctccaagtctcccaggggtcaggaaaccctgcaggtagaagagacggtttaattggatgctcaatgctgattccagagaaatcatcagaaaacctggaggactactctaaatgggtcagattaagaaaatgcaatttggaacaaagagggtaacatctaacccagtatcaagcatgcagtaggtaatgagtaaacatttgtcaagtgaataaatgaatgaatagctaaagtgggtatctgtacttctactctggaatgggtggggggcagggggatgaaagctttttaactaacaactcaggaacttgaaaccacaggatgtagagggagctcatgggggcctttaactacccagacatctgttgagtgatggatacagctaaatatggatcatcaaagggctttctaggtcacatggagggcagctacatgattcagaaaatatgaaattcaacttggacagaaagacagaaatatttgcaattcacttcttagagataaggtcagaattgacaaagaataaaagggcagcacagaagtagagttacaacacagtaagagatcagcataataagatacagattcacaagatgaaaagagatagagaactggattttttggcagattgatttgggcaagggaggtgggcatgaacactacagtccaaaaatagaaggaagaactgagaaatcctcaaaaaatattttttaagcctaaagtcgagtaaatkataaaatagaaatccccaggtattaatgacgttgttattaaataaaagctatcatttattatctagtccaaagcttactatttttatgaccacttttgaacttcacaaaaacctgtatggttctctctttgacaagtgaggaaaactgagaaacagagcaaatctcacagtgacagatccaggattcagatctgtcagtatctgccttcaaagtccaagtttctgcctgcagggccattaacaattcctctgagcctcaggaatggacagggatttactaccccgaaactaatcccctatgtgggacttactcccttctcaaactggaaacccaagtccctctcctcccttttcaacagagctggagtggaaatagcattcacatgtctagaagtgggggcacactgaggtggggcagcagccctgagcagcaggaggtccatgtcaacctcctcctaccttcccaggtccttgttcccaggcaccagctgggatatatcctaaggcactacttgagcaggatggacaacggtggatacctagtgaagaactcagccagatcacagtattcacatagtattaaagatcatactaaaagatatgcagagaccatagtaaagatcaggggcaaaagaaataaggtcaggtagtcaaatatcagaatttagtaacatctctaaaggtggagtggagatttggagtggccttttaaaaacatttcgggtgaatcataatttgggataaaaattactgcctagagtaatgcaaaaaaattgagcattttaagactcaaaaagcaaaattcttttaaaaatgaaatcttaagaggaattacaaggtgaggaataataaaaataataggccgggcgcggtggctcatgcctgtaatcccagcactttgggaggccgagatgggcggatcatgaggtcaggagatcgagaccatcctggctaacatggtgaaaccccatttccactaaaaatacaaaaaattagccgggtgtggtggtgggcgcctgtagtcccagctacttgggaggctgaggccagagaatggcgtgaatccaggaggcagagcttgcagtgagccaagattgtgccactgcactccagcctgggcaacacggcaagactctgtctcaaaataataataataataataataataataataataatgtatttgtaccctagaatatagaaaatgaaatgaattttaaaaccccacaatatacctggcaatccggaagaagattccagaaagtttgcattttctgttgagggactaaacaacagtactttcaaagtaattaatgaacttcttttgtcttttttatttttttaagaaaactggtaccaattggttaccagaaaatggcatgatcttcaagaaaaaaaagttttcctggtgaacatttcctctctccccaacatccttgaggtaaagggattgagaactagatcttttaactcagagaaccatacttgcatggaaggtgttaataacagagggtgtcacggaatcgctgtttggggtttgctattgttgtactctgctactaccagacattaaggtaatgataatagacctaggagaactaagcaattcctgcctcccgtctgctccctgtcagcctcctgaagcccccacaggttaaatatgcctcctgaaattagaacatctgggaataaattctttttaggatgaaaatgctcaaacatacaaaaaagtgcagccatgagtatagtgagcaaccgtgtacccatcacttcgatttaacagttgttaacattttgccctgtttcatctttttctgactgaattttttttctttttttttttttttttttgagatggagtgttgctctgtcgcccaggctggagtgcagtagagcgatctgggaatcactgcaagctccgcctcccaggtttacgccattctcctgcctcagcctcccgagtagctgggactacaggcacccaccaccacgcccagctaattttttgtatttttagtagagacggggtttcaccgtgtaagccaggatgatctcgatctcctgacctcgtgatctgcccgcctcagcctcccaaagtgctgggattacaggcatgagccactgtgcctggcctgaatttttaataagtaagttataggtatcatgacatctcacaccaaaatacttgagcatacatcatcacggaggattctctctgaagtgttgaaggttgtgtgtatcgtccgcattgctgaaggaaggcttcaaggtgttgtgcatatgagctctgtcatttctcaactgactgagtccagttgtttccaagcagaaattcatcaggacattaccatcactcatgaggagaaagtgttgggtggaaccaaagacggtcttagctgtatttgaaacatttctgattcttctggaaacaggaaagcaaacagcccatgaactaaattctcaaaagacactaaatcggaaagtgttataagmactaatgatgccagacagaaaaatgcaaaacagttggaggagtcagaaattcacctgaaagtccgggagcggtggctcacgcctgtaatcccagmactttgggaggccaaggcaggcrgatcacttgaggtcaggagttcgagaccaacctggcccaatatggtgaaaccccatctctactgaaaaaacacaaaaaaattagccgggcgtggtggygcgtgcctgtaatcccagctactcaggaggctgaggccggagaatcccttgaacccgggaggcggaggttgcagtgagccgagatcgtgccactgcactccagcctgagagtaaaactccgtctcaaaaaaaaaaaagaaagaaagaagaagaaattcacctgaaaaatgcaagttcttaattctgaaataaaaagctgtttaaagcattagtagttacagagtggttgggcacaatattattttgaacaggtaaaacaatagaacaccatgtctgcagatttatttattcagctaaaaaacagttttagttattgtgccatcacgtgaagaataggaagctagactcagggagtggataggctgctgtgatgtacagatactcccctccactagggcaggactgatctggaagtgtgtcaacccccgagagaacatctgggaagcctggttgaaaagctttggctcatttatgcagggtaagagagaatttttcaataggcaaaatgtatggaaagcaggtatcattccacttgctctgtgcgtagctgctgggatcaggatgggctgactgcacatgttccggacaagatggtgggcaaggtgggtggtgcaaaggtctaccagctcagtgattccgccaaacmaaagaaaagcaggcaaaaatgagtgatagcaggtgccagaatattcagcctgtctcagtcaatgaacgaaacgtgtttcccattttaagcacagcctaagggagaagtaacaactagaaaccaaggcctgatagattcccagcctgtgcacggtggagctacacgggcacctacctgacttcctacacatsgagaggaaagctttcttatccataccccaagtgcgcatctgcccgcctttgaatcattaaacaccacccctcccttcgccacccctttcctcacaccatggagttcataacaccaagcatcaccttctcttctcctgacactgacaccagaagaaaaggaagtctatgttgacggcacagagatgaaaattgcctccatcattctgagtgtaggaacatgttttcttcccagatcgccccctctttggaagaacacaatctcttctaagctccctcctccagcctaacccctggccctgaagcccaggatctgctgatcaaacacatgagctcactgcagcttatataagagctcttggcaggccttcccagagatggatgctgggctaggtctctgcacacttgtgcttgcctcgcctaggcaacatgactttttgtttctctatctcctcagaacagagaggcctatttgtactactgttcatcagtcgttttgtagtaggaaagaggaagcacaaagtttcttcctatttcccagtgattaaaagtggcccaacttcctaagggggaaaataagaattcmaaagacaaagctcacttgaatgtgctgagcccccttcactyggctgttttctgtgatggggccacaccgctgtgggttaccacaggggagcaaggatagaaacagagtgggagctgggggccacgcctgtgtgacatttcggaggactccagctcgaaggtcctttctgagatgtttgtgagcagggactagggcagagggaaagacaaaatattaggttggagcaaaagtaattgctgttttgcttatactcttaatggcaaaaactgtaattacctttgcaccaacctaatcgatgagaattcccatcttcccccaaaggggaaataaaaggacatttagggaaatctgtcagatagtctcaaaggtaggtcatctgcaagaaatccatcctgcctccgactgacttggtgagaagtcccatccattcccagactccattttcttaaaggagaagagaaacttttggaaaccacactcaggaactcagagaaacgaggaaagagaaaaagcaaggaaaagccattcatgaacccaactttcaaattcagtggatattttgcatggctcccaagargagaagggacggttgtatgacaggatttgtttctcctactgccactgacgaaaggaaaggaaacgcatgaggccctttgccgtgcccggctcccttctgccgcgtcagtcactccaggcctggggctctgaggcagggccagggaaggaagacgcaggccttagctgtggccattctcattctctttcctgagcttcgaagccacatcctgagggcacttcctacccacacatcctcgtccagggaaatgtgctcatctccctccactcagcactggacttctctcgcaaggccaattctggtgctcccttcataccaactggcaatagggatgtgggcaagtcatattacggctcactttccctacatgtaaaatggggctggatagggtgattcacacacttactaatggattcatcagtgaatattttgtttttaaagaatgtctgtctgggctgggcatggtggctcatgcctgtaatcttagcactttgggaggccgaggcgagaggatcacctgaggtcaagtgttcaagaccagcctggccaatgtggtgaaaccctatctctactaaaaatgcaaaaattaggtgggtgtggtgacgcgygcctgtagcctgtaatctcagctactggggaggctgaggcaaggagaatggcgtgaacctgggaggtggagcttgcagtgagccgagattgcaccgctgcactccagcctgggcaacaaagcgagactccgtctcaagaaaaaaaaaaaaaaaaaaaaaaaaagaatgtctatctgggctgggcacagtggctcacacctgtaatcctagcactttgggaggccgaggcgggaggattacctgaggtcaggagttcaagaccagcctggccaacatagtgaaacaccatctctactaaaaataaaaaaattagctgggcgtagtgactcacacctgtaatcccagctactcaggaggctgaggcaggagaatcgtctgagcccaagaggcagaggttgcagtgagctgagatctcgccactacactcaagcctgggcaacagaaagagactctgtctcaaaaaaaaaaaaaaaaaaaaagaatgtcaatctgtcaggcactgcaccctaatctcttaatatgtcgcaatgcagttctattactttttctccatcttttcccatcacattctgcttttctcaacctctacccacacccagagtctgcttcttcagcttttttcttttattttcatatttttcttcactctctgcaccctcccccaccccagcatggttctatttttagaatgttcatacataaaatcagaggattagaaaagggttttaaggggccatctgcccactttgttacctccaggcaaacctgtgcttaaaaggcccaggaaagatcagagggcatactccaagcccaatttcaggatgcactccagcatctcacaacttcttccattaaaaaatggcctcaacgtctaacttaaacccctctgttcaatactactctcctttttctctttacctcttgagtcacatcacagacataaagcacctttgtgagagagaactgtggggaagtttaacccatagtgacatagtggaacatcccaggccataacaaccacagtttcaatgtaaaaccagatccaggaacacagaatggactagaggctatggcagttagctggattgggcttctgtaaaattaacaaagacagaacaaatagcaaaaaaccaacaagcacgaccctactggactcacagtttctaacaaactatctcaattaacatgaacagtccacgagcaaggagttctaaaatcatagcccccttaggttggaaaggcccttccttagatgttatcaagtccaaccttttatgcagagttggcagccagcatagcacaaagtctgtctctgctgattacagctgaataacagatggcggtcattcagtactggttcttccatcagcatataaaaaattccttcaaagcaactctcccaggaccctggataggaggcaaggcaggtgttcacctggacagggcctgatgccctttttggtctgtgctaacctgctgaggtagtctacggtcttaatagagacagtgtggtctagtgtgtgggtcgcttgacaaggaggcagatttcaaaacgtgccacattttctttctgccttcttcagatggcaagaggcagacaactcaactaaagagaagaggatttacagcaagttgctgacccagcttacagcacagctgtcctcttccatagaatgggaagaagttttatgcctttatgcttctctgtaccatcaacctcaaagttcggtgggtatctcagagaaagtgttattattagcaarcagtcataattccaagaaaccacttgctaaggggttcctgatggatgattttctctctctgtagaaaacaagtaagaaccttctatcttggggaagtctggcaaatgctccatagaggctgctgtggaagggaatcattccacatcccatgttaggataaggcccgaaaccctgcctgggaaaacaagagcagcacacggagtgggcttcagtcctgtctcatttacagggtcttgaacacgccctataggcttctgggacctgtttttctgtatctgtcaaacaagggggtgctctaacgaccttcctgctgtagcgatcttgcttcactttgggtaaatgccacagccataggagaggaggtagggtctttgtcctcatgggtctcccaccaggcccaaggtttctccaagccctgctgacccaggagggccactcctagcccctctgccaagaatctactttccttccctcattgactgatcatgctcagaaatcagctaatttgggggtggggggcatccaacatgaaagaaacactacaaagaaactcttaggtaagctctctacctctacacacacccatacacatacactgacacagacacatacaggaaccctgaaatataagtattttcccttccatgtatcaaacctcttttgccctcttgaattgccagtgtgctgggagagaattcagtcccacagtggagaagcactgcttccacttacggaactcagctaaacctcagtgtttagggatgaccctgggcacaggttgaagctaaaggtcctaacacacctccattgcagtgcagaaatgcagactttaccagccatgattggggcagtagctaactaaaagcacaggaccaggatccagatccttcctttcttgctcttccacttccactgcctcccccaccctagatgtgttattctgtaacagtggtcgcctgctcgagactgctcatctgcctgcatagagtgccgtggacttgctctgtaatgcactgtatatgtgtatgtcctgactctgtggtttactgcaaataaaaatgacagcaggtggctgacctctgacctcctggtcatttcatgccattgcttgtgaaatcaggattggccrttcatgctctggggatgtacgtgctcctccagacacttctgtgaccattccacaggtgcacgctgctagagaggcaccactgatgtgtcaggtttaggaggggttgaaattctctgttgccaatttcctggtgttgaaggagggggagagagagccaaaagccctatttaataagctccagagagttgaacaatgagaacacgtggacacagggaggggaatatcacacattggggcctgttgagtggtggggggcaaggagagggagagcattaggaaaaatacccctgcctgtggggcttaaaacctagatgacgggttgataggtgcagctaaccatcatgacacatgtatacctatgtaacaaacccgcacattctgcacatgtatcccagaacttaaagtaaaataaaattttttaaaagccccagctaaacactttatatacatcttcacaccgacgtctcccctgagacgtggtcagcattttatagataatgaaacaggaggctcaaaaatggtgattaacttgctcaacacataacacaataagtaacccagttctgtctctctcagaccccaaaattcatgttctttcctctaatgtttctctaagtgtgggactgcttgcatcagaaacacctgggctccagatttccagggcccacccagctctccctcatcatgatgtctgagaatgggcctctgacatctggtattttaaaagctggggctgtctcatgcccacagaagtttgagaaccattgcatcactccatgcagggacagcaggactactttggaaggacagagacaagtcagcattttaaaatgactcggtaagaagtcccttccattcccagactccattttcccagacttctataagctcagaaaccagagcttatagaagagaacccctagacataagagactggtgaggaagcaggtctggaataaaagaatgagtgggggctgggcaaggtggctcgcgcctataatcccagcattttgggaggccgaggcgggtggatcgcctgaggtcaggagcttgacaccagcctggcaaacgtgatgaaactctatctctactaaaaacacaaaaaatagccaggcatggtggtgggtgcctgtaatcccagctactcaggaggctgaggcaagagaatcacttgaaccctggaggcggaggttgcagtgagccgagatcgtgccactgcactccagcctgggcaacagagcaagactctgtctcaaaaaaaaaaagaatgagtggggagtaaggctgtgggctgggcttcaatcagagttggctggtccctctctccagaatgtagatccaagagcaaatccacctgctggtctccaggctgaagctgtcctgagcccagggttcaagggcacaccaaggtggagctaaggcaasaggatgtgggttcaacacagcagcctcagagactgggtctgcaatagggcagcagtctcacaggatgactatggacgctgcagctcctacagattgctgctgcctcttcagcaccccaccaccctgcccagcctggcccaactggccagtcccccagatctgaagaaccattactgttgtctctctaggctcttcctgccacagtggaccaacaaggctcccaaagcattggaactcacgccctgatccacagttttctccatgtctctgctgtcatcctcgggactgggcgaggactctgacctcagggaatctgaccaaaatgttactcattcctacccattccctcctccttccacctggatctgctgagttctattttgtgccttcgagtctaggtggaggtttctgaaataatggttgggatgtctgaggtggagcactgtgagacagatgcataattgctacttgggggcagaacaaaatcctggaaatagctcagctgcccactcaactgcagagattcagctagcctcttactctcccagctgcaacactaactatgcgtgaaaaatattttcctcaagaaaatggcttttctgaagtcgagaaatcatgaaaacacctcctgtacagaatttgatataaccaaatcagcaaagcacttacattatgagtctggaaagcagtttatgatctagaattcttatagtgagaattttcttgaatctctgtagctaacaaaagaattgtataaacaaggaaaatgctggtccattcaagaacaaaggtctttagcagttgtgtttgcattttaaacaatagctaagaataagagatgcctattcgtttgctgtagtatttacaagactccctaacacacaccaccatgtttctgcttctacccccacttaacaggttactgtgtgtccatcaaagtaacaacactgcctttgttcttaaatgttcctccttcctactttccgttacactggactatcaatgattacagaaatatttctgaatctaaaaccttaaagcattctcagaaggagcagacagtcaacaaaggcatcaaaaacggtgaaggaagcagatcagcaagaaagatcagagagagcagaagcagacaatcgtggtctcagaattggcgggattacagagaacacttggttcaacctctcagccagagcaggacttctcttcacagcaccctgtccccagaaacagccccctttgcttgaagacttccacttatggacagttcaccactttcccaggaagtccatctgggaacaactgtctgagttttagataggctccaatggcatccaaatctgcctcctattaactcccatcattgggccctggcttggccactagcaacacagaatgaatctttcctctcttctgcaggacaacttgcagatatttggaaagagctacctcattctagctaagtctttattttttttttcctccagactaaacatcctccaaatccttaaatcatcccttatatgtcataactctcaaaccctaagctattcttgcgattttctctggaacaacaacagtttgccaaagttccttttaaaaggcaattcccggaactgaacacagcataatgccccagaaacggatggtcaagtggagagtcgcatcccttgctgtcgataccacattagctttctttggcaaccatatcactctgctatttcatcctgctctcatagccaacaacatctccaagcctcgtaggaatgataataaccaccactggtatgacgtctcagagatgacaaaaccatttcagaaacatgctcctatttgccgctcrcaacaacccggtgaagttgactgaagaggaggaaactatggttttccaaggcctcatggccagccctcaagccctgagcctgtgattccaaatccatgctcctccaaacacacccaggctgccttttcacctgaaccatggtcatttatgtatttattgagacttttgctcttgttgcccaggctggagtgcaatgacatgctctcagctcactgaaacgtccacctcgcgggttcaagcgattctcctgcttcagcctccctagtagcttgtattacaggcacaggcctccacgcccggctaattttttgtatttttagtagagatggggtttctccgtgttggccaggctggtctcgaactcctgactccaggttatccacccacctcagcctcccaaagtgctgggattacaggcgtgagccaccacgcccagccctgaaccattattaaggcccacgaaaatctccctggcttcatttgttcatgtctattcaaaatcagagtyttttttctgttccattttgtcatgttaacttctgcctatcctttaacttgcctatgtctttttttttttttttttttttttttttttttgagatggagtcttgctctgtcgccaggctggagtgcagtggtgcgattttggctcactgcaacctccaactccctggttcaagctattctcttgccttagcctcccaagtagctgggactacaggcacatgccaccatgcccagctaatttttgtttttttagtagagacgggtttcaccatggccaggatggtcttgatctcctgacctcatgattcgcctgcctcggcctcccaaagtgctggattacagtcgtgagccactgtgcccggcgcctatctctttttgacacctgtttctgttgtctgttgtattaaagaaaagacaccgggtcagagagagagaaggcagcagaagaggatggggcacaaaacaggaggagactttgggcgagaggagcagaaaagggagcatcttagaaaagaatgggcagggcggaatgacggctgcatgtggaagkgggggatggaaagactgggttccagtcgctgagaaccttggttggctctgttaccctaggcaagccccttagcctctgtgagcttcactttctgagaaggagggtcagaagtgggactagtcaattcccaagacccttcccagttctatgaatctaatgggcagataaggccttatcattaacccaatgtgccttgtctttttcaatccaatgaagatactgaaaatcagactctcctgaaatatttaacatgacttccttttgctaaaataaagaaaagcaaagatacctaggggccatggcaacaagcaacatttatttcatctgtcagccatgggtttttcggggggcatggggagatgggttacgacagctacttctcaagatataggacccaaaggaatcctcgagggggctgaacaagctctgcagccatgtcacctgataccttctccacagtaccagaggactgagggttccacaataaacaacagcctcttaaaccatgtgtggagggaaagaagctcctacttgctaagcatctcttgtgtgccttcctggggaggtcacaggataaatgttctttggttgttgcattaagataggaaatgtctgcatgcttttattcttccacagcagcgctgtcccttagaaatacaatgtgagccacatatgtaagtttaaatttgtttttttgttgtttttttttttttttttttttgagatggtgtctcgctctgttgctcaggctggagggcagtggtgtgatctcggctcattgcaacctccacctcccatgttcaagcgattctcctgcctcagcctcctcagtatctgggactacaggcatgcgctaccacgcctggctaatttgtttgtatttttagtagagacagagtttttccatgttggtcaggctggtctcaaactccagacctcaaatgatccacccgccttagcctcccaaagtgctgagattataggcatgagccaccgtgcctggcctaagtttaaattttctaataaccacatacaaggaataaaaaggaacaggtgaaattaatttgaatgaagtagttttaaactcaacatatcccataaataatcatttcaacatgtaatcaatataagacattattaatgaagagcttaacattatttttttgcactaagtcttcaaaatcctgcaggcattttacactgatagcactgggctgtggttagtagcattttattggacagagagcacctgaggcttcccatcatagcacttctcaaactacattgtacttgcctatttcattgtctgaattattcatccggctggaagccttggatgggcaaggactgtgaagttacctggtatgttcccagaccccagcagagtgcttgacacrgatataataggcctcaattaacacttcacaagggagcaaggaaggaaagaatgcaaggtcacgcacctaaccagcacggaggagaacttgggtttaaacctattcctatgcaacgataaaacccaccatcagccgggcacagtggctcacacctgtaatcccagcactttgggaggacaaggcgggtggactgcctgagggcgagagtttgagaccagcctgaccaacagggagaaaccctgtgtctactaaaaatacaaaattagctgggtgtggtggcccatgcctgttaattatagctattcaggaggctgaggcacgagaattgcttgaacctgggaggcggagattgcagtgagctgagatggtgccattgcactccagcctgggcaacaagagcaaaactccgtctcaaaaaaaaaaaaaraaaagaaaaaagaagaaaaccaccatcatttagccaaaccatgctgcctcataaacttcaggaagcattatgaaaaaaacatggtctttggtgccaaaaagacttgggttcaaatttcagttagacaatcagtgatgaggaactcacggaaaagcttgagtggttttgtgctagtgactttacctctctcagccctaatttccccatttgtmaaatggggacgataccagaaaacctttacctcacaggtaaccacgaaaatgacctgagacaacatgactagtatcttgcaatctttagactttctgtgtttccagtccctgtctagtaaaatggaaataaatcattcttatctggccaacacttaatcatgaggcagctttgaccctatccagtaaggggagagtaacaaaaagcaaaccaaaatttggggaagaaagccaacccctgacatctgcctccttattcgtttgttgctgttgttgttttcttttttgagacggagtctcgctgttatcgcccaggctggggtgcagtggcatgatcttggctcactgcaacctccgcctcccgggttcaagcaattcccctgcctccgccttccgagtagctgggattacaggtatgcgccaccacgcccagctaatttttgtatttttagtagagacggggttttaccacataggccagactggtctcaaactcctgaactcgggtgatccatcccgccttggcctcccaaagtgctgggattacaggcgtgagccaccgtgcctggccccttgttcgttgtttaaacagctccacacagcccagatctagccagggcagccatgcattgtgagagagctggagatcccctgcccggccgcactgccctttcttctaacatttgcctcagggattctcacatttagacctcctctgccccaagtccagtagaacccacctttgctattccgcgagctcaggaggctggaaactctaagaactgttctgggtgcggcagcccaggtagagaaggagcccagtaaacgctcagagattcacccacagggcccttcccagagtggaggccccagcgnnnnnnnnnnnnnnnnnnnncatacgaccaccaccactcaccccccacacacaccccccacaccacacataccatcagcactacacacacattcaccaccactcaccacacacacacaccccccacaccacacagacaccagcatcaccactacacacacacaccccacaccagacaaacaccaccatcaccagtacacacattgaccaccatcactcactacatacacactctcatacacacactctctccaccacacacacccccccacaccacacaccaccatcaccactatacacacacatccctatacctacacacaattctcacaggacacacactaaacaccacctagtaccatcactaccatacccacacacatattcaccactgtcaccacagacacatacacactcccatacacaaacacactccccacaccacacacaccacatacacataacctacacacacagaggcccatgcacaccatatccacaccaccccacatgcctcacccttgcccacacaccccgcaacacgcagacagaataatgacctacctcaaacactttgtctcctgggttctgaagccttatctttgtcaccttgatttgattcattaatatacagacattgcttctctcccctacttgattaggagccccttgaggacagaatgtgtttctctctttatttctgtaaccagcatagtgtttggtacattgttgaggctcgacaaatattcctgaatcaataaatgactcaactaatcagcccatatgtgtctatagggcctaaatgaggtgagtgtggagaagcaattatgtggaaccaattgtgcaggcgctgagcaggcccagcatggggcctgggggccgtctttggtggctggtcctgcctggtcctgctccactgcctcggtctcattccaagggaaatatttgttctgtgagcaaataaaatgtgaatatgttctaatctgttgcaaagatacacagagctgccttcagcctggtgcttagatctctgagggcacttcaaagaactgcaaaaataaaatgtcctctgtggagcgggaaaaatggagctctttcctgcccagagagaagggcaaatgaagactggatgacaagtttcccgcttgaagataacgtaaatcaaatctgctctgggcccatcaggaccccagacatgagaggtgattacagacttctcttcctatcatgctatgtacttagaagtgctgaacctgccgtttgaaaacacacagacacacacaccagaaatctttacttcatgcccatgtttaactaatgaaggagaagtcccagctcccagcaatgcgtgtgttgaaccacgtcttgtctgcctcgctggccagctgaactagccttttgcccactcaagtaccacacaccgtggaccctgtgtgcctacattttaacaaacatgcagaatggatgggagaagtgaggaagagaaaaacaaaaattcccagtcgcagaaaattaggaggatatctttgtattttgtttgtctcctactaaggaattcttagaagttcagaaccktccataataagctgtcatcggatacacttgtttccgcatagggcctcgggtttgattgcagggtttttaagcttctggcagaggaatgcaatgtttcaacgttgccttagcccaaccccgtcccttttcacaggctggggcaaaaaaaaaaaaaaaaaaaaaatagtgttgaactgtccagtgtgcaaattaaatcatttattaaaggctgaagagagagggtttaagatccccacagtggattctgaaactataacccaggattccctctttacatccatgttctgtacgtgcaagtctcttgtgttgcgctgtcgtgaggtcaggcaggcctattttgaattctgggttaagaacaagcctcagccatcccttagggcacagccttagctgccatttactgatcctcccttggtgtttaaatcctctcaacaacaaactgcaggtgagaaatattagtgtcattatcagcctcattttgttagtggggaatctgaggctcagagacatcaagcaacccgcccaatatggcccagctggtattagaattctgctttgccaactccaacactcgtcctgtcaccccggtgaactcaccaaggaagtcagcctgcctggaacttcacgaatactattcctactagtttatcattcaaagtaacctctattctctatttcattagatcgcccatttttaacatgtgtaatttaatttaaaaatcacacaatactagcccagtccattcaaaaggctttttgaaaacctctgtttcctttgaaaatggattgttatctatggccataccaccctgaacaaacccgacctcatgtgaaaatggattgtagtttaggttcctccatttcaaagtggaattgcaagacctccctaacgtgtttacaacattcctgtgctgagtgttatcccttctcccaggagccagattgacagtctctagcgcagccctctctttggctgacagctgtcattcataatggcaagggggcagtcctatccccatctaaaataggcaacagaatgtagccagatcgcctactgtcatacctatactaaaacacacacaaacacacacacacacacacacacacacacacaaagatattcacggtagtgttttttttaacctcaaaaaattggaaacagcctaatactcaatcaacattagggaaacaagcaaatcatattatagctataagaagacatactaagcaaactttaaaaattgagtttttgaagaatgtttaataacctagagccactcctatgacataatactaggaaaaaatacaaagctttttatcttttaaaatctccattatgtaaaacagcaagaaaaaaagacagggaggaaatatgcttaaatgttaacagtattcatttctagaatgatggatgtttagtttatttgtaattattttttatatttccctaactgtatacaatggatatagaatgattttacaatttaaaatgtctttgtaactcccaattagggtgaatggagaagattgattttaaaacttaacaaaaacaaatgcttttggagaaactgtaacaaatgagattattaaatatctgaaacctctctgattggaattaggccataagtttaattttttttaagtatcatgacagataggcatgcctgccagctgaaagaactattttacttcccacggcactcccttacaaataatgtaccaagtctttttaaaacaacaaatgtaacagcctacaggattctgttacttgtttaccctggacctgggctcaaaatggcttgaatctatctccaccattcaagatcagccctgatgaacaaatccctggtgtgcctagaagagggagggtggggaaaaaaagtcagggggaggagcaaatatgagcctccccacccccccactcacacctggtgtggagctttgtcaattactcactgaaggaatgtaaaactctgttcttcctaccggatccaagctagcagaggcagaaagcagcagcagcaggacatgctgggttgattccaagacactgaagagtgttgatagcccagacagccttccctgttcttccttgtgaacccagtcctgttcctctgagctttggggtgttctgagccgggacaagaaggcatctgaagaatgctttttctgatcccccatctcttcagccaggtctgtgctctctttctctcacctctctgctatgatgcacttcaacctacccttcaccctcatcaggtttgtcgttcccaaatttcccccttccatttgtcactcctttactctacaacttaccatggcttgaagaatcagacccaaattcctcagatccccaatacacagcccctacccaacttcctccaaactcacctccctcacccccaccccatcccacctactcccaccctaaccccagcacccaacccagctctccctgcagactgaacttcagtggcactccgaagttggaaagaaatgttccttcactaaaatagaatagtggaagcttgtccaaattatgctcaaagatacaattttctcaatgttaagtttttcccatcaatttttgttaaacctttggcactcacagctctgcctatctctagtgagagcccacagatggcaaggcgaaggaacaagtcccgtgtgaataatcatggaaaagcctcaggagcagcccatcacgtgtccttcaacagcttgtttatttcacagacacgtgctcatggttgtgattttatatgcacacataaaataaattcccattttctactaataaaattgttttggttcatacgatagaagtatataccacatgcttttctggtagtcttttttatttttttttagaaaaaaaaactcaggctgggcgaggtggctcacacatgtaatcccagcactttgggaggccaaggcgggtggatcacgaggtcaggagatcgagaccatcctggctaacacggtgaaaccccgtctctacttaaaaaaaaaaaaatacaaaaaaattagccgggcgtggtggcaggcacctgtagtcccagctactcgagaggctgaggcaggagaatggcgtgaacctgggaggcggagcttgcagtgagccaagattgcgccactgcactccagcctgggcaacagtgcgagactgaggctcaaaaaaaaaaaaaaaaaaaaaagtcttaatgttctactaagaaaattgtggttgctaagagccgggacatctcagtgactttacaaagtattgcctcagacacactcttcttcttccaacatatcagactcatacacacttatgccttcatcataccgttcttcttatgatctccatgaccccttttctgccaaagaatacttgggcattctgcaaggtcccatcctccatgaaggctttctgaactctgtcctgagatccaacagaatccctttcgtttctttggaaatcagtgaggaagagagaaacactagacatcagagaaaagtagtaaagaagaaaacactaagtgaaatctacaaaggaggaaatatcacattgagaaggaagatgtgggaactattgcatttaccccagagaacagctttgtggatcttactgaaaaggtcactgatggtcatgaaaggtgagctcctagcgacaagattcatacagaaaaattgggagagagcacaatgtattacatttctactctattccagatactctgctagatgcttttcaaaatattctatttattccttttggaaactttaaggtttgcattattatccctgttttacaaatgataaaactgaggctcagagagatgaaattattggctcaaattcatccactttgcaagatggaaacccatttccactgcccacatctacctggcactggacatcctcacatactttatctcattgaacagtcaaacagccctataagacaggagttattattcccatttttcagataggagactgatatgcggagaaatgaaacagcctgagccaacagtcccctagtcagtgatgacagagttgagataggatgtggggctttggctccaagttcatgctcttttcaccatatcccagctgccacaaggaagcacaggtataatttagtagctttgagagaaaacattacatctgggaagcagggggaggtggtttaagccactgaagatctttggataaataaagagcctctttcagacaagagtctatagagccattaccatattaccatatggattacctagttaccatttacatttacaaggtgtacacatagttgtaaatgaatgctactcgcattccagtcaggaatgtgtgggctggaatgggtaaaacatggatcctgtaatgaaaaattgcatcttgtcatcgaaagcagtttaactaatagggaggaaggggaagtccatatttagctggtacattcccctgtgatggagacagaccctgttggagcaggccctaaggtcagctcacaggttcgagacgaacattcctaggtgggaagatctagatgaaacccagataaatatacaaagcaattaggttatggagcaaggggcaagaagagtgaggaaagatttcaaaggcagttcaagtcaaaggtatacaaaattctcccaaccaggatgctacttgatgaagaaaattccttgatggtcaggcagaaaggaaagccttggaatgttgatttttcttggctgcctaaagaccctccagatgcatgggattgtatcccagggaaactggcaacaatggtgaggaccaggaacaccaggggtaagtgagacactgttttttaggggggaccctgaagcctcccaatcttcccagaccagaggagaagtggaaagtggttcttccaacctgatcactattgcccagccccagggacacctgtcgggaagggaaagggacctaggtggaatgagtcaatgaggaggtagaagtcctccttctgaacaagacttaaataaggacatgcaaatgggagacttgggaatttgggtgcaatatgaactccttctgggttgctaaatgctaagatgaggccctagggtcccactgagcttcatgccattcctaatctgaccaaaatgaaattcggtgtcccagggtccaggtactgctgctaaggaaatgcggtgcttccctccacacacactgagctattgcagaggccaggttaccagttcctcattcttctcccaccatgtgagcaaggcagaagctgcgcacctgtaaaacttaagtccacaaagagaaggtaacccagccgcccctttctcaggcacagtgttttgctgtgcggtagaaatcacatgttcattcacattttcagtcatcctttagtgaccacctcctaagtgccaggtgctgtggttggggctgaaggattcagacaagagtctgagaggttccctgtaagaggaatttgtgtcacaggaaatacagatgcataaataatgtgatctgtgctttaattgaagacatcacaaacgctgtgacgtttgaagaggtttttatcttttggttgattgagtttttgtttgtttggttggttgggtatttgtttgtttgttttttgagtcagggtcttgctctgtcgtccagggtggagtgcagtggtgcacaatctcagctcactgcagccaccacttccttagatcaagtgatcctcccacctcagccccgctaagtagctgggactacaggcacgcaccaccatacctagctaatttttgcattctttttttgtagagatgaggtgtcgccatgttgctcaggctggtcttgaactcctgggctcaaggtcttccagagtgctgggattacaggtgtgagccaccacgctcagcctggttgattgtttttaagtacctaagagatgtattcaatgattccaaaatgtgaagtgtcacccctctaatgattttctaagacccttgatgtcctgtccctaaaatacccattctagccctttcccagtcatatctcccccagacctaacattctacagtttagacacacatgaggaatcaacagtccctagatgtgccagctattgccaagcccccatatgtttgtgtgtgctgttccctctgcctggaaagctacttgctctgcaaagcaaagttgagtaattaatcattcaagggctgtcccaaatgtcaaccctctctaaagccttccttgaccctcacaggaagtactcactgctccttcatttgtactctcagaacccatttacagggctctattaagacacctgtaaatattgtacaatagctatttgttcctgtgcccttcttccacctcccactagactgtgaccttttctcagacaagtcctaagctgaggacaccagcaactcaacaaatgcttctagaagtgaaaatgaaatttactgctgtgcaaactcctatgtgtcttaccttaagaacccattaaaggtgattgcccaggccaggcacggtggctcatgcctgtaatcctagcactttgggaggccaaggcaggtggatcaccttaggtcaggagttcaagaccagcctggccaacattgtgaaaccctgtctccactaaagatacaaaaacgagcacggtgtggtggcgggcacctgtaatcccagctacttgggaggctgaggcaggagaattgcttgaatcccggagacagaggttgcagtgagccatgatcgcaccattgcaccccagcccagatgacaatgtgagactccatctcaaaaaaaaaaaaaagtgattgcccagccttatctgatagaaggaaggaccagtcactttccatggtcagatacgctcacccacttattgctgggactctatagtgttacgggctggggtggaggggacctaaggttagaaatacagtataataaaatttatatttttaaaaggctgtaacacatagatatagttgtttgggcaatagaaaacagaatgatacgcaagaaactgttaatcatgcatgaaaatggatacaggctaggaggttatatacaggctttgatttttcattctacacctttctgtgctgttgaaatttttgtcatagatctctgtcacttttcgaagaaataagagattaaaacaattcctatgactgcatcttaagtgaaccaactaaaattaggttgatgtttaccaaaagatgtgctagagtctcactacaatgttcatagcagcatcattaaaaatagctaaaactggaaactgcccaaatgttcactaacagtaacatgggtaaatgagttgtaatatactcatacagtggaatactatacagcaatgagaatgaatgaaatataactacatactacaaaatgaatgaatatcccaaacaaatgttgaagaaaagaagccagataccacattatacatggtatgattccatgtatataaagtacaaaaacaggcaaaactgaacagtgatgtcagaagccaagatggtggctaccctcgtggggaaggggatttaacaactggtaagggctatgaaggcggcttttggtgggatgaggaagggagccgggagtgttctgtttcttaatattggtattgaatgcacagaggtgcttactttgtgaaaactcatagagttatatatttgtgatttgtgtattttcttgtatgtatgttatacttcaattaaaaagtaaacaaacatgcaaaacaggcccaaattgaggcgcctgaacattcccttacatcaagctgataatccctcttgagagttggatgccgaacttccagcctcctagaaataaatacaggtcaacgtggagatgggagtgaaactgtgccccctgatcatttcatgagcgctagtgtcttgtacccaagtagagccttatggcaggaaggaacagacagagaacctggatgccttcagggctctcctgggatgggatgctgttctcatattttaaatctttaggcatatagcttggcctcttgataggagagaaggcagagaagggagaggagcggggatgagaagaggttttcagatgggtctggtttaaattgaggctgcctcctgccccagagccaacaggcaggcaagatagactattagcaagaaacatgatggggagaggagggaagaggatgtgtacttctttttaaacactcactgtggttatttggtttgacatggccatgagtgggaagatgcctcaggctaaaagggcagactggaccccgcatttgaagccaagcgatcaaatccactgacaggacatttgttctgggggctcaattgtcagttggccatggttgatcttccctttgtccaactcaaaataaatacagcccactccacaggcccagcagagcctcagcggaggtgggcgtctacagaccaagccaagagctgaaagaaccgcccgccttaccacccgctctccagctgccacattgaagcaggcctatgaagaagccccgctccagccctgccagccccttagtctcttccagtggagctgcgggagaggctgaagcaaggcctttcgtagctcgagacgggcaagttctgagtcagcctgctcctgctgtaggagctgaagtccaaggagggcacagaaggggttaacccctggtcacataaaactcaccaccatgggcataaaaggaagcaaaaagaggactctgagcggtcaaaatagattttgccaagtctacacatccaagtttgtccacttcctcattggaggggatgcttttgctgctactcagaacctctgggctctttctctatgcccattgcaaacacacttggtttgctggtttccacgcctatggcagatcagagtcagaaaattacaacagatgtgaggggctagagaagcatgtgctgaatgcatcgtgatgttctgattaacaacctgacattgaaaagggggcaggaaaactcggaagatccaacacaggatccaccaaaagtccagtagcccgaggctctttcatgggagacaggcagtcccccagatttctcaggggtagggaaggatgcaggcgtgtgtctggctctaggagctcttccctgcatggtgagatgaaaggactcaggaggcttgggagagattgcagggtcgcatggctgctgtgcagattctgctgcagagctggactcagttttgaagtcaaggagaagccatgggaagtttcctaagatttccatcttctttctttttttttttttttttgagatggagtctcgatctgtctcccaggctggagtgcagtggtgtgatctcggctcactgcaacctccgcctcccaggttcaagtgattctcctgcctcagcctcctgagtagctgggattacaggcacacgccatcatgtctggccaatttttgtatttttagtagagatggggtttcaccatgttggccaggctggtctcaaactcctgacctcaagtgatcggcctgcctcagccttccaaagtgctgggattacaggcgtgagccaacacgccgggctagttgtttctttttaaagttgtgggcttaagaaataaacctgtcagccatcagaaatctaaataggacatgctcttccaggttttcttgatagtggctgtttcataagaattgaaagtcagcaggagacaggagaaaggatgtcttcgagctcagtcaagaaccaggagaggaataaggtcccccagactggctggatcagaggctcaagaacatgcattctgtgttctgtcagagatctgacttgctcctttctaactgaggaaactcagacatggttttaaacctctcactttgaaactcagttttcatatcagcaaattgggtattattaccacttctaagagagattgggcgtattaaatgaaacactgtagtatgtaaagtgtctagcacagagcctggcatattggagatgctcagtaaacatcatttcccttctttttctaaagtggctttcatgaagacaaatccttgccagcccaggacaataattcagaagtctggctggagttgctgaagcaggttcctaaggaagcacagcagctctcactggcatggcaagcaagcagccaaagccctgagaacaaggtgaggggcaagatgacaaagtgagagactgcaggaactaagacgacagagcagagtgaataagagcaaggactctgttcaagatctacattaggtgcctgactccaactcttactagctgtgtgaccttgggcaagttacctaacctctctgtctcactttcctcatctataaaacggggagaataatgatatctgtatcacagggttattaggatgatcaagtgggttaatataagcaaagcccctaaacagagtctagcacagggaagtgttcttgcagtgctggccgctgtcattaagcacacacagcttccacagggcagcagagtggctcctgggcagatcctaggggagcaggctctgttgcttgggcacactcccttttttactatgtgctagctatgtggcctggagcaatagattgaacctttctgtacctaagctttctcatctatgaaaagtggagataatgataatagtacctccctcagagggctgttgttgggactaactgtgccaagtcatgtggagtgtttagcaaagtgtctggctcatattaagtactcagtaaatgtcagcttttactattccccggctggaaggaaccctaaaaacaatatgccccctattttttaaagagacattgaagctaacagatgttcttttctcccttaagtttttagggcctttatttctgaattttagaaaggaagataggattctttatctctcccttaaataaaaacacatttcagtaccttttttttttttttttgaaacgaaatctcactctgtctcccaggctggagtgcagtggcatgacctcagctcactgcgacctccatctcccaagttcaagcgattcttctgcctcagtcttccaagtagctgggattacagatatgcaccaccacgcccagccaatttttgtatttttagtagagacgggggtttcaccatgttggccaggctggtcttgaaatcctgacctcaggtgatccacctacttgggcctcccaaagtgctgggattacaggtgtgagtcaccacgcgtggccaacatttcagtaccttttttaccctttcctcaaatcccttccttccccccatacaagaataggaaaggactccaggagcactgtagcccacatcccaaaccctaggcaggtctacactcaccccggcatttctaacagagaaagaggagggattttcccagtatgagaaaccaggatcatgatgcttccatatttcccacgatcattttggtgatcagctcaagacagggttgcctgccttatayggtaacttgcttttggcattttaggggaaaattctaaaagcagttctctaaagggtaacagttctcaggcttggggcaaggtactttcttttctattcttctacactgttcccctctagacacactgmaaattgagtttaaagaacaagggtctagttatcgtgctgtgattgagttttgctactgccagaggacaaaggctagattgacattagatgaatgtgccagaggactggtctctctttttgttttcttttccaatcctgtttctctcctggaggagagggaatgataattagaacacatgcttgttcgacaaaacctcccatgtaagtaatgttcctaggagggaagcctcaaygtaatagacaaagaacttctaaatactacctttaactcttataaaggcaaagataacaaaagaagaggagccggggaggtaaatcataaagagaagaaggaagaagagtggagagaagatatcagtaaatatttaaaaatgaggagcccaccctgggcccaggagctggctcaggtcatcgcaggctgtactctgacttttaatgctgcagccaagatggctgtgccaagagctgtaccccttgtccagcacaaacctccawattcccagaatcagagactctgagagatggaacaatcctcagagttcttctatcctggaaaatgcattagtccctctaccctatccctaaatctttctgcataaatgcctcctgtgatggaagactcagggccagatacaatcttcctttgctggaccactccaaacatcccagagtccttcctaaccctatttggagctaaaatctgcctcctttgactttggccagctctgtcctttaccactctgggttgaaatgatgtttcccggtagtcgctgaacaagagaggcagatgctaggtctcccatatatgggctctgggatgtgaccaccttggctcctatccaagttcagcaactgactttcaagctctgtgaccattggcaaactacttaatctctgtgtctcagtttctcaactatatattatagaatggagacattaatagcctgaccactttggtactattattatgaggattaaatgagataatctgtgaagaattatatatggcatgaacaagtcatatataaagtgctgagtaaacttcagatactgaagttacacagcagactgtgggctcctccaacgcaaagactgggtcttattcatctctgcaacttttttgcctagcacgaagtctggctgaatatttggtacaaaatacatgtttactggataactaaataatcgcaataattaattggcaattattctggtgtaatcccctgcacatgatcgcgtgttcaagacaagcatttttgaaaaaaaatctatcgcccaatcctcccctgcccccacctgagccactatttgttactactcaacccagaactatcctacttctcttttcaaagtggaatggagagacttggcttgaggcaaaggtcacaagagccaaactccaggcatcaggtccaaccctgtgaggaagttgctgtgaagcgtgcggcactgttttcctgtagccaaagttataaagtgtgattgatgtgttacggtttagatggtgaggatatgtggctctgtgggctgtaagccttccggagggctggggcctgagagacttaagggaagaggagtaagaaagctcctttggaaaaatgagtttagagagcaggatgtcatgggatgggatggggaggagcgggagtgggggtagacaaaattggggaggaggaggatctgggagcttacctgggcccttcatctagctagggagatagagctctcaggaatgtcagcaataagctcagagcacaactgtactagtgtaagatctccagccaccaaacagaaacggtaccacctggagaaagaaaaagggcactaagggaaaactggagtcggaagcaaaatgttctaccaggaaactagatctcaaggaactgcttgttacatgttcagagtactttccatccatcaactcatgcccatttcagtcttccaaagtcaacagctccagcgtgcctggtcagtgctgagcccaggactcaacacgggtgctgcaggttgcttaggggcacgccaacatttcaagggctataaacgacagaccaagtgtccgctctgtttaagagacacaagtggagataggaaagaacctttgacttaagtgtgggggtggcaggggcaggaactgccccagagttggccaccgtgggacccccattgctaggggctctctcctgtcacttagcatctttcctccccaccgctggcacgcggcgtgaatggcagggcactccagcaggacgagaacagagctccgtcacaggcccccagcatccccggagagaagatagagccgccccacggccttcacaggagggggtaagggggcggagaggggagaggattgtttgtttatttgtttcctggaacaccctgttaagaatctcagcaattgcagttagtgccctatcgtttggcaagcagagccgcttctcgtcgttcccagctgcacgggatctaattcgcaaatacaccatcttgcattcaatacttaaatggaaaacaagcagcccggggagggaggcaaaaagtctgagtctgcatgcccgtttcggagggatttaggtttccaggtcggtggactggctgctgctgtccccggagaggatttctttgagcccgaaccctgtctcacctcgactacagaacccactctggcggaggttacgagccgcagttaaagagaaaacgggatttggttgggtcttaggccttgccagtacaaaatagtaacaaaaatctgtttgagagctgagattttaaaaggagatgctgcttattcttcccactggaaacctggttaaaagaaattaaggcctctcttaaaggtaactaagattagagggctcggtttccgttttctgtgtttctgtgggctaaacgcccaggtcggtcagcgagtttgtgtggaatgacgaattcctctcccctgaattctaaaatgataactttgcttggtgctgcagctgcgaacgtctggcgccaagagacccaattctggtcggggctttgctggatggagaagtgggggtgagtgggtaagggggaagagtcgtgcctcggtgaaaagtcgrgagagcggcgagaagggaagtaacggcggctcctcctggcctcggcccctttaagtgcttcactgactcagctaagcttccccctcaggtcgcgttttttatgaatgaaaaacgtccttacattcattatataaacaagcctgtgctgattggccaatggcccccggtgcataaattatgtaaaacagacccctgagggggtggagagagatgcaccgctggccaatgggggccggagttgatggggcggcttggttggatttgcccgcagacagggtaaacaagaggtgatggacagccgcgggaacggcctctggccaatgggaacaaggctgggctagggccgcgggccaatggcggcgggcggagcagcgagccgcggggggccgggccagcgctccagcctggttggcagctgcggcgcagagtccagccgctggtgcgcggagcggttcaccgtcttcggagcggttcggcccagcctttcgcccaggcgcccaggcccgctgcgcgcgtgcgtgagcgcgcctgcgccgccrgggccgctgcaaggggaggagagmggccgcctcaggtgagggggctttgcgggggcaggggggagatcggaaggggcgtccggccactggtccgacaggcccagccggctagagttcacgggctgattcagaatcttcaaagtcggggtgcagtagctggggtgaccccccccgggttgaccgccccctccccccgcggcccggtccggtttggttcytgggaggygtcgggcgggtgcggctaacggttccggagcgcggggagagcggctttccacacgtcgtgggggaggcgccccggagcgcgagtgcgggggctcccgagtggatgggggatcgcggagttgcgaggctttcacagtctctggagattcgagagccccgaggggacttggaggctcgcgagaagagacgcttggcggagctccgcagttgggaggagggggcgggaagcagtttgaggggaatgtctgagaggcgctgccccccagagcaccgggagggggtaaatgacacaggcaagtgcagcctgcgggggcgggggtcgaccaggaacttacgcaggccttgcaagtttcaggtggtggaaagtggacatccagtcgccctgctcccacccagcaggctgagggcgtccggctgtgcggcgactcgagaaaatcggggcgcaccggaacagcggcctggggatggtggggataacacgggtgtggaggggacagcaccgaaagatgcygcagcctcgcagcggattagggttccggccgcattttcagagggtggagaaaactcgggggggaaccgaactcctggtcgacgagggggtgccagggagagatgttgggggtggggggattggaagcggttggtagcgccgggcgccgcacctcgtttttatgaatgtgggtgactttatgaatgaagcgggtttctttcgttggctcgctgctccctgcggcttttttttttttcttccctttttgtgaatgaagcattgagctttcttcctaaaacgctggggtgaggggcctgcgtcggaggctgggcgtgcgttggaaatgggggcgggggcgcagctgaaggagttttcrtgaatggggaaggctgagaattgggtggaagtgtgtcttgttttgtgaatggggcccagcgctagagatccagttacagcctctacctgatgtggcggccgcggctcgctctcccattcataaaaccgggcccgctgcgcgccacaggggaggggcctggatcgcgccgctgcgctgtgctaaagttttcctgggggcgcccggggcgcgggtggtgggggggcaaaggaagtggtttaaactcctggatgaactcgagcctttccttcaggcttttaaaaaaattatacttggaatacaatttttctaaccctggaatgcctcttttccgttcgtttatggcagtttatttcttttarttttttagaattttttttgctcttccgggtgaagtatttcatcatgagactgaaaaatatctccccctcccgtcttctactggttgtccccttcctcctaacacattcacaaaatgtcttaggccatgatttaatctgacagattttcctaagcgacagagcactctctctttcatgcccctcaactcactgctgaggtttctcagattttgtatacggtttggtggcatttgagagaggcgttattctgaacatttcttgtggtgtttggacggggcacgcaggcaggctggcgcgagtgtttttctaggaagttatgaactgtgtgctattttgctcctctctttcctttgactttgaaaatatctgattccttgggccaaagtgctgcggaggatgctggctgtgaarggtgtccttgtatcctgcccacttatgaaaaatttgatatgctacacacagtgtgaaaaacaaattggatggaattgctcaccgggggaaaagtttcctgtttaaaattgtgtatatgtcaaacaaaagaagttgacctttaagcattttgaattgcttagagctggagtgagtgaaattaatgtttttccaccttttgttgacttaacggtgtttttatttgaagaataaaagtgtttaggaagatggtacctccctraaattgttactttattccactcacgttaggagaagttttctcccttctaaccccaccctttttccccagactcacacacttacccgtcctgaaatgagtttcatttgggggtgggggggtatgtctagaaaaaaatgattccgctatatgaaacagcctaagttttaaaagacctttggtagagatgcattgtaccacatgcaatggaattagtttttttaatccattacttttcatagacattttactcttttagaagttggagatgtcacaaatatctctgtaagtaaccagggagatatttgtgacattacagatgctatatctgtttagtcctcttttaaataaagagttgtgtgtgaagataagyatacctctgatcaatttattccaggaactatatatagtgttttaacagtgacctacaaaatgcttttggaaacaccatgtatgtcagatctttaattgccaataatttggaatacttaaacccagtttctctgcttcctgacactgtactgtcaaaaattaaattatctcttttttaaaaaccctactacaaatgccctggagtatatgagagaatcttgaaatcacccttttattttattttatttatttatttttgttttggtagagracagacagtagcaaatctgtaattttaatgatttaaataagaaagaaaaaatgatgactgggtaaatggatttggcacggagtacatcctgtacctctgataccattaatcaagcccggcattggtgtgtaaagcttgcaccttgagtaggttttaagtacttcacagaagggtaataattttgcacaggccctaaaaaaaaggcagtctaaaattgtttcatttctttttttcccccctcttagttaaaatctcccaaattcatattacaggaggatcccttttcccccagaaattactcaatgctgaaacctctcaaagtggtattagagacgctgaaagcaccatggacgggttttatgatcagcaagtcccttttatggtcccaggggtaagtttatgtggcttttggtttgttttgtcctccctctccaatatgagtcttccccctgtggacctctttactacacttgagccttcactttctgttggcctctttcagaaatctcgatctgaggaatgcagagggcggcctgtgattgacagaaagaggaagtttttggacacagatctggctcacgattctgaaggtagtaaagctttccctgattatgttgtggcttccctgctcccagtgacagtagcgtgtagattcttccctgtcttctccctagcgaaagaaatatcctcattctggggtcttctttttcaatttcagagctatttcaggatctcagtcaacttcaagaggcttggttagctgaaggcaagtttcatggatgtcctattttccatataaaacattttactgtgctttttaataaaacttaaaggtctaaaataaaaatctattttccagcacaagttcctgatgatgaacagtttgtcccagattttcagtctgataaccgtaagtacctttctggtgatggcacatttgttctgaaattgtttggtcttagatcatccatgtctagaatatgcttttttcagctatggccagatttagacagtagtatgcatttagtttcttctaataattcagaattaaccctgaaaacttttatttcataataaaattatttctaaagtatttctactgtattgcaggtaagatttactgaacataattttatcctaaatttctttttaccttaagaatattgtaaagctgactgggcacagtggctcacacctataatcccagggctttgggaggctgaggcaggcggatcacttgaggtcaggcattcaagaccagcctggccaatatggtgaaaccccgtctctactaaaaatacaaaaattagccaggtgtggtggtgggcgcctgtaatccaagctactcaggaggctgaggcaggagaatcacttaaatccagaaggcggaggttgcagtgagctgagatcgcatcactgcactccagcctgggcaacagagcaagactccatctcaaaaaaaaaaaaaaaaagaatattgcaaagctttaagctcaaaattataaattaactgacaaaatatatttggtgttaggccaagcatctattaatcacacattgttttatggcttttttggggtttgttttataaattaagtccttgatgtgaatcatgaacctgatatttctctttttcttaaaggtgcagaaaatagttaatggaaaactccagttaactttggcttcatccaacatgttgtcaattttgtctctacccctaagctgacaaggggtggtcacagagtggcctgatttactcttacttttcgtgtagttgctgtggcttttctcttcagagaagagaaactttttcttaaaatggccactaagtgctcattactagagagaaaatgcagtgggaagctcaaaagatggctttcaacactggcaggggcatggttactttgcactgatcttttggggctgtcctcaacaggtttgggagcttttatggtctaggcagagttatgaaggacaaagccggctgatgaaatttgagcagcacagggctgctctagagagcattagtcactggcgaatgagcaggtttaagagaggcctggagaaaatgctgcctctcttgagagttgcatcatagagaaattcatgtctcttagtcatagtttataatagcaagcacctgagccatgcaaggactcaatttctcattttggaccaacagattcttcccagctttgttttatctctgggtaggtgggtgtatgtgtgtaaaaatgccactggagagagagtatcttaggtctctctctaagtaaaaagttgggtattccaaatcttttaaatgtaagagcagaggtaacagctaaacattccttaatgataggcctcatgtccaaggcacaatgccatgaaactgtaaaagggaataaactggaacacacacatgcatggttaccttagctttgtcacagcttgctgtggatgtgttctatgggagagtaaatgcatgttaattattgccctttgattgctttcgagtgattgggaagcttgccactgaaagactaaataaagataatccaagtgtgtgtgtgtgtgtgtgtgtgtgtgtgtgtgtgtgtttgcaagatgaaagacagggtttgtaatccaactttgttctgtgttgacaatttggcccagcctttccagttcttgctcagagcagcataaactgcagtctgtttgggaggtggctttcttggcagaggttctttgaaatgcttttatgacacttttgtttgtttctctgtaacccaaaagagttaaaagggagatgagatggctgcattcaaattgattgcatgtgctgaagcaagggtatgttctttgtcagcaagcaggatttatatttggagagatatttatctgtgggaataggctaaagtgaagaaatcaataaatgtgttttggctctttagaaataatttctgctcagcaaatagaatgtgctaagttctttaattaaaattccatacctcaagtggaggtaatttgggagatgtttctgcttaccaagtatgatgttttttttactttgcttactttttgttttaactgcctaaggttgagcctttctgtcttttaaggataaaagagatggttgactagcctagaaaaggtcttctaatgattctttccctctgactttatttcttgaggtagagcttcaagaagggatagattcaaatagaataacttgcttaagaagcaaggcaagaacacaaatgtgggtggtgcatctttgagccattcattcttgcaaaagcaagtttgtttgcctgcagttcagaccaacagccagaagcatgaggaggagctggcagagcccacagccggctgcatgcacttacttttccatgagcgctttccacagcctcgagttcaggaccagcttcactccagtcattttctggaagagctcgtgatttttttcaggggagggaagaaaactcattcaaatttaatgaaaccttatgagttggtttgactcacttaaccaatgaatataagccaaacttagatttgccaggggaaagcaaaccttttttttttttttttttttggagagagagttttgctcgtcacccaggccagagtgcaatggcgcaatctcggcccacttactgggatgtccacgtcccaggttcgagcaattctcctgcctaagcctcccgagtagctgggattacaggcacctgccaccacgcctggctaatttttgtatttttagtagagacggggcttcaccatgtttgccaggctggtcttgaactcctgacctcaggtgatccgcccaccttagcctcccagagtgctggaattacaggcgtgagccactgtgcccggcctgtaacaaatattcttaccagtggccactggtaatacactttcctattaataatgatttgataattttccattgtatatgtgtaaatttattgtatacatgaaagaaagagaaatactaagaaatgtaggtaatatttttattttggaatgtcagttttaaagattatggcttttttttttctctaaacactaaaagttcaacttctaaagagattatattttgtaagtttcttagaattgggtttcctgcccatagggatacatccttaagtctgatttgagtgaatgaaaccattgcttttatatcttatagaaatgcccagcttacttctagctgtacagatttcacctctacctcacacatatagatatcagtaaagcatggagactctgaaaggtcaaattcaagggaatagaaatctatagatcatagggattctaccagtggacctcattgtcccttggtcctaagaagtaactctgaagatctcagattgcttgagttggatgtcctttgtagagacaagcttgcccagccccctcctttcacagctattcccaaatagctgaagagactgaccagtagtgggggcagatgggaaggtttaggtgaagtaagaggaagatgtataaaataatattcttaaagaagctctcacaaagctgcagagccagggagtagtggcatattcaagtgtattcagggtctccattatttcagatacctggagatggtgttcaggaaagcatctgggaggcctctggctgtccaattcagcactcacttctcttccttctatgatcctgagaaagttactcaataccttcatgctttgagtttttccatctaggatttggaagacagagagtaattataaaagaaaaaaaattataaaaaactgacatatttaggctcacacctgtaacctcagtgctttaggaggccaagtcgggaggatctcttgagcctaggagttcgaggttacagttgaagcgagtagtgatcacaccactgtaccccagcctaggtaccagagcaagaccctatctctaaaaaacgaaaacaaaagaaaactgccatgtttcctagaagacacctttcgtgtgtatacagataaaactgtgtacatatttcctatatatgaaaaagtgtttgtgcatgtgtatatatctatgtaactgtgtatgtagctaaatgtgtaccttaacacatagagcggctaaaccagggaatctgggtcagtgcatagatgtatgyacatatttactacacattttcatagaactaactatgccatggataagattggaactcaagagtgtttcaaagtcggggtaaggtgatgtgttccattcatttttctgaactgactgggtacttaaagagtgtgttactagattttagcatatataaatagcagttttttaaatatacattttgggtctgatttttaatctcacttattaatttcagttatgatattataaatatatacctgttagcatcttgaataactaagatattttatgctgagtagagagcatgataaaaatcttatttcaaagtcatggcctccataccaaatacagcctagagaattgttttaagatccaaatgaccccattttccccttgaagtgttctttttagatctgtgtttcaaagagaatggaacaactggaggaagtacaagtaatttcctaaggaccagctaattaactgataaaatcgacttttcataaatacattgcaatagacggctggggaaataggattaactgttatgacagcccttgagcctaaaacacattgatcttaatcctgtttcacgatgagattattcagctggatttctttattaatgtgtgagtttagtacagtagaggcagtgcctttcctttggagagggtacatcattttggtctttggtcctaggtgtggtgtagcaaaacaccacgttttcttgcttgggccacctctattcaaaaggatcatcctaaagtctttttgtttggcaaggtaagaaagaaaacagtgggcactttaaaaataagaggtttgagggaaaacaaggccattggtttatacttttcaggaatcagtagttctgaaggtagaaaagaatgctgatgaaagcgtgaggaaaacatggaggagagattctttgactccaggttttacagtgttactttcaaagtgtttgttagttagcccagtaccttactgctgggagggtgctaaatgatttgaaatccttcctgttttgatagcctcaaagattcttagactcagtattctgaaggacccaagacctacagtacgcatttacttaaaggagccatctgttttacaaaatctgctttcgtctacctttaattcagttaggcttatttaaaactgaatttttctcttacccttctgtgtctctgcgctgttagtcatctaacaaaacccagtaggcttaccagtcctttgtatttggtgagaaagatttgggacggggagttacatctgtgtcaagatcacttgtgtaggtgccagaagtaacaaaatcctggcatccatgaagaaattaccatttatcccctcctctttcagcattcttcagttttacaggagtaaggcatgggtagcataatgaagccgaaaatgtgtactgtctcccatttctaccatctagtagtatcattgttttaatttcagccctagaaaaaaatgtttcttggtggtggggtggggtgtgtgattctctgccgagaaactgttccctccacacatttcttgggttttagtggtggtaaagtacatccagcctcagaggctgacagccccctctcgggcatacggctgcccttgaggcagcttgggccccatctgtgccctggcacacagtgcttctccacttggaatccaaggagctcagaggcttgtcatgttgcagctcccagctcttggacaagtgccaggcatgctgatgccattaccggattaggttgcttttttaaaaattcattttgtgaactcatcaagctcatttaacagaggctttggtcgtcagtttctatcattgtcctatccctctaggcttggcttaaaggagtggcaagataccaggcccctagtatgtgccggcactagttagagtgtgtatgtataaattataaccataatgtaagtacacctttgggcctggcaggcaaatgacagtgggttagcaactcagatgttaaagggaaaagaattccccgtaagaggactctgcatagaaaataaagggggctcccttgtttaaaaagaaagaagcatctaggggaaaattgaagcagagagtgcaagattccagggagcaggataagatctagttattaaaaggccaggagtttgaggctgatctgaacagccgaggcatggaatggggattctgtggtcagaaggacttcagagaaatgcttccagtggcactgagttcgctggaggggacatgagggcaggcagtgagaagaagcatacataagacatttgaaaatagccaaatatgtgatgaaaaaaaggaaacaaccatgagctaaaatttatctcctggatttgcttttcataaagaagtatgcttttccttgaaataaagtctggttgtcagacgggctccatccgctttccctcagggtgattattgaaggtttggaaaaaatatctaagaagcaaagccagttttttttgccttgtactttgcaaagtctcggcgtagatttcaccctccaaccttagatctccacattcttcccttttgatgtctcatgagcattcaggagggtattctgaactcttcaggctggatccaaagccaaaaaaggaactgtgaaattgtcttaataggtagcttgtcccctcctctgcagccagaaaatctggtagtgtctccagagccctcctcccctggggaggaagccaggtggctcccgatgtagctaccagcagtgaatgggaaggaaggtctggagaggcaggcttccagagagagttgtgccctaatgcaaaccagctcaccctggggcaggagaaataccactgaagtctgtttctctccgctggtagctacagccagattctgaaccgaggggcacatgatagtttttcttttgcctttcccgttttgccagagggcactttctgaccttacttctagcggacttttgcacagccttgcagatttccacaagggtcttggccatttgaatcctaggaagggtgcacagcaggcaagatcccctgccgtgtctgaatttcttacgtaaacacagcgtactgagcgagcaagcgtccctgcggcgacagctgggcgctgagcactattaggtctgccccagctagcagagctgcagattccccctcttgcctgaatggagcattccaaattggttgtgaatggagggcggggctcacttgcagactttttcaatgaataaccagaccccattgtgcagcccgtggaaaaacaaccaactcaaacaacactgggactgttagaaatatgcttgtgattggcagcttggagagcctccaaaattagtttcctttggcttccctgctgctccctgttctccaagcctgggcttaatggggtttgagttttcttttaagtgctcactttaacccttaaactgccgggctgatggcctgggattctggggaagagctgccgctgacccacaaagccagtgaagcccattcccctttctttgtctctcattttagactgtagctgtctaaagggcgtgataataagaggagagggtggtttagcttcccctggagagggaggtgttgagacttgatctgaggctgttaaacccttttatctccttcccgtggggttgtggctttagctccccattgaggattcctgcctgctcttctctgacctcccctctactccaggcctgaatagcccaggtgtttacctgccacgacacagacacttcttgcttaggcttacaattttaacacagggggagacaaagttgtagtttttctactcctttgccttcactcctgtttaattttccactgtggtcagataagtattttttaaacgaccgtactcaaacytctggtactgagcaatgggggaacctcactatggctgtaaacccttccactggacactaatcaaatgcattgcctcccaaaatgaacatccttggaagtaccagaaaaacccagcctctgagcaacccccaaaccaaagtagcctcatcatgccaaaactaggccaggttttaagggtgcacgtgcctcaaaatagcatccagccttgattgattgattgattaattggccaagcgggtgtgctgggggtggtcttgctgtgttgcccaggctggtctgaaactcatggcctcaagcagtcctcccacatagctggcattacaggttcgagccaccacacctagctgcttccacacttaaacatcctccaacatcttacctggtagctcaccggcagctcacagacacacgtccagtgttctctgtgggatagcccagggatgtatgatgagcataaaaaggacaatcagttaaaaggcaaaacaaaacttaatagtaatgatccagagcaacttcctcaggattttaaagagctcttcttagttcctactcttcatcctcacaaacttaataaggcagtttgcacttgtgttttgcctcaaggatttttttttcccttgctgtaagttggccttgcaagcatgccttcccttccctattaaaaaaagaacaggcctgggcagattgtccttttgtgagagagtttgaaacctctcaggaggtaaccctagatatcagctgtgtaggaggttgctgatatctgtgtttctccagaggggctgaaaaggacttcgcttacataaacactttcagctgagtgcctggaaatgctttgtaatggcctgcaagagcacttaatgagggtcttttatacttttcccatagaaaaggtagaatagaagagggggggatgtctctttcacatggtcacccacagtaaaggccggatcctggagcctacccctagtttcctcatctgaattttaatagagaataattgaggggggataactttgctgtgctgagggatatctcgactcagaaaatttctgcttctcctcaactccctcttcattttttttcttccccagcagccatggaattttatttcttgcggaagaaggtggaaacagcatagggttttgggaggtatttagtattttgacaactaataatcatagtccctgcttccccatttttatgcctattgaaacaggaaacaaatcacatttcttaggctccaagtgtctgcagaagcagaggagccctgtcacgtgtttatgtcccgcctcggccacagcgcctgctctgcgcactgtggacacctggtgcatacagcccgcacaccaccgcattccctaccacatgcccttcccatcccagctgccccagcctccagctggtggggaagtaacactgtaaagggtctcaaacccagagttctgagtccttgggatgaccttctagataaagagaacaaaagctagttagggctatttctcattttctgtttcctcttttaaacacatacactagccaagtgttgctaggctgcatttagactttgagcagctaatgctatgtttcccagtaagactgcatgtgctagagagcaagtcacagtttaggcacccttgacgtacttgctgagtttctgcttttaggagaagtggggctatagatagaagggaatggttctgggggaagaaactcatttccctagggtttggattttctcctgtcagattttaaggatgaattttcaatctgaaattaaagataagattttccacagtgcttaaatcctatttcaagtactgttaacatttcactttagtgccagtgtggatgagaattatgtaagttgggagtaaattatagaagggttgttaaagcttaaggtttagttttgcaattttttttcctttcaggaaaaatgtcctgtttccccttatcctgattgcgtgatccagtgtgagcagcccttcatgataaaatccactgtggttgatgtaaggtcacagtagaggaagccgccctgtcatctctaatgagttgggagaacaagggtttccttagacctctttctcaatcttgaaaataaaaccaatagttgtctatcatatttctacaggttgagtattaaaattctttgaagagctaagctgcccaaggaaagtagtaaaacactgattcaaataatgctcagaatcctcctttggtgtaatcctgccagtccctcacatttgtatgctgctggtctcttaagcatgaaagtaaccaacatgccagctctgtggctgtaggtctaaaagaagcctatggtagtcgaaagggggcggtgcattagaagtcagaagaacctcttgtttttatcttgactctcctggagtcagttccgtactcacaagcatgttacttgactgttaaatgctttggtttctccacatcccacaagttctgagatgcgacactcttatgcaattagaaatattcatcctgtataaaatatttttaatggaagagccccgtatgtgctaatacttgagccctacttcaatcgaagttggtctaattcttttctcgtctcctgacctttaatttctaacgctgaaattcaaggcatctaggtttccatttttggcgttctaaagtaacaatcctaaattgttaggctaaatgagtcctttgaagaaagggaactgtacaaatccaagctgtttcaagaaaaatgctgaagtgtagaaagaatatgaacttaaaggaagtaaatctgaaactagttcatctgggtcaaaaaaaatcactctactaccattggcattcagttttcttccttatttgataacagaggttttctgtttggaaattactgtctgcaagaggcaattttgtcccgagaataagatgcagctattcagtgatagataatcgttcttacccacaggtcaccatctatgaatcaggacattgctgatttagtactttacacccgtggacggaaggctctcctcccatccgtgaccacttcttttgggaggaggagcagtgacgaagcattaatacaaagaatttctttccttgtattttagccagagttagaatagaaatctttacaaatcacccatatcattcgctgatagaagtgaagaaaggacaagaccagtatcccaaaagccagccctcctagttgatgaccaaaggcatgccttgccaacttctctacccttgcaaacttgctagtgccccataggtcacctttgatgactcttttactccaaaggcccgcaacaggtccattgccttgagctcttccctgggccttctcagcctttggagagtgggagcagctttcagcctcatgcagcagaaaaggtagacagtgttcaggaccacatttgctcttcctagccaaagctattgccccaccccatctttccccctgtctgtccttgaggacctgggtatcatcttagacttgatcacatttcttctctctggaaggagtaaagaggtagggcaagtcttgagctcccccyggagtttggagtgccccccacacttgggccggtcaacctgagttgtactgtccaacctgtgggttacaattacatgttagacagtaacctcccaagccgacttccatgggcagaatttagtttttgtcttctaaccaattgtatttcatctgggtatttgattgccagataccctgtgctggttctgctctctggctgctaccattgctgtaagcggccatgtgaaatgggggatgggaaggaggcaattgtttgctgaatgttgcaatccttgagccatgcttagcagaaggaaacctttaaaccacctccccttccccaggttatatgaagccactagataatataaaccttatagttcaaataatgagatttttaacagtgtgagaatgctcccaactaaggcccttttctgtaaagtgtaacctccttgtctagtcattcccccttcccacaaagaaattaaaattcctttgtaagtataaaatcaccattttcatctttccctgcttttacccctagccagacgggctttgttctggggtctgctagaagctacaacctgggggtcccctaagctggaattgctgatatgctggatttctccattgttgaatctatcctgtatctcatatagcccacattccagggagcagtaagggcataaaatatcataacactggtcttatacaaacacttgactctccagaactctgcaaggtcttgtcttcaaagcaccagttctatatacagccagcatttcccccagagaaagcaatgttctacaagcccagtacatgatatgtgtcacaacctagacccatgttgctatcgtcagctcgagtgcatagcagagacttagggttatctgaggtaaacaagcaatggaggagagacttacagagaatggcctcatggtcttaactgcttctcggtaccagttccgtcatctattttaaaacccaggtttgaggctgggtgcagcggctcaagcctgtaatcccaacactttggggggctgagactagaggatcatatgatgccaggagattgagaccagcctgggcaacatagtgagaccccgtctctttaaaaaaaaaaaaaatgtagctgcgtgtggtggcaggcaccggtggtcccacctactctggaggctgaggcaagaagctcgcttgagtccagaagttgagactacagtgagctatgattgcgccattgctctctagcctgggtcacagagcaagaccctatctctaaaaaaacaaacaaaaagaggtaaaatgaaacccaggtggggaaaattttatcaataactcttaattcctgtattctgggagaaattccactgtctttgcaggcaacctcttagagatgtttcagataccattgtctactaatgctatttatacattttcaaagttggttcagttcttttctaagctccttttcttccctttagtttctaacttttatattcaaggcctttggatttccattttcagaattctagagtaatcttccagtgtccttaataattgtgtttctgccaccacacttaggaactgagagtgggctttctggagatagtctctatgctgcctttcaagcaaggtgcctagcattttttaacatggcactcaccaacaaaattcctcagcttgcatttcaaaaatcttccccaaaaggtcttggctcttgaatttccagacacttgatacaacctcatctactctcatgagcaagaaaggtgtctccttccctcacttcctttcccactgtggcaagacttggctctaatttcattggctgctattacatcctggtatttctagccattttcatgcaaggccatcaaaacttcaaaaacttgaatctggatcttaggttggtcttattcctataccaatgtaaccctaaccctattttttggatatgtctttcccatagtccatgtcatgataatacattcaaagccttttattttgagctgattgtattaccccaagtttctaggtctaaatcagcaagaattgagtgttttgtttgtttgttttgtccacacaccagttcctgaagcctctcttctgctgactgtagttttttttcccactgcatgggagaaatctgattcctgaagccaagtgttccaggaactagctttaccactccctaatttggctcttgcgttatttattgtacagaagatgataattggccttataggaagggattctattctgtaactgttcactgatgaattctgctatctcatggttgatctgagaccctggagccctgaaatataccaccaaggtgacagtcagtcctttggttcttgccgagacatatgacaaatagcaaaaataccccagagtcatcaacatcataactcccttccaccaccatgattaattgctaatctaaagtcctgaatactatacagctgtgccagttctgaagcttctttccctgtacctgctaatagcaaaccctatcccaaagcacaagcacaaagcacaagccttactttcttcatgtgggactttgcccaggacaaatgcagctgttcttgcagaatgagcctgccctgaaatctcagcccctgcatgtggtatggccagccagttgttggcttaccaggtgtttgtcatgtcccctatgagtcgtatggagggccttgattccacactaaggtccagctgccattcttggttcctaagacataaaggcacaggggattttccaagccagtgtacttacttcaacacagtttaggtcttcagccccgtgttcctttttattagcctggtaaactaggctgaacagttggagcccccaggctcagagcagcgaaagcataggccacctatttccagcttcctctcgtcctgatcccagccctgctcagcatttaggggtaaaaagggctaacccaagctgcttatgagggaagaaaatgaaggagaaccataagaaagagaacttcaattctgccaaccttcccaggttggtgatagctgccttgcactctctggaggaccctggggatgaaatcgaatgagttgtccagctgttctggacaacctatttgtcctaaacgtgttttacatataaattcacaaggagtggaaattctccattttttctcaagaatcgtttgtggttgacttgggcatatattttagttcctgttatagatgcattaatatgaatatagttactgataggtgttatttttgttgatcattttgcatttgtgtaactgctatctttttacccaggcaggttgatggaagtattagcaggcagtagtcacagtgacagcagtggctgtttttattttgccatctctggagtgttcccttgtcctttctaagtgggccaaagccaacaaaatgtgtttgagaaccactggcgtagacattaggtatgaccagcatatatccttgtgtaaggctagattcccagggctgtattatccttccaattcagtaacaggccaagggtggctttcttcatttgtcgacgtatggttttgaggttctaagcatttctacttttgacatgttagtcaactataagataaaggattttttttcctccaaatatctcagaggaaatgggacataatagctgttttattgatttatttttaaaacgtattgctacatttgcttcatctctgtgtatatatggttttttcttaaccatttgaaagcaagtttcaggcattataacatttcaccccaaataccctggtgtgcgtctccacagattgacattctcctacatagcctgagaaaattaacttttattcagtaatgtttggaattccccagttgtctccagatatctctttagcaatgttgataatggttttgatctaggattcaatttaaaatcacacattgcatttatgtttatgcttcatttgtcttctttaatatgcaacagtctccctagcttttttattttccctgtaacagtgacttttttgaagtcttggccagtcgctgacttttttagggtccatttttaaagaatatatagaaatgcaaacagcatccagaaatgctgcccttaggcttagaaatctctaatattgttgattctctcacttctcacatttatgtatttgtgttgaccttaaaacagtggtgaaagaacagagtgacacagatggagataattgggtcagagatcatttgtgcatgtttgaggagagggcttttggggggctcattaaacggtttttagcacagcttgctcaatagttgattttaccatttgtggatgatttttcacctattaaatttgagaatttatccttacacaggttagctgtgtgagatattaaagaaaaacggcacattcttccatacctacaccaattctgcttttagaacttgtgtcccctaactaaatttgataacattgtcaatttttgtttttggaaactgttgccaggcaggatcaatgttaaacaagtttgagcatgcctcttatttggtttggaaatccagacatctccttttccagatattcttttttaagtgccagaacctgtccacttaaccttatctccttgtgaaccttcttgtttcccagaacagagtattatctactattagagtcattcactagtgctgttagagcagttacaaagaatattgaggtataatagattttatgtgtaaaatgagtttttaatctgctcagtcctaaaataaatatttctgaccctctctggtaatactgtagaacttaaaaaataagtcttaccctatctacatcttttttcctgctaactaggtatttgagctttgtctcaaaattcgtcaaaaaaggcaagagctaagagtaggcagcactatgttggaagcacaaggtacactccctcctgtgacttaaagccctctggtctttgccagtggagtactcagacaagttaagggcaaatcagggaaaaagaggtcatacctgctcttccctggtggatttttcggttctgttttgccagtgtccttgttatttttccatgtccctcttcttgatcatcttttcctctaccttctttccctgtgttctactcactcccacaaccacagaatattaatagtatgggcaggtgtctcggacttctctcccctcccacccccattcttggactatgcagtatgtaattcttcctctagagggaaaggaagtgagatggcagtggtcacagagaggagcagtgacccaaagctggtggccaggagacttaggagaaggccttcatttcaggatgatggctctggaaccctgagcagtgtatggccattactatttgtgtacattccacatcatatttgttcaagtgtaatgggaggctctggagacctaggccagccccctgagctgcagcctcatggacacgccattcagaagcacgtgtcagtgctctggtcagcttctgtcatgagacacaactttccatgtgaactaagaggataatgacarttgagtgtgacctggaggtcaggcctgcacagctgatttgggaaagatgagtctgggccagatgaaggtaaatgaaactgamgaagggacaaggaaaaccccaaaacagaacgtgaaggatggcaactgctggaaggcggtcaaagcctgtgtgtgaagtaggagaaatctggatgggcttagtccttcttcccttcagaccgcagggtaactaattggcaatttctttaacactcagcagctacataaatgttttatgtattcacaacaaagtctgtggcaaattgaaactttgatgattatgaaacaccaaagaaagccttattagacaagatgggtttcgtctttcttaaaaaaaaaaaaaatgcttttgaatggaactgttgctcatcataacattcaacaaaagtgttttcctacgtcttgatccttggggctgtaatagtgaagtttaccattagcacgggcatggggtggccgccttgaacagtccacaggcctgtacttgtgggcagtaaacagcttttgtcagcagagggaattattatttctcttgaatggaccagtttattttttctattttaaaacaactgagttgtttctttggaagactgtttctagaccatcacagaagaaagattttctaaaatttgatatattttagtattaactctgtggtgctatttgatgaggaccaggctgcttttttaaaaagtagaaatttaattgaagtaacatacagaaatcacaagagtacagctgcatgatgaattcttacaaacggtataagcatttagatcagaaaacggaacttatcagactataagaagactcctgtgcccccttaacaggcaccaccccgtcgagagtaacctccctcctgactttcaaacaccatagattagttttgtctttttttgaactttatataaatggacttacatggcatgtacccttttgtgtctggcttcttttagctcagcatatttgtgagattcatccatgttgttaagcataattgcaatttcttcattctcccttctgtgtaatgctaagattttgttgggggttacactgaacctatagataaatttgggaagaatcgatatctttataatgttaagctttccaatccacgagcatgatctatccttccatttattgagagttctttaatttttcttagtgttttgtggttttcagtgtaggcatcttttttctttgttttttcttgagacagggtctcactctgttgcccagtctggagtgcagtggcatgatcacagctcacagtagcctcagcctcccgggctcaagtgacccgcccacctcaccctacctcatagctgggaccccaggtgcacaccacagtcctggctgaatttttttttttttttttcgtatctttttgtagagacaggaatttgttatgttgcccaggctgggctcaaactcctgggctcaagcgatctgccctaccttagcctcccaaagtgctgggattacaggcatgagccaccatgcctggcccagtgtagacatcttatatgtcttttattgacactttcctagctatttgatgattttgttgatattgtgtatgcttttaatttcacattgttttagttactgtatactaaaagtttttttacatgttgacctcatagccaatgaccttgcttactgattcttatactttgtggatatttttatattttctatgtacctaaccaggccatctgttaataatgacagctttctttccttctttctaatttgccttatgtttattcttgccttattgcattggctaggaccaggcttggattttgatccctgtgtcagatagaaaaatctaaggagttccgtagtctaataagaaaagcaactatgaaattggttgacttgtgagcatcacatctaaatttaaaatggtgttatggttgtctgcaaggcaatacatgtacttgattgtgcatacccacagatatggacttaattacatcttatcagctaactgcccttcttttttctacccctgacgagctaagactgtcatatatatttgtgcatagatccttagcagagttcttatagtcaaataggggtccagacagctcacgcaagatcttcctgcctcagtggtggtagtaagacaattgtccagaagcaattgcagggcagggcagggcttctggggagagagatggcatccatggctgcagtgcggagtctgggtggtagtgactggctatagaagatgccaggtcttctgaagtgctggtagctgtctgaatgagcagaatgttttgatcagctcgactatagaagggagagtgagatcttttagatggaatgctagaatgggaggcaaggattacaaaaagtgaaggctgccgggtacggtggctcacgcctgtaatcccagcactttgggaggccgaggcaggcggatcacctgaggtcaggagtttgagaccagcctgaccaacatggtgaaaccccatctctactaaaaatacaaaaaattagccgggagtggtggtgcatgcctgtaatcccagctgcttgggaggctgagataggagaatcacttgaacccgggaggcagaggttgcagtgagccgagattgcaccattgcactccagcctgggcaacaagggcgaaactctatctcaaaaaaaaaaaaaaaaaacgaaggctactggagtcagagatggcattgcttgtgacaatggaggtgaaatagagatcctggttaattttggtatcccagagccagacaaaggtgtaagtccttgagtggatttaggggtatgacgtgtggctcgcactggggagtgtagggtaaacatgaggatacagccctgagagctggaaaaaagtatccttctgttgtcttctcccgtattgtcttccttctctctttccctttatcttttattctctctttgattggtcttttttctctcagattccttctgggagccaatataatgaaaagactaagaactgcataggtaggaatcctggccactgaccagctgtgagacgtggcaagtgactttgagcctttacgtggcaagtgactttgagccttgttttcgtgttcgtaaaatgaagacartggaagcattaatagctttctcattgaattgggaagattgartgaaatgatgtatgtaagagcaactgggcataaaggaaatggtaaggggtctggctggctgcctctttcttggtctgccttctttgttcttttccagaggtattagttcttctcatccatttttcctttgttctagagcatattctgttaaacaggtgtaagtggtatttttgtttagttgaaaaaaaggtttatgccttctatttttaatgtacaaagtgagcgagtagagtatctcccatttctgtcagtgtggtagaagatgactaaaatgacagtgcggaggcccttgcctcttctcccctcgaatagcagcacccctaagccctttagttccattgggcctcaggatccttatctataaatgtgagggcttgaattcagcatactgaggccctaatctatctctgattgcatcgttgagaagatgctaaaagtcagatgcctcactaagttatgcgggccagccatgtctgttttgcttagcatcataggcccccgacatccagaatacctggcccatcgaagatactctgtgaatgaatgaatgaatgaatgaatgaatgaatgaagacagaaagaaagatcttcatgacaaagaaggtagtccacattcagcaggaattattttcagggcaccactgactttgtgggcccctcttctacaattctgagtttaaactcaaagtttctaattgcagaagatgtttattagctcaaatstcaactttttttttttttttttttttttagcatttcttttcaaacttcctcaagagttcatgatcccttttcaattccaatttgttgccatcctttatagtcctgggtctctgtcatcatttagcaagtcagctgtgcaaaggtaaatactatttttgaaagcacagggtataattacacaacatcatagcaccatctgcaaggtgctgtgcccttttctttatttctcaaggctgcatcacatacctcattttacaaatgaagaaacagactgaaagcaaggagcattccttggcttctgagttcctgctttaaatacaccactatctctgactaacacatgccagaattaggctccttcacacatcctctagtcccacagacctttgaggagctgagccttgttcctcaccactcacagggcccctcatggctttcctgtcagtgtagatctgtgaaactttccattctygttcctgccatgttttgtcctgcggggaaagtatatgtaactaacattgtacccagccttgtagggtagatgtggtccctgccttcacggttaagaacaaattggaaatataatccatttgttcacaaaaatactttttgaactccccctttgtataaagaatatactattccacatataagacgttttggggtagaaggtactatataatttagagccaaaatgatgtggtacacactaagtactgtctggatttgaagaaatcaagacatcagaattcgctggcagcttagatccttttagatacgtgcagttcctgaaacaaatacaaagtgtttctgggcaactttggcataccctctggtgttagacttgtcagcaaaattggtaactgttataataatattgtgacaatgtcaagacacttctaaaacctgaaatcagaccattcaataataccctaattgttttctttccaaacttaggtaaagtggtgattgcaaatgattatctttagataaagcaagaaaagtagacgtttcaaggacatgtagcttttgtttaaattgggtcatcattacctttcctcattattttgccaaaacttttatagcagaagactggtgagaggaagggcagtgaccacggggcagtgctgagaactgccagactatctactgtgttggaggaagggatttctgtgtcaaattctcatttactagcaacattcaaacaagcttcgctattttctgtgtctgaatatctgaaacagttgataacaattgagtgttggctgccatgatgtcaccatcaaaaaatcacgagagaaactctaatgacttctaaatataatctgctagttctcaacttattttatgtattcaggaaaagcagttggcattatataagaaaagaattatgaaaacctgtcctttccagtcagtcactggcaagactttgcagcaacattgctttataaccttgtcatctgtgatagagtcatctgtctcgtattcaatcctgaattcagaatttgggattatagaggcacctgagaggccagttggctggaagatagttcagccttatcagatattaatagaaaagagatgattgtttaggccgagtgcggtggctcacgcctgtaatcccagcactttgggaggccaaggtgggtggatcacaaagtcattagttcgagaccagcctggccaacatggtgaaaccctgtctttactaaaaatacaaaaattagctgggcatggtggcgggcacctgtaatcccagctactcggcaggctgaggcaggagaatcgtttgaacccaggaggcagaggttgcagtgatcacgccattgcacgccagcctgggcgacagagtaagactccgtctcaaaaaaaaaaaaaaaaagagaaaagtgatgatttgtttagctagttctacctcgtataattactaagaagtaactcctaaagatgttttaggagtaaacattgagtcaaaatgaaaatgttactgggtcaccagaccactgactgtagttagctatttaatgagacctttgatacagtggccagtggccagcatagaagcttaacttgctctccttccccaccttccaaggtagctagacaaggagtaaccattctaactcaactagaaggcagcccttatagcgcaaaatgcatctttccactttggataaaatgctgtctctgcaacaatttagctcctagagaagacagaaaaggcaaactcggttttttgttctttgggtttattttggccactacatgtaaatcaccttgatttgaaaaattcttgttactctgccctctcagaatcctatgtggtatatgtagttggcttccaagccaaaagcagtagctccatgtatttattccatgaattcagcaaaattcactgcaccatctatgaaaggactggttacgcaaacctacccttgctggtcggtcactgagacaggcctggagcagatgttgtaagcacaaaggtagccaggctttctgctttctgtattcattagcctttcctaggtggtggattggtctgttgttttattcctttgcttttaaaatttttggaatgcctctaaagttgagtatttcttgctgagagctgatatttaaagttacttgagaaaggactttttaaaaattctatatttaatttgtaaatatgcatctgaataagaaatatatttgccacagcaattttaagcctttgataagcttaaatgtgttggtaatgtctaccaacacatttttggtcgttttgtcctttttggaaacaaaattcttcatgtctgcagccacttgcatttttggtggagacccattacctgcaaggtttttaaggattttgcagcttctggaaagcaagacccatgaccaaagaaatttgggaaaaaagacttggctaattaaaagtatcagatgatgatactttttctgactttgaagaatttaattggctttggatgggaggttgtgtgtttaagcgttttgctttttctgacatgtgacttgacatgagttccaagaacaatcagctagttagaaggtttgcagaaggaagcattgtgctccctgttaatcagctgttctctctctattcccctctcatccctcttctgatttcagtggtgcttcatgccccacctccaaccaagatcaaacgggagctgcacagcccctcctctgagctgtcgtcttgtagccatgagcaggctcttggtgctaactrtggagaaaagtgcctctacaactattggtgagtgggcaagaggagtcgaagaaaggctgcccagaaaggctctggaagtagccatcaagctgaatgttccttcccagtgttacttacccagcagaccctgtggtaaaacatatccttctttcatggcagtgtcatcctccgggtgtagtccagtccccttgggatcattgtactgcacacaaaagaaaaccattaaaaaccttgtggctctacagagcactaagttcatagggtacccagtccttctagggaaagagtctcaatcctgggatacttgatctgtggctttgaggcaggtaatatatacttcttcatgtctatcatatgttaatgtgaactttaagcaccagagaagtaatctccaaatcagaatatatgaaaaagtcttgaagcttgtgccctttacttaagaatatccaggccccaggaatgaagctttaattttaaatcattctttgctctagaagataaacatagatttgcctgaaagggggaggagaagagttgttaattcaaatgatgtcacagcacaaacagaccttcaacacatattctgactaattcctgggaaccctggaaatagttgggagaggggaccagagaacacctggcaaacatacattctcccctcacccacccaccctacacaggcatacacggagaattcttttagaaggagggaaaaaggaaaccggaagcagaggctaaaattatccttgagaaaaatcactagaagtgttaaacaagtccctgtgacgcagtgtgtttgtcacttttcagaggtacaaatatcccctcggggctacgagcgatttaactatgttaatgctgttatttcctggcaacaatgggctgcaaactagctttctgctggacctggtaaccatgctaatggcttcatttcagcttaatggttccttctctttttctgtttacagtgcctatgataggaagcctccctctgggttcaagccattaacccctcctacaacccccctctcacccacccatcagaatcccctatttcccccacctcaggcaactctgcccacctcagggcatgcccctgcagctggcccagttcaaggtgtgggccccgcccccgccccccattcgcttccagagcctggaccacagcagcaaacatttgcggtcccccgaccaccacatcagcccctgcagatgccaaagatgatgcctgaaaaccagtatccatcagaacagaggtgggtgttgatctgggcttcttccttaattgtctccctcactcctatcctttctcactgggagaggggaagcagtttgtcttatttaccaggttcctaaaaagttatcattacattgaggcagcttgtgaggcaagactaatgataatacgaatatgactgtttatataccaccctgttcccaaggtactccagatggttgatggactacgacatccttataaagtaggtaagggagaggtaactggtattctcccgtctcacagaactagaggaagaatgacttgccaggatagtcttgtccctcactgagggcaggttcctgactcctcattggatgctgcctactattaatagaattgaacttcagttattaccatttcacttacatataagggacaattgctgatttatacaaggtaatattacttatctgattttaacatgttttaacagtaggagattagctaaggaccttatttgtacatctgcttttgaaatagaaatctcctggttacactgcaggtggtttttacatttctacaggcattgaggcatcaggagtaacttgtccagagtcattcatttgtcaaaaaagtgtgtgaagggaaccttctctgcacactccaaacctgacctctttatctgtggtattctagaatctcggatgcttgtggccttcttttatagaagatgtgctgggggcctgtctttatttcaagtttctctgggataggggggtagttgtcaacaatattaccaaaggatgcaagatggtggccatggtatttcatatctatctatcttgtgttaggtggatyggtgtgggggccacaatggggcgggagtgggaagaatatatgagtatacctttcccaggcctggtccattccagatgcctaccagtatttacttggaggtcattttatttctagatgaaatgcaggggaaaaaataaggtccctttgtctggttctgatccccttcccgttttgctctgaaagtcaccattaagaacggcaaaatatggctggttgctgtttattccttggttaggccaaggaacacgaacgcctgtgttacacagggctcaaggggtgagcactgacggggttgtggggggctggctctggagtgggcctctattgccaccggggactcatctggaggacacagctgccgctgagcttttggcaattgttaccttgtactaacaacctgtacttgtgcagaagaatttggttacttggttttttatgtaaaaattgtagacttttttttttaagttggcaactaattcaaattaaaaacaacacctctgcagactaaacaaaacttctctgggcaaaatcaccctgcaggcctgccaatttgtgaactctggcctagatatcatttttatttcaatggttttttggtgtttttaaacagcatcttgctgattttctgcaagggttatggggaaattggggaggaagtgtggggtcgagtatatattcagtatttgaaactcttagcaaacttctatttgttataccatgaactgtaaaagaaaattcctttatctaatatttccccctcaatccttgttttttatccaaggggcttatgtaacatactgtattaacagttaactgagttgggagacaaatatcctagttctcctggagaattgggagatgggtagccccagtctcagctgtgaaataagcctgtctccagtccacccagccccctgagaaggaaggagttttggattcctgggattgatgagttatttgcccgtgggtgttgaaaggaagagaggagggaaccagaatgcaggtatttcttttcttgggtgattcctccttgaagtctgcctgtgcattttggacttacttcttgttatactctgcctttgagactgatgggtctaaaattcaaagctctcacacacacactggggtgatacagagatccttgaggtaattgaggtgaagggggaggaattctgtaggtgaccaaatcgattacaaacaacactgggcacttggatttccactcaagagtgctgtcctctcaaagttgaaagtgcacaggagtccccatgggagtgtggagcggggattttcaatgcagagtccttgttaacattcagagatagagtgtgtgggcctggggcggggcctggatatagtcttgtcacactttgagaaattgtgatccagctctctctaccctcatccttattccaccctacctttatttaaagcatgtattaccaaattctrttcctactgcctttgtctattaatatggtcatccacgtgatatctatgtgacataaaacgcatcaaaaacgtgacagtgatttttcttctagatactggatagtacacagaaaatgagacagaccaaaatccctggtttgatatttgtaaaagtaatagaaattacagtcatggataatatcaagcttcataatcacatatttaataacttttatgcctgcccaaaagtggggcagattacttttattggtgactataggttgtctcttggcttagaactttttattaagattagagggactattacttcaaaacgaaatccctaatacaaatatatggtattttgcatgatagaagtaaagagagtctcatttgaaacttttaaccgccctgtgacataggcagagtgaaaaaacccattttataggttagaaatcaagcctcagcacagttaaaggactttctaaagctcacatagccaaatacagggtcctacattcagcaaccaaaaacttccatgacgtgtaattacgccatttgtttcagttatgattttatttgggctgctaacatccactaatgtctactataaaaactgagtaattgaccttgataaatttgttttgaccttgaacattatctgtttttttattatacttttaagttctatctatctcttcaactacaaaatcttaataaattcctacatcatttaatccaaacccatgtgcttaacatgtgtcttttttgttttgctgggtgtgccgtatctgttcagttgaatagagtaagctctttgaggataaaaacctgtgatttagactcctttctttaggccacatttagccttgtaccttatttgtcctcagtatatgtttattgatagtgataaaagtttgctaaaattataccgtaaatagctaaaatgtaatctagtcaaaagtacacccttgccacacatggcggcacacacctgtagtcccagttacttgagaggctgaggtgggaggatcacttgccctcgggagtcctgggctctgtagtacactatgccgatctatcaggtgtccacactaagtttagcatcaatatggtgacctcctgggagtggggaccaccaaattgtctaagcagaggtgagctggcccaggggtcagaaacagagcaggtcaaaactcccatgatctcattgtgccactgctctccagcctggacaacacagtgagacccccatctctaagaaaataatgaagaaagaaaaaagtacattcttaatgttttatatagtcttagcatgtaattcttcacaactcaatttatttttagaagataaatactgtgtttgaaagccatgatttataccagtgatttcctccccacaaggagaggggaaaagacatgtaatttgacatgttcagacatgtgccacttatcctgaaagaccagctgaaaaaatgttttttccttcagccttcccaatcttgtgagttttctcattgtgttatttatgatgtttacatgtgctgggtggaggaacttagaaaaatattcctatagtactggccgtatatatttttggcttttattaaaccgtatctcattatatcttgagttgaggaaagccctgcaattcaactgaagaagctccactaagaaaaatgtatctctaagaattttggaatacactgctttctcacttacttgacatcaaccaaagaggttaaaacccaagaagcagcaacatttaagaaaatgctcctgtacctgaagaatcctctgcttctggatagcccctaagggcatcagtattgtggtaggctagcatgctgtaattgacagaacaaaatgtgtagtgctggagtcatcaggaaaaggtcaactgggtagtgtcttctgaaggaggaaacagcctaagctgtttgagaatgtcaagaacgtctgcttcggtggttattattgaggattcagagcttaaagggatgggctaagttttctggaattttgatttaacaaaaactaccaattccttaaggatgctagataaattaagagattttatatactcgtttttcctcttgttttttcttcctctcttaaagttcattacccttaaagtaaattgctattcattttttgtccttcagattttgtagtacaataatttttagagaggaatgaacttgactgtaagtcacatttgtagcctggcctggaataaagtgaatgtgcctgatgcatctcttctccaagtgcctgttaataacatgttgtgtatggcagcacagattcactttgggatctgaaactgagtttcatggatgcttaatggatccttctttgacagactgaatgatgttcttgtaatggttagagtgcgtaggtttttttagttctgagtcttaagagggtttgtttttagcatttcatcatgtttactgtaggcttcttgttaccttttaacaagctaaaggacatttccttttatccccagtttactgaaagttttttaacatgaacagaggttgaaattcattaaacatttatactgcctcttttggggtgatcaaataattttctcctttaatttcttaatatggtgagttacactgatttatatgaaaccaaccttgcattcttgtgacaaacctaacttgtttattctttttttttttttttttttttttggagacagagtctaactgtcgcccaggctggagtgcagtggcgccatctgggtgcatagctggaattataggcgggcaccaccacgcccagctaatttttatatttttagtagagacaaggtttcaccatgttggccaggctgctgtcaaactcctgacctcaggtgatccacccatctcgtcctcccaaagtgctgggattacaggcatgagccaccatgcccagccctaacttgtttattctgtattatattttgtacattggtgagtttgggttttctaatataaatatataagacttccacatctgtcttcatgattgagaaagtacataatttttctttcttatattgtccttgctaggttttagcattaaggttatactcatcaaatgagtagagggtgtcttccgttttctatattttagaacatctcatgtgaaattggaagtctttattccttgaactttttgaagaatttactgctaacaaccatttgggcctggcattttctttgtaggaagatttttaattactggctcagtgtcttcacattttacagttttgccctggatttctatttagttgaataaatttaataaataaatttttctaagaagttgtccattttgtgtgagttttaaaattaattgacataaagttattcatggtgccctttctaaaatctctatagcatctgtagttgtctttttcatttttgatattatttatatagacctttttttttccttagtcttggcagacaatattgtcttcaacaaatctacttttggccttacttattctctctcgggtgttttctgtttcattgatttctgctctcactaaaatactttattctttgttttctttgggtttattctgtttttccaacttatttgttgtatgattagctcactaatttttagccctttttctttataatatgtaagcacaaaaccatataaaatttctcttaaggctggggtgactgtacatggaagtttgccaggtcacttatggtctgtctatgccttgtttagaagtgattgctaatagcttcttgcactctccaaaggatcctggtttggacaatcagttatttgatctccctacccaagttctgctttagatacattgcacaggttctgatttgcagtactttaaaaattcagctccaagtattttctattatttctttcaaccttggagttctttatagatatgtttcttaatttctaaacgtatgagatttttctggttgcctggactatatgatttttattatctctcatccagagagtatttttaaatgattgtagaaacagtataggccagtggctctggagttggacagactgacagatctggggttgaatcgccgctctgctgctgtgtgacctcaggcaggcactcaacttctccaaactttcgtttcttcgtctgaaaataggataatagataccacacagaagcgttgggtagattaaataaaatcacgcttggacagaggtgttcagtaaatgttagcttctatgacaattttactttttgaaaatcacttttattttacataaactatactaaaggacacttccttaaatgatgtaggtatcgcaaactgagaaacttcattgtttaatgttaagtttttaaaatgtaatgctgcctttctccctgatcttttcatcatcacactaatattttttgttttgttttgttttgttttgagacggagtctcactccatcgcacaggctggagtgcagtggtgcagtctcggcttactaaaacctccccctcccgagttcaaacgattctcctgccttagcctccctagtagctaagattacaggagtacaccaccacacccggctaatttttgtattttcagtagaggtgggatattaccatgttggccaggctggtcttgaactcctgacaggttatctgcctgccttggcctcccaaagtgctgggattacaggtgtgcaccaccacgcccagccaaagttattaatgttatatctacaactaatactttcaccatctgatatcctggggacatgtcttagtttcatcaccatccctctcccatatttgatcttgagaagtcagacaaacaggtaggcctacaaaggacatgctttttgttccttatctctcaatgtcttctcacagtttaaatgggcccatttgagtctcagcaatgttggcaggccttatggagttgtttcagagttctttggtgtacgtttagggacagtgtctggctcttcgttatatcgcaggaaaataaacatcattgtgaagttggcacattgccacctccaataaaaatcagcattctctttctgaaaaaggagaatggatattgaaaaggcaaccagtgggctcctttgatttgtgcatggtttgtgtgtgtcatagtcttccagttccttaagatcttctcttttatttgcatatcttttttttctttttttttttgagatagagtctcactctgtcacccaggctggagtgcagtggtgtgatcttggcctccacctctcgggttcaagcagttctcctgcctcagcctcccgagtacctgggtttacaggcattcgacactgcacctggctaatttttttgtgtttttaatagagacaggtttcaccgtgttggccaggctggtctcaaactcctgacctcatttagggaactcacatggtgatctgcccaccttggcctcccaaagtgctgggattacaggcctgagccactgctacaggctgacgcctgtaatcctagcactttgggaggctgaggtgtgtggatcannnnnnnnnnnnnnnnnnnnacaatacaaaaaaattagccatgtgtggtggcaggcacctgtaatcccagctacttgggaggctgagtcagtagaattgcttgaacccgagaggcggaggttgcggtgagccgagatcgcgccactgaactccagcctggacgacagagcgacactccatgtcaacggtgaaacggttacaggtttcaccgtgttggtcaggctggtctcaaactcccgacctcatgtaaggaactcacaaggtgatctgcccgcctcgagctcccaaagtgtggggattacaggcctgagccaccatgcctggccatatttgcatatcttctgattttagcttgggagttgtggggagaaggtggggcagttgaagataatgtttattgagaacttaccagtgttataacagggccgggccttataacatacattatcttacatcatctttacaaggtatcctggctgtccttatttttttggagaggaaactgaggcttcagagcggttagataactcatccaaggtcacacagctactgagtggtaaaggttggacttcagcctaggatgttctgacttcacagccacagcctcttacccagctgtgctgcttctcgattttccgtcttcttccctgagccttaacggaagtactaagtgcatgatgttgatttcttggcagattttatgtatcatctctcagctggcctttaaacggccactgcttcacctggcacccataatcactatataacctctgtcagatccttttctcctttttttttttcctgtgagcattgtgtttactctgtgtgctggcagcagaaaccagaaaggaaatgcagaaaaagcatctaacggttttcataacgtaaaccaaatgttgggagtgtgggtgagctcgtgggaggaaaggcgctatataaatctgacaaataaataaataactagttctttaaataaactggcaccgaaaaagccttaaactgtgacctattgaatttaggcttattcggagtcagaagtccctttgctcaccaaatgtgagttccttacacgtgcactctgttgggctaatggtgggagtggatggaagggaggaggttaaggggaggaagaggaggtttggtaggaaccaggctgtgccttcactgaaagtgattgcctgccttggtaaattagaggcatctttgttgtagctgtattatgtatacaacacattcttagatacttcaaaaggactggagaagggagggtggttcaagtgaaggtcagtgagtaaagttcacaggatgtattttgaggacaaggactgaatgacttcactaatctctgcacataaaagacattatcagcagcaagctctgagaatctttsttccaaatatgttggctttgtgacctacccctgagatcccccttggccactcctgctgtctcaagacaaaccagtacggaacaatcccaattatagaatctgttctgcagatcacaggcctctaagctttgcgcatccttaaagttatgccgcggggaggggatgaggttgctggctagtgcccatgtggaagtaccttttcctgaggaggccataccaggccaactctagagtttcattctggaaggtgagaaaagatgagcactaagcggaagtgaggccaccagcctgccagctgcagaggctctggttacagaactgagcggcacatgccatctcggagctatcaaaggaactgatttctggaggtcaccttcgaaggtgctgggatggtggcagaggggaaagggagagaaaatggaaggcgttactaccattcctttcaagtagcacaagatgtgggcactttacaaaaataaggccttaagaatatcttcggccgggcgccgtggctcacacctgtaatnnnnnnnnnnnnnnnnnnnnnnnnnnnnnnnnnnnnnnnnnnnnnnnnnnnnnnnnnnncaaaaaaaaattagccaggcatgatggcaggcacctgtaatcctagctacttgagaggctgaaacaggagaattgcttgaacccaagagatggaggttgcagtgagccgagattgtgccactgcactccaatctggacaagagcgagacgccgtctcaacaaaaaataaaaagaataccttcatcagctgggtaccgtggcttttgcctgtaatcccagcaaacttttgagaggctgaaacaggcagatcactgagtcctggagttcaagaccagcctggccaacatggtgaaaccccgtttctactaaaaatcgcagctacttgggaggctgcggcaggagaaccacttgatcccgggaggcggaggttgcggtgagctgagatcgagtcactcgagtcactgcactccagcctgggtgacagagcaagacttttttttaagtctttttttagactttttttaaaaaaaaaaaaaaaaaaacaacttcgtctctcttttctgaaagaattccctttaggtttgcggcatgctgccggtgcccatgttctaaacgtcaagtgtaaacctgagacgggaatttacacttcttcaaagaccattgaaaggtttcttgaagaagttgtgccgtaaggcattcagcgccccatgaaaggctatcagcccactgaaccttcagtagttggtaaaacttgtttaagacattggccaggtggattctgaggcttttgatgtctgggataaaaggataagtacatgtaaattgcccagtagttttcatattataaaatgatcttaccgtgctgctttaggtagagtagtaaaggcagtatattgtgctgtgctataccctgatgtaaacagtgttctatctgtacacagatctcttcagtttaagattgtaaatcttgatgttctagaaatctgctgaccacctgttcccacacattgattcaaatcaaattcaaactattttattaaagctattcaagaattctttgaattaatagaattcaagctaaaagtagagaataagaccttaatattacaggattgtattatttttccttgaagcttggctcctactttctaactgagggtatatattcacaaatgcttttctttatacacatagattagtgcttcctgtctgtttcatggactgagagttcacacatctccagccttccacaaccaccttcctaaactctatagtctgtcaattatggctgtggcagaaaccatactttacagacatgattgtatttcaccatttcaggagcatttggaggataatacatccccatgtcacagataagcaaacaaagccaagaaactttgcctttggtcacttccctactaaggcatggcaggctttcccttctacactgcacacccaacagggaaagggcagctggcacacatctggatttatctgacagctgaagagtgttaaggaaactcgactagtagcaacaggtttttattctatcttgttaaaaaacagtgcatatttattatcaaactatagatgagcaaaaaaagaaaatcacctaaaattataaccaccccacagataggcagtgttaatatctaaatgtcagtctttctgtggttttatatgacaccatactactacttttatttttgctaagctttgatactctacgtactgtttagcaaccttccttaatatgtcaaaaatacctttccaagaccttatatatttacatattatgtaatttctaatggttgctttcaaccaaatgactgtatcgtaatatatatagccagtttccttgttagacagctgcattggtgaccatctttgtagttatacctgatcatctgtgactgaattgctgttcaggtacctggcacagaattagtaactgcctgctcatcttccaagctaaaaggaaaaacacttctcttctgactttgttacttttttaattactaatgagttaaactttttgtttatgaccattcctattctgtaaggatattcctgtttatgtcctttgcccatttttttcctcttgagatattcatcttttgttaatttctaaaagctctttttgccaacagtgagattcctgtatctgtggagatttttcctcagttttacttttggttttgtttctggtgttttctgactactgcagattctttccccctggtttgatgtgtttcttttggttttgtttccgatgtctttttaasttatagaaatttatacagtgaggtatatccaggtttatcttgatgatttctgctgttggtatgatacttaggttttccctcactcccaagttttgtaagttttcatatatatttactttcatatgatggtttcacttttttttttttttgagacagtcttgctctgttgcccaggctagagtacagtggcgcaatctcggctcactgcaaccttcacctcctgggttcaagtgattctgatgccgcagcctcctgagtagctgggattacaggtgcacaaaaccacgcctggctaatttttttaggtttttttgttgttgtttattttgagacggagtctcgctctgtcacaaggctggtgtgcagtggcgctatctcagcttacagcaaactccgcctcccaggttcaagcgattcttctgcctcagcctccagagtagctgggactacaggcgcgcacaaccacatccagctaatttttgtatttttagtagagacgggtttcaccatgttggccaggatggtctcaatctcttgacctcgtgatccccccgcattggcctcccaaagtgctgggattacaggcatgagccaccaccgtgctgggccaatttttttgtatttttagtagagatggggttttggcacgttggccaggttggtcttgaactcctgacctcaagcgatctgcccgcctcagcctcccaaagtgctgggattactggcatgagccacaatgcctggcctggtttcactttttatattggaacctttaatccatatgaaatttattttggtatctgtataaaatggggtctaacttttttccccaactaatttgaaatgctaaccttaacaagtagtaaattttggaatatacttgacagtttttggcttgccattaaattcctttgacctgccaatctctcaatttgttgtattattgttttaattattgaagttttatgacatatgtcagtagctagtgggtccttatgccttttcaaaataaagtttagaatcattttgtcaagttagttgggaaggcatttgcttttatagattaattttcagtgaatcaatagcttcaaagtcctaaatatattctcttaaatcttttttctttcttttcctctgaaaacaattttgagattttattcttatatggcctataggtttcctgattattcctaggaatgttatgttttttattgctactatgaatgggattctctctcttttttctttttaactacattttctaactggttaatttgtattcagtctttaaaaattccttctatctataggtgagagaatggatgaactagtgaacaaacatttatgtatatgttagtgctatttgcagataattggtctcatatattcagatacataatctggcccatctatacagatagactgtgcataaaatatacatacatggaagataagaggctaccacatcattgctttgawtttttttttttttttttttttttttttgccacttcctgactcaagagcttcgaaatacacaatgtaattttgggaagagggtaaaatgcccagaaataagcattattaagtactttgcaaataatttcattaattggaacttctagtccccagtgctcaatcatagtaggaattcatcaagtctttgttcaacatgaaaacctctttcttcttacagatttcagagacaactgtctgaaccctgccaccccttccctcctcagccaggagttcctggagataatcgccccagttaccatcggcaaatgtcagaacctattgtccctgcagctcccccgccccctcagggattcaaacaagaataccatgacccactctatgaacatggggtcccgggcatgccagggcccccagcacacgggttccagtcaccaatgggaatcaagcaggagcctcgggattactgcgtcgattcaggtcagcatcaaattgtgctattctttgcttcattcttgcattcttctgtctcgttattcagtgtcttatacatgcagggccttggggacaggaatttttataagaattttttataatttttataagaattgccctcaaataacttaggagctagtagagctgacatgtttatgcgcaatggaatacaaaacaaaacagaaaagctatgtaagtggtaggaagtgcggtaggcattcagaagtggtatgaagtacatctctgagtccaagcctggagagtgttggggttcagttttggatggaatttgctcgaccttctctgagataatacatagattgatctattcaggcaccagttggttatgggaaatgctgaggaaataggcagaagggagagacctgttgctttatgacagaaaaattaccaagtgtgaggtagtgatcgtgtgtaaacatttctatcagcattcctctggaaagctttgatgtatttttctcaggagtagcatgaacagcaacattttttcctttaagactgacattttgatctgtcctgatgggttttgcaccccactccactcccttaaagcaagacactcaacagaggttaccatatctgtaattctttgatctgagttgtattgccagggtgatggctcatcccacatggacacaactcaaattactgtctttcgtctcgatggacactgataacatgatggctgaagaagagatcacttgagtgtggtttggtttcagtatgacagccccagcatggcaaaaatggaccaaactgcaatcctctaccccttccaatgctggtcctggcttcctaacttcaggtcccctaatccctttggcctaaaaatactcccacctgttggagcaaaattagatgtgaccaccagcagtaaaggggagcaaattagaaaagatctaaagcagtcctcttcccgttcccaccctaacacccaggagtcagcatgggcaagaggccaggcttggccttttgaaagccagtattttttcccctgccattggctctttcaccagatttagtgttaacacatttctaaaataagtgaacaatgagagtgaaacatcttttttttcctcccgtgactcttgattaggagagcctgcctttcagctggtgggttatggtgtttgccatcttgcttattggtgtggcacctctttcccaggacaaagccagaaagacatgaccccagagcaggaagtttaggggctttaccacagagctgcagttgaccgatgtgctgtttctgctgcagaaactattgacaggattgtgtccacctttgctttcctttcagaagtgcctaactgccagtcatcctacatgagagggggttatttctccagcagccatgaaggtaaggaacctgcttttctttcctcttctctcctctctcctctcctttcttcctttctttctctcggcttttctttctcctaccttccttccttyctctttctttgcttgactaatacccaagcttaaaattgctcagtttccaggctaagatttgagatcatagtttaaaccttgcttagctcatgaatatgagagctgattgattgtaatcttcaattattttgcacgcagggtttcaggcatgcccctaagccctgtgagggctgccattttcattagcaatgaccccaactttttaacagtataggacaatttggagaaaaaacaaacccaccttatttccacatttccagaaatggaggttatgtttatataacactatcagctgaaactggaatttaggagttatgtcagtgagggtggtttttatatgttttacagttatgtcagtgagggtccaaggatgtcttasagttttaaaaatgtgtctctaggttttttacttagtttgagtgcttgggtgggtaactcttcattgtaattattattatatgataaatggttgccatttttaacatgggagggaaattgaaggtattcttcaccaaccttgagggggctggtggggaagtgagctagcagggggtagggagtactggggatgggagtggagaggtatgttatgtacaaaatgcattattgaaggacacaaatgttttctcattggatttttaaaaaatacctcaaaggagaaacatgagaacagatataaagyagtttacccacaagcctggattatcacatatcctaacatttatttttatgtgaagatgatcgttttatatcaagggtgtatgctgtctgctcaagttcttgtgccctatccctttgggaccaacttaattcagtaagtctctgagatcatctcactctaattaggagcaggagcagtaggcaaggttgagcctgtgactttgccttcattagtgctgacctactaattagggtgaaagtaattgggaacaaataagatgcataagtgttccatagcatatggcttcaaggaagtggtcagaatggagctagaatgtcagtttcttggaggagcttgctttttttcatctttttttgttgttgttgttgttgagacggagtctcgstctgttgcccaggctggagtgcagtggcatgatctccgctcactgcaagctctgcctcccaggttcacgccattctcctgcctcagcctcccaagtagctgggactacaggcgcccgccaccacgcccggctaattttttgtatttttagtagagacgggtttcactgtgttagccaggatggtctcaatctcctgacctcgtgatccacctgcctcggcctcccaaagtgctgggattacaggcgtgaactaccgcgcccagcctagttttctttcaaatataaacttttgtagcttatttttagcacaagcaataaatactgattacataaaattcagaaaatacaaacagacaaaaagatgaaaattaaatctcactgcccagagataaccattaacttgctacatagtctttcaatctttgctgtgcatatgtaaatataggattatacagatcgtataggactcattgttttatartctttttttaaacaatagtcattaactcaaattgaacatttactatgtttcagacactgttatgtgttctttagatgcataaattcagttgtttaattctcatagcagccctataggatagatatttctgggtttggttttgttttgtctttttgagacggagtcttgctctgtcgccaggctggagtgcagtggcggatctcagctcattgcaacgtctgcctcccgggttcaagtgattctcctgcctcagcctcccaagtagmtggaattacaggcgcgcgccaccacgcccagctaattttttgtatttttagtagagacggggtttcaccatgttggccaggttggtctcagtctcttgacctcgtgatctgcccgcctcggcctcccaagggatagatgtttctatttgccccatagggtaatgaaaccgagactcagaaaggagaaaagatgtgcccaagggcacgtggctgtaagagtagagccagaactctaagccaagccctgtggctccagagcccatactcttcatctccttccatatttcacagccaatgtcatctctatagcacccaacattacactatgatttcctcattaatggctgcacagtactcattgcatggggatgcttttagctaatcacctattgctgaaaagtgggtacttccaggttattctcaaattccatgaacattcatctagctaagtgttttcttgttctcttgattcttgaagctaagtttctgaaatttctgggtaaaggagggtatgacattttttaaggcatctgctgccggtttttgtgagggtctgttttgttgttgtttttagtacattgtcacagatttttaaattttacgatttatctaaagaagtaattagatgtgaatcaaaaggaagaagggatccttttgttgggggaggataatcgggcttttaagctcctgcataaatgaatgacagtagcaaatcagtgggctcatttgatggaaaggagccctggtagggactgagatcatgcttgagggatatgaaaggcctggagaggtgggctcagagcttaaagttacccttctgggcaaaggctaacttggtatggtggattgaggagttcccttctaaacattgaaatagggaagtttttttagaacaccttccccagatgtatgtcttctttttctcaagtgtatttctccctgaagatttaaagcagtgtgattcccaaaatctgtggcaacagcttcacctgggactttttagaaatgcacattctcaggacccatcccaggcctactgaatcagaacccccagcggtggggcccagcagtctgtgttttaacaagtcctgcaggagattctgatgcaccttcaagtttgaaatctactgagtagtaacggttctcaagtttggtcaaacattggaattacctgaggagcttctaaaaatgtagatttccaggtttcctccagagcaattaaatcagaaattctggggtgggacccaggctttagtagtttctaaagctccccaggtgattccagtgtgcatccaaggttgagaaccactggtctctgtcattttaaatgaaagtcaaaagagctgatactcatgaagcattgggtggcttttataagtgattagttcataagagccgtgtttatgggtagctgcttcgcactcacttggttagatgggagaccgagtgttgtttcactgggtaccctgtgatgttctgagtaagtgtccagccctggaaaggcagggctgtctcccggacactggctgtgatgggcacagctgcatggggctctttgaggttcctgaatgtttctacagaagcagttgatgtctgcagcaggcaaactaggagggagtgggggaagagagggaggaaaacattttgcataattacaacatttaggaaagagcatgctcttaagggaaatatttttagcaaggcattgggttgcttactacacacagactatctggtgcatttgtgtgtgttttccctccaccctttcccattcctttccctgacttcacacacatcaaagaagttagtttcaaagaatccagcatttttaattgttctaaattaccctgacatgcttttcctatccttatacaggcttgaccacagatgcctgtgaaacagttaaggaaacaagtgtttctgattggcatctgtgattgctaagatagccatcctgccttaagtgttcacctggagtccttgcataatgttttgagtctttcgtttctagtttgcccctcaaacaggtcttccttcctgccaccttcatttgagtgattagatgattgtggccacaactgatataactgctggctcaaattcaactgacttaaatttcacttaaaccaatagtatcttccagatggtgtagaggaccacatgtggcgatgactagaaaccacaagatacaccgcagtgatacttcttataggcagaccttcatctgattagctttgaaaaccaaactgagaatttcttctagatgtaggtggttgtgtttttttctacatactgtgaatgtatttttcttaccttagaggagaagaactctgaaaataacatggcaagtttgacagatacgtaaacttgaagtagttcgcttgtaatgactttataataagaccattaaaacatcaccggaatatcaaaatacatatggaagatcgggaaatatgtagcttcctggcaggcaaggcaaaatgtttgaagcatagtggattatgaaagtcttgttggtaatacagagtataccagttggtcataaaagtcagtttagtgccaaattggaaaataaatttatcaggagtcattgaatccctgacttaaaagttagcattatattcttaaatattttttaatgaagactataaaacttctcatttattcaaatatttatttagtacttatgtgtaaggtgccatgaggacactaagataccaagatacgatccttatcctcaaggaatttagaatctttggtggaggatataagatcaagctctgacattattcagttaatttcttaatagcacttaccacaatgttgtacaatgactatgtttatttttttaactaccatttattacacacttatgtaccaggagctactcttggcactctggtatgaagatagagaaatagatcagttgaatgatactaaattaaactcttataacaacaccataaggtaggaatttttatctgctgcaatgaggacactggagcacagagattaatttattcaagatcgcacagctgactggagtccatcagtactatgccacctctcgtttctttttctcctttattgtctgtcgcccccagttgagatgcaggctccatgagaacaaggaccaagtctacattcgcctggctacctactcccttctagcacaacgcctggcataaatacttagtggattaaataatatataaatgacaataaaatagactttgatgtcgttaagcaacagagaactaatgcttagggctgagaaaacaaaaatgaataatataaacctcaaagcagtctcagttgtgcagagtttcttcagtcccaggcctcttaaaaatggtgctgctcctgccaagaagctacttgatctgggttgactgaagaaacaaagaatggtgaaattataccttggcacctttactcacggatttttcctttctttttttttattttttattttttttttatttttttttttttgagacagagcctctctctgttgcacaggcaggagtacaatagcgtgatctccacccactgtaacctccgcctcctggattcaagcaattctcctgcctcagcctcccaggtagctgggattacaggcgcccaccactatgcccggctaattttttgtatttttagtagagatggtttcaccatgttggccaggctggtctcgaactcctgacctcagatgatccacccrtcttggcctcccaaagcgctgagattacaggctatttgtcttcaacaaaccaatctaaaatcacttatttcctactcctccrtaagccacatagcacttgttattatggctatcctcattcagaacccttaaaccttataattgctcatggaattataattgctcaccaccgtgcccagcctcgtggattttttaagtcgcagtgaatccttctcagatctaatggaagtccttcattgcagagccttttcacctgcctgcccccactgcattatccaacacacacagacctgtagtatgagccaggtgaactracaggaaaacggagcacagggaagcactgcttatcagacaggagccctggggcattctcctaagacgtgtgctggtaaaggagtatgcactggagaccttacaccttgagacaggctgaactacaaggagggatgtgaccccatccaagttatctgttacctggctttgatttgaaccaccaatcttgacaaggtgcctagcgacatggtggttagcactgagtgtatattaggggtttgtggatgaagactgtcaggccatccttccttcttgagccctttaactttttgccttgccttcttttatttcgtttgcatgtgttgttgggccagttcctccttgacctctgttttgtcatctatacagtgaatttgtttcattgctagaaagtcttttcagatcctctccactgtttggtaataatacccccaatactgctttcgaaatcctctacaggcccaagtctttattcattttggcaacattctttacccttcaagctctttcgtaattgaacgaggtatgtgagtagcttggatgagttagtaggaaaggttgaaattaattttagctaaaaggaaaatggcaggtctgtgtacagatcaaccaaatccatccagctaggccaactgaaatagagatgtgtttccagctgtaaaggcttagtcagagcaacattgatccatgcagacctcagaagcaaaatgcaaaggaacgtactggtgactcagcacttccctgcagtcttagctgtaaaagcaggaattgatgctgctctgactgaggcgcaggtgattacatcagaattggaatgcctaagccctcttgaagtccctgaaaattcagtctgccatagatacagcagtaggacttaggatctgaaatgataggattgcactctagtccttaaatccatagttttagtacaacacagaatttgttaagcaacgtagtctttcttttaaattctctttcaggtttttcatatgaaaaagatccccgattatactttgacgacacttgtgttgtgcctgagagactggaaggtaagtagccccatccaaggtttgttgccaggtagaggtttggaggtgtcagaacacctcagccatgactctcttcccaagtccagtgattaaatcagcatgaacaactcctttttgtcccaaccacctgagaaacttaggactaagctattgtgtgatgtgtccttgtcccaaacaggcaragtcaaacaggagcctaccatgtatcgagaggggcccccttaccagaggcgaggttcccttcagctgtggcagttcctggtcacccttcttgatgacccagccaatgcccacttcattgcctggacaggtcgaggcatggagttcaagctgatagaaccggaagaggtatgcactggatgctggactcagacgggttttgatttgttgttgttgatkatgttttttgtttagatttccattgaggctttttgtgtcaagtctgctcttgcttctcattcatattctggcctggccagtgggcttggctgtatccctcctattaatgggacagtttctaatacatggacaggcagagttctccagtgtagaatacatgaaaagtatttgtaacacttctgcaaaatttagggggcaagatcatgaagacttatattcaaataggatatgctctccctcttggaaagtctttttcaggtgctgtttcaatgatacagacttgttttggtcttagcccctgtgggccatagtctatctctgagtctacgtgaacatactgtatgacattttgacaatatattacaggatacaactacccactgtgtatttcaaatggctgtagcctggagaaataaaattatcagaggtggctcaatcttaatgagcttagattttttttttcaaaggtgtgttatggccgggtgcagtggctcacacctgtaatcccaacattttgggaggctgaagcaggtgtattgcttgaccccaggattttgagaccagcctgggtaacatggcaaaaccttatctctacaaaaaataaaagaaaataaaaataataaaaaattagctaggcatggtggtgtgtgtctatagtcccaaatacttgggagactgaggcagggaggatcgattgagcctgggtgacagagcgagaccctgtgtccaaaaaaataaaatgaaagtgtgttatgtgacatcacaatagagtagttgagagatgatacaaacctcagttattttaataggaaaaaaacactgttactgtttttgtgcccagaacagaaatacactgttgacagaaccagtgccgtttcttcagtggagaagacacaccctagaatccctttcctgaatatcacataacaaagtaaattaaatcaggctctcagtatagcatattctaaaggggttgatttttaatttctgtttgatttagaatctagagagattataaatggaacagaaataactgcccaaaaaaactgacatatgcttcttttagtagcatgttcttaggcatataaattaaaccagcagatcaaaaggcatctttgggttgggtataattaaattgggaacaacactcttagacactcttagaaagcatttgaacgagaattgctgttttcagtgttcagttaactctagggctcgctttagcacaccagagaaatacgctggcatggggttaacaggaggaggtagcaaccggggacttggtttggaacaagaaagtggtctaaagattcaaatgggaaaaggaggagaatgtgtggattagaaatttatgaagaatcctgattgataggagaagaaggcagacttcattcaaggcaattagaaaacaagatgtgcctatgtgttccctgttttatattcactcacgagaatggaaatgtgtcagcatctctagatggactaattaaacagcttctattcggttcagtctaccttcagagctggagttgagtgccactgtgttagtttagtgcctacgtgtttttttctggccatgtagaaatagagccatgttttaggcttctagcatccctgcagagccatccaccccacgccgacccatgcctctcctcactgctttctgaataacgtggcctggtttatgtgaagtttgagaaaagcatgtcacctaggttcactgaggctttctgaaagtagttctgtcatgtgggcagcccttattgatttatcttgtttcacaaacaggagcttttattattttattgccactgcctcgggcctaagcacaggccgtccagctgcaggtaaacctggttatgatccttcgtaaagctgttattgaatcttctgcactcctaccagtggcatagagaatgatgaacagatggcaaagggcccctgctttcttacttaataaagaaactaatattaatacagaatgctcgtaaatgccaggcagccaagtcatatgagaagcctgtggtgtccttgagcctccctcggttgaccgggcagctttgtttcttcaggaaatggtgctttccaccccaccttgaagtccccaagctttccctaagctccaaatgttcctttctcttcacccaggatcagttgggtgccacatgtgcacgttagcctcaggacaggtgacatttgctgagctccccccacccctccttgtatacctgtgagggccctgttcttgttaatgtcaggaagataccagcttctggaaaaagctgtaagaagtcgtcatgggggagcttgaagggtgaagcggaggaggaagctgttgggacgtaattgtaggcagctgtgtggctgagtagtgcactctgggtaattatccataatatccattacactgtgcatggaaattgtggttttagaactgcgttttggcaggccccctaatcaaatgtcttttgatagtcatccagcttagcaccctctcaattatgactgactcggctttaatctggagccattttaactgtgaatctgcattaatgaatattttggggggtagggttgtttgttgaacatgtggcagataactgctgctgggaggtttgaagggatgggctgctagaaagagccactccctgggctgtggctgctctctctttaaaggggagaaggaataggtagatccgttaactccttcagcctcagtcctcaagatacgtgctaccaaagtaactaatgagagagaagaaagatctgatgacaagctattgcctgcctccccagtcccagaagaggggcagccctaattcccagctgctctggagctgagccgcctcatgcattactgtagaaggaacagccgtggtgagggctacagaatcacagggctctggcccgggaggatgagtcagtaactatggctaccagagctgctttgaaatctgtgcgtataccaaacctttctccagtaagcaattgcatatgcaagtgacagctgagaggtggccgctgaagttgaagaatattcaaggattgttttccaccccttaacatagtaaaatgatgaggctgggcttctctgaaatttccctgtgtcacttgtggcagacagcaattaaagattagttttataaggcatcattgctttgaacagggtacaatgatgtatattattaggttagcagatgtctcttcttaccattatttctattggttttaaatgtttatcttctctaaccaggatgtaatttttggttaattttgccttttgggctgtttcaaaggtagagtagagtgggtaccatatggagaaaagaggagacccaggacatcgtgtctgctgtggggacatgaagcaactgaacggaaattggactttcacagggtttcttgcaaggcagagcagaatcattgctattattgtaattaagagagatgcattcttatcagatcatttttggcttttatgaaaggtcattttagaatcctgaatttagaagatgttgctttcattctgcctagatattttaaggaaaaggtttatgtgaaatgctgttttctctctgattcctactccatgtttaacatttggcttttaaaatatcgaaggggccgggtgcagtggctcatgcctataatcccagcacttcgggaggctgaggcaggtgggtcacttgaggtcaggagtttgtgaccagcctggccaacatggtgaaaccctatctctactaaaaatacaaaaattagttgggcatgacaatggacacctgtaatcccagctgctcaggagactgaggcaggagaatcgcttgagcctgggaggcagaggttgcagtgagccatgatcgtgccactgcactccagcctgggcaacagagtgagactccatctcagaaaataaaaataaaataatcgaaggaatatagtttgttttttttttttaagtttccaaaactgacctaaaatgctccaaacgtgacccctgacccctggtttgcatacatttgaaaacctctgagtaaaactcacatttccagggttattctactaccttgacagtcattctcataagtaggattttggaagctgatatacttgagaacagaaattgcttggctgccgtgataattgggtaaactctactaggaagttttcctgctagaaggctgctttgcccagagctccaattatattgccctatcagtgtgcctcaggtggactgggttggatataatgcatttcagaactgtttggaaagccctgttaatttttcattaagtggataatggtgctacatgctttcatgtccattctgcaagtctgctgggagcatgggattggatggcagcaggctgaaatgatctgattcccccttagtccatgagctgcaataagtaaacatctcccagcccccctccaatcttattagaattgaacttttgctctgctggcccattagcaactcactagtgtgtttctaatgtttcaggaatgaccattctaattattccttattgactgctacagaaaccatagcacttaatggcaacacgttaatggtctatgggtattggtcaataattcatacgtggagaaatagtagagggcctgcatcctctgggatgttagccaagccctctgcaatcttaaagtgctaggattcttccatctctaggtctcacctcctagtagttgtcactgaatcatcgcctttgttgaatgtttggtcttgagggagttaaatgccttcccttccaggtcagagtagcagatcattgaccaaagcagtcaggttacagaactggctctgctgggattgggagagaacatggggcccagggaatgcgtttccattgctcttcactttcctgtctcttcaggttgctcggcgctggggcatccagaagaaccggccagccatgaactatgacaagctgagccgctctctccgctattactatgaaaagggcatcatgcagaaggtgagccattatacaagacccttagcccactctggtctcttttaaggaaaaagtccagggcttctgtagtgagactggtgatcgtcgctacgaggaaattttagccccctaagtgattctgtggtaggaaacaatcttgagaagacaaacttgagacaagaatcaaatgagatatagagtacatttgatgctgttggttatgtggaaactagaagttgcatgcagaacacacaatagaaaattaggcttctctgctttcccaaaactgcttctatatatagaaatttccagaaacttaggccaactgttgtatccaaaaaggactacagggaatcaacttgaaggtctctacttcaacagcttgattgaagtctttagttattaaaacacctagacctccaaatctgttagtttgatatgctcagaagtgttagaggaataagagcatctgatttttctttcagacttacagaaactggaactcaagttaaaaacccaacgtttgtagaatggcagcagagtcacctggtagcaggttgctctttgtggaatagaggatgaagcatattttgaagaaatcagtacaaaattcttcgtgggataggtagcaaggggccacagtcttaacatcccatggataagtagaagatgggaatggcaagtctttcttagctaccaaattcgtaatgtactgttgcccagatactagcatttacacattgagccagtctacctggcagtagccaataagatgaacgtggcagaagcatatgggcaaaactgctgagaacttgtctacaagaagccagattcatctttctcataggcgggtggtaatgtgaccccatattctcctcgccaccttaaaaaatactcaacagctcattgtgattttctggataaactctagacttgctagtgcgtcatacaggctctgaggctgttcccagtctggtcaccacctaactctcgtttcttcactcaaacttgacggctttcactagcatagccaccttttaatgtaatgtagtatttgtttgccaaagaatacatgttacatgcatgtacattatcaagcataccataaaatggaagacacctattaaactgtcatcctacttaagacctagaacattcctaatgctctcagtacctggccagcccctccttgttttctgtcacctttccatttcagattgggttaggtggtcccctttgctgcttctgatggcaccagtacttgttcctaccactgctcttctcgctgtgtcttaactcctttcttgttactaccccccactggagtgtaagctcctttgggttaggaattgaggtttaacttcagtgcttgatacagagttaaatgctgtaggataggtggtcccctaccttacctctcctttttttaaagtatacggtccagtggtttcacagagctgtacaaccattaccacaattaatttcagaacattttatcaccccaaaaagaaacgccatacccatcagcagccactccccattgtcctctatcctccttagagttgatatcatcaggccaaatcctaagttcaggtgggagagccattattcctttgctgttcccaactccacatccagcatggggagatgcaacccaggacacagtaacttgaaccaatggaaatgagctgtccttatgactagcttctgtgttttctaagggagtagaagagaactttatttctgagaataagtaggcaaagagtacaggaaggcccaggaatgaggcttcgtgggctcagatcctaacacttcaatttgttagctgtatgatttgaggaaagtcacctaatctcccaaagcctctatttctaataaaaatatagataataattcttgctttaatcccacagggtaatatatttgaaaatatttcagaaataataatgtgccatccagtgtaaggaaggggttattattttatttgttacatgactcacgagtacatgagagctcattaaaaggtgaatgatagcccgtcggtgtgtagagagacttagaaaagctgtagtcccatgccctccatttttgaagggaaaattgaggttcacagaggttaagactcattagtgactaaaccaggactggaagccgtgcaactcccagcttctgatctaggattatttccactgtgctctcctgcctcactctcccacacaaactaatttttggggttgggctttaaggtaaaaccagcgtacaacactaactagaggtggttgattggtagagatgtggaagcagagccatacttgttcaattaaaaaaagattttagaatcacagcagaatgactgaagggcaggattaaactcaacagtttgcatttttaaatctaaaatgtttatcttatcagtaaatttggctgccttcccttccccctctgcgtctccagacagaagccgattattgggtttgattttcggtattaggtgcctcttgtactattgctgaacaaccagcagagagaaggtgatcccattgacgcagatgtctcatcagccacataccatgaggtccttgaacaaccaagaccttctggttctaatattataatgcagaaaacccatagaaaggtagttagcggttccctcagtgtagcagagccatgcggtgagtcatttaaagctgcaggtaagccaaaagcaattcttttcagctttggaacatacttaaggcttctgcgcaggctcgctctcatcagatttctaacctttctaaataacaaggccatactgtgaagactgtaaactctggaagtgactaaaaatgtggtcaggcttctgccttgcacctgtcagtccttaaacctttttggaacaccagactccaggctcagcataaccatgctttcaaagctgtcactggaagacagaaagtgaagattttcttttaagagtccatctagtgtgaattcgaaattcagatatcttcttttttaactgctgtagtgtcagtaaaacacttggcagataataggttcccaggagttctcaaaataagtctgagtgattggggtaatcggctgctcctttggtccctggctttgtgacttaggaatacctcgttctcttcccctgatcccatgccctgttccaactgggccctgtaaggtgtgtgttctcccgcaggtggctggagagcgatacgtctacaaatttgtctgtgacccagatgccctcttctccatggctttcccggataaccagcgtccgttcctgaaggcagagtccgagtgccacctcagcgaggaggacaccctgccgctgacccactttgaagacagccccgcttacctcctggacatggaccgctgcagcagcctcccctatgccgaaggctttgcttactaagtttctgagtggcggagtggccaaaccctagagctagcagttcccattcaggcaaacaagggcagtggttttgtttgtgtttttggttgttcctaaagcttgccctttgagtattatctggagaacccaagctgtctctggattggcacccttaaagacagatacattggctggggagtgggaacagggaggggcagaaaaccaccaaaaggccagtgcctcaactcttgattctgatgaggtttctgggaagagatcaaaatggagtctccttaccatggacaatacatgcaaagcaatatcttgttcaggttagtacccgcaaaacgggacatagtatgtgacaatctgcatcgatcatggactactaaatgcctttacatagaagggctctgatttgcacaatttgttgaaaaatcacaaacccatagaaaagtaagtaggctaagttggggaggctcaaaccattaagggttaaaaatacatcttaaacattggaaagctcttctagctgaatctgaaatattaccccttgtctagaaaaaggggggcagtcagaacagctgttccccactccgtggttctcaaaatcataaaccatggctactcttgggaaccacccggccatgtggtcgccaagtagagcaagccccctttctcttcccaatcacgtggctgagtgtggatgacttttwttttaggagaagggcgattaacacttttgacagtattttgttttgccctgatttgggggattgttttgttttggtggttgttttggaaaaacagtttataaactgatttttgtagttttggtatttaaagcaaaaaaacgaaaaacaaaaaaacaaaaacaaaccttttggtaactgtgcactgtgtcctttagccagggccgtgccaacttatgaagacactgcagcttgagaggggctttgctgaggcttccccttggccatgtgaaagcccgccttgttgcctgctttgtgctttctgcaccagacaacctgatggaacatttgcacctgagttgtacatttttgaagtgtgcagggcagcctggacacaagcttagattctctatgtatagttccccgtgttcactaacatgccctctctggaaagcatatgtatataacatgtgtcatgtcctttggaaacctggtcacctggtgaaaacccttgggattcttccctgggcatgactgatgccaatttccatttcatcagtttgttttgttttcctttttctttaaatcttggactttaaaccctacctgtgtgattcagtagggtttgagacttacgtgtgatactgacaggtaagcaacagtgctagcattctagattcctgcctttttttaaaaagaaattattctcattgctgtattatattggaaaagttttaaacaaccaagctaaagctatgtgaaagttgagctcaaagtagaggaaaagttactggtggtaccttgctgcctgctctgctggtagaattctgtgctccccgtgacacttagtacattaagaatgactacactgttcctcgtatgtgaaggaggcagtgctgactccgtgagtgtgagacacgtgctttgaactgcttttctattcatggagcactccatagtctcaaactgtcccccttatgaccaacagcacatttgtgaagaggttcgcagggataaggggtgcactttatagctatggnnnnnnnnnnnnnnnnnnnnnnnnnnnnnnnnnnnnnnnnnnnnnnnnnnnnnnnnnnnnnnnnnnnnnnnnnnnnnnnnnnnnnnnnnnnnnnnnnnnnnnnnnnnnnnnnnnnnnnnnnnnnnnnnnnnnnnnnnnnnnnnnnnnnnnnnnnnnnnnnnnnnnnnnnnnnnnnnnnnnnnnnnnnnnnnnnnnnnnnnnnnnnnnnnnnnnnnnnnnnnnnnnnnnnnnnnnnnnnnnnnnnnnnnnnnnnnnnnnnnnnnnnnnnnnnnnnnnnnnnnnnnnnnnnnnnnnnnnnnnnnnnnnnnnnnnnnnnnnnnnnnnnnctttcccctgcgcagggccgtatgcatcctgccaagctgcgttatattctgtactgtgtacaataaagaagtttgcttttcgtttaccaagcacccgaacctgcctctttcttgccctcattggtctaattttaaagcaggcaaaagccccctggctttctctccgcccccgccctagccctctcaacaatttagccttaccaatggacagtggcatcgagggtagttagggaactctgttacctggaaatagatgtgcacagctcctcttaaactccagctaaaaatttaatccaaagaggtggaaagtcgagagatcctcttcccagccaatggtgagctgagatcacctcatccccttgagcccaccaagccaccaattcttagtaactctttttttaagtgtagcccatgtttcgctttgggttgtgtgaaaagattacaaagcagtctaggacttccgagtcccagaattatcctcagccccttatgtggatactttgaaaaccagtaagaacttaagaccattcattttctaatttttccccaataagttttgctcttgacaagtgaaaaatcaattaatggttgataaataacgaaaaaagctcaggaaggttttgcccactgtgtttttttctggccgtgcagcagtaaaaacctcctcctccaagtttgtctctttctcgtgaatatgtatcactcgggaaatacgtggaaggaaataaagttcgccgggttgtattgcggtgttattacggttattacggtttctagtgctcttatttcaccctttttctgcacctctaatttggccttctcaagactcctattacagtggagaaataaagtagagccttttttcaagcctagaacagaaggctttctgtcagtttatctgctatctttctttactgttttacaagcctctaagtgtagaaacatcgagactgaatgagtgcaccgcctcttgaatyggagcttgtgaggaatgaatgtctgccacataaaccccattagcttcgacagattaagaaaagatgcttggggagaaggggcaagggtgcgcaggaaaaagccgtctctgcctctcagcttcaccatgataaggctttaacaatccgctccccattattcacgggctcgttatccagcctgggcccggacccagatcgttaacctaacgcaggaggtcaccaaacactgccgcccttctagtgttgggcgctaggataaggaagctcagagaatgggaagtttactctgcatcagggtcccctttcatgagccaagccagggaaacaatgcgtattcagttgttagatgacaaagaggtagtgtgagcgcagaagaatgtggttttgagagccagagtatgtgcagaatctaaattctaatgcagctgggacaaatgtaaactaatgtggaagaaaaacactaatgtacccagacggttggaaactttggagagaccgttcattgcccagcggtgcaggtggctgctactcaatgtgtggcctctgaaatacaagagaaaggaaaaaagtccagaagatcatcagtttaatacaaatgcatagtgtaagtattgtttagtacaaatacatagtgtaagtattctattcaacataagtgtattgtacttaaaatagggggagggtgtgagggtggtaccaggcgagcggctatgtccttttgatcccggcaagtacactggtgtcccattcagaaggggccctttgaatgaccagccttagctcctccaactttaagagctggctctacacccaagcctgggtttgttgaccttggcagtgaacctcaggtaacctttgggtagcactttacacagcactttttcatctccattatctttttggcaggctttctgaaatggtaatactgttgaaattgagtctgaaaataccatggctgttagcctccaaaattaatttcttttttggaattttcacagtggctactgtggaaagaggactagtcccttggagcctagacatttgggttctggccccaggtcagtggttgattgggtttaactaaatggtctcaggggaccatctggcctaacctcctaggttcattgagggcactgatgaagtactactccccgatctcataggcagtaagggagaaagaaaggagtttcctaggggagtcaaggaatgtgtgtgcgtgtgtaggagagttaacagttaagaacatcattctcaagtcaccatttttaagcaagctctgaagatggctcagttccaccattaatggcacatttcttctttttcaatcatccactgagcacctgctaggtgccaggcactgctggatgctaaaaataaatgatttaggtggcattttcaagctaaagccctgtttgtggtatagtaattgtgtgacaacctcttacatgtttaagtgctatactttccaggtaatacttaaacaccactgacaccatcttatccagactatgttgaccagaagctggggaggctggggcatttatcctccaactcctgcccttattggttgaaggttatccccagagatgttaactcttcaatatatatcctatcaggaagagaagagtgtagatgcagataatcagtgtgctaggaactgttttcagatgcagttagcttagggggttgagggcacatggagctggcatcagtgatgtctgtgacacctacctttaacaattagccggactctcctggatgacctgtttcctagagtgaaacaagggtgagtctgtgctttcatcattgagttatcatgtaccaatcatcgatgatgtgtaagacactataatagacactttgcaggtgaagataagggagtcacaagcccaccctctccttcagcacccaacaatctagtgggggaaacatttctccaggtgaaactagaatgcaaggtataatatactgagtattactcatccaataaatagtgcctagtctatgccaggtactgctgtaggattcgtggagggaaataaatctctgctctcaaggatcttacatctgggcaagggaggaaaaaaacaaatgatagaatttgttaggtgttaagtactatgggatcagggaagggaaatggtgagtagtgggagtggagggttgcaattttaagtagggaggtcagggaaggtctcagttgagcaaagacccaaaaaagtagctgccagatggatatcggaaggaaaagccttccctgcagggggaagagcaagtgtaagaccctgaagctttgaacatgcttggaatatttatggaataacaaggactgtgaaactggatccaggagtcagatggaacattgttaaagtaacgggttgtatcatctggggccgtgtaggctttttaaggactctggcgtttactctgtttatgtttagctgttagagttttttgagctaagaagtgacatcatctgatgtgtattttgaaagatcactctgactgctaagttgaatatagactgtagggaacagggaaggaaggaagaagatcaagttgtaggaggctgcggtagtccaggcggggtgagatggtggcatgagccagggcataaggaaagcatatatgaatatatttgtaagatagagccaacaggctttggacttgcaaggtgagaaatgaaagagaagtcaattatgtctccaaggtttgtggcctgagcccaaggaaggttgatgttgccatttaccaagagggagaagactgaggaggaacaacgtggggacaggtgggggaagaacaggcattctttagggggcatattaactttcagatgcctttgagaaatccagttgggaacacattgggttatacaagtctggagttcaggggagagatccaggctggagatagcaattaggagttgtcggcatgcaagagagtatctaaagctaaaactggatgaaatcactaagggagtaagtataaatagaagaaaatttccaaggactgagcccttggacactccaagattaagaggctggagagacaaagaagaacctgaaaaggaggttgaaaaagagtggccagtgaaataggggaaaaccgggagggtgtctccaggaggaaggagagagggacaatggccgatgcttctgatgtgtccagtacggtgaggactgtggctggattagcaatgtggaggccatgtatgacttgcagatgccatttccagagtggcagaggcaatagaactgatcaatactactagaatccaaaggaggtttgaatgtaccctcagttggggacagggatcagagaagtttccatggatttcaaaatcctggatttgagttcagctcagcctctctcactagcccttctactctcagaccttcaaaggctgaaaaaggcctaggaaccctgccaggtagctggactggaagatacaaggtgggaaagagtatctgaggataaaggaagaaggatcaagatcctgttatcactacctttcccatccccttggggttctatttattctcatgttgtgctcttaaaataaatttctatttttgaaatgttaagtgtttttaaataacttttttcatattacacaattagcatatgttctttgtagaaaaccagaaaaaaatcatagcccaaattaaaaactattctgaaaactcaacctagagatcacagttaacactttacatcttcccagatggcttttctctatactgtattttaaatattaaaaatggtcatgctatacactttacaaagtctttaaacttgttttaagcattgtattttgaacatctttccatatcaagaaaaactcttttacaccatttttaatgacaggatgccattccatagtacgtatgtaacatcatatatttaagcagtcccctttgctggagataaagggaccacaaatatgatatacccatgcccaccaaaccaagtaatctacactccccccagcccaaaatcaaacaaatgacaaataataatttgggtcttttctattgttttaattagtaaccaactcctattaattctaccttctaaatatctctaaaatccatctccatcatcagtaccgtaaacctcccaatatctctcacctggactgttgcagtcaccacctaacaggtctcaccacatcttgccccacccccgccccttctgcatgatgtaatcagagtgatttgtttttaagcgcgagttactcccctacttgagacttttcagtgatacccactggagtggctaaagtaaaaaagaccagcaacaccacatgttggcaagtatacaatgcaggcaggagtgttaaatggtacaaccaactttggaaaactatttggcagtttattacaaaggtaaacatacatctactctatgatccagcaattccaattctaagtatttgccaaaaagagatataaacatgtattacaaaaagacgtatgcaagaacatttatagaagctttatttacaacagccactcaaaacaacccaaatgcccgtcaaccagagaacaaataaacaagtcatggtatccatacaacagaatactactcagcaataaaagaaaatgaactacagatacacatagcagtatggatgaatctcaaaaacattatgttaaactaaataataacacaaaagaatacatactgtgttattctataatatatgaaattctagaatagccaaaactaacctatggtgatagaaagcggtagcaagggatgggtggacaggtattggcgggaaaggggtagagggaacatgctggggtgattgacagaaattgtctatatcttggtttgggtgactgttatatgtatatgtttgttaacattcattgaactgaacacctgaagtctgtgcattttattttatgttaattattcctctgaaaatatagtcattgtttgagataaaaccaaaatcctgaacttggcctttggcaatacctcttcagcctcaccatgcaccatcctctcccctgtaatatatgttccacggcccctcgccttcttccagtgtctcaaccataccttgatccctcctgttccatccttgacacgagct

SEQ ID NO: 94677 - DNA, 27194 bp, Homo sapiens
tcagtgccccatcgtattagtttgttctcacactggtatagagacatacctgagactagataatctataaagaaaagagttttaattagctcatgcttctgcaagctgtacaggtttctgcttctggggaggcctcaggaaacttacaatcatggtggaaggtgaaggggaagccaacacatcttacacagcaggagtaggaggcaaagagagaagaaggaaggggaggtgctatgtacttttaaacaagcagatctcaggagaactctatcacaagaacagtaagggggaagtcccccccccccccatgattcagtcacctcctactaggcccctcctccaacactgggaattgcaattcaacatgagatttgggtggggacacaaagccaaaccagatcacccatcaaggacttgaaagatgcagaagtggtgattcccaccacattcccatcacctgagcgtaagacaaatagatcttggagaataacagcggcttatcatagcttaactaggtggtgactccactttcagctgttgcaccagatgtgattttatcacttgagcaaattaacattccctcagtttctggtatgcagctattgatctggcaaatcctttttccttcattcctgttgacaaagaccagcaaagcagttcacttttaaccagcaaggccagcagtaacagtttcactgttctacttcaggagtatatcaactctgtgtcacaatttggttcacaggaatcttgatcatcttttccttccactaaatatcacactgatcaatggtgttgaagacattatgctgactggacccaccaagccataaaattgggcatgcacaatagcactccattgccaaatggaagtggtatatacacaattgggccaagcaggccctgaagcacaaagaaattacatgaagaagtggcccaaatgcccatggtccccactcttgctacactgccttcttgctcattctgtacttctggccttacgggagatccctatgatcagttgacagagaagaagagaagacagtttacggatagttctgcacaatatggagacaatacctgaatgtgtgcagctgcagcactacatcccctttctggggcatccttgaaggacagtggtcattggaacttatcctaataggcaaaactttaaggagtgcacctggttgtttacattgcttggaaggagaaatggtcacatgtgcaattatatactgactcatggactatagccaatgttttggctggatggctggggactaggaagaaatataattggaaaattggtgacagggaaatttggagaagaggtatgtgggtagacctctctgaaatagtgaaaaaaaaaaaaatgaagatatttccatgtgaatgcttaccaaggggtcacctcagcaaaggagaactttaataatcaggtagataggatgacccattgcgtagatatcagtcttccttttttttcccagccacccttattgttgcccattgagcccataaacaaagtggccatggtggcagggatggaggttatgcatgggttcagcaacagggacttccactgtccatggttgacatggagagtggaacattggccgtcactgagtgcccaatgtgccagcagcagagaccagcactgagcccccctgatatgataggattcctcatggtgatctgcaatctacttagtggcaggttgattacattagactgcttccattatggaaggggcagcattttattcttactggaatagacattctggacatggctttgccttctctgtaaacaatgcttctgccaaaactaccatctgtggtctcacagaatgccttatccactgtcatagtattccgtacaacattgattctaaccaaggaacttacttcacagtgaatgaagtgtggcaatgggcccatgctcatggaattcactagtcttaccacgttcaccaccaccctgaaggacctggcttgatagaattgtaaaataggcttttgaagactcagtcacagctccagattggtggcaataccttacagggctgggacaaggtcttcaggaggctgtacattctctgcatcagcatccaatatatggtgctgtttctcccctagccaggagtcacaggtccatgaaccaagtggtggaaatgaagatagtactagtaccacttgctattacccctagtgagtcactagcaaaagttttcttcctgttcctacaaccttatgctctgaggtcttagttttgaagagaagaatgcttccatccggaggcataacaatgattccactactgaattgggagtttaggctgccatatggccactttgggctcctcatgcttctgaatcaacaggcaaataagacagttactttgctggatggggtgattgatcctgactactaaggggaagttggactattccttcacagtgtagataaggaagagtctagaatacaggagatcccttaaggcatctctcagtattaccatgacatatgattaaggtcagtgagaaagtacaaaaccctaattcaggcagaattaataatgtcccagatcctttaagaataaagctttgggtcagtctaccagaaagagaaccacaactagttgaagtgcttgctgaaggcaaagcaaatacagaatgggttatggaagagggtagttataaataccagctacaaccacatgacaagttacagaaatgaggactgtacctatcatgagtatttcctctttactttgttatgaatatgtttgtgtgtgtatgtgtgtgtgtgtattgttttcttctttcttttattcccttatcatgtaacataagctgtgttgattgtgattttaattttatttttagattcaggggctacatgtgcaggtttgtgatgagtctatattgcatgatgctgaggcttggggttctattgatcccatcacccaggtagtgaacacagtacccagttggaatgtttttagcactttcccccatccatccctccctcctcttggagtcccccatgtctatcgttcccatcttatgtctgtgtgtacccaagatttagttctcacttataagatagaacatgtgatattaggttttctgtttctgcattaatttgcttaggataatggcctccagctgcatctatattgctgcaaaggacatgatttcattctttttatggctgcgtagtattccatggtgtatatgtaccacattttctttatccagtccaccactgatggacacctaggttgactccatgtttttgctattgtgaatagtgctgtgatgaacataagagtacatgtgtctttttggtagaatgattcatgtttttgggggtagtaatggaattgctgggttgaatggtagttttatttttagttctttgataaatctccataaatatttccacagtggttgaacaagtttgcattcccaccaacagtgtataagtgtgttcccttttctctgcaggctcaccaacatctgttgttttttgactttttaataacagccattctgactgttgtgagatcttatcttattgtggttttgatttgtatttctctgatcattagtgatgttgagtattttttatatgtttggtgactgcttctttgtcttcttttgagaagtgtctgttcatgttcttagcccacgttttaatggggttatttgggttattttcttgttgatttatttaagttccttatagattctggatattggtcctttgtcagatacataatttgtgaatattttatcccatcatgaaggttgtctgtactcttctgatagtttcttttgctgtgcagaagctctttagtttaattaggtgccatttgtcaattttcgtttttgaccaaagaataaattctttggtcataaattcttttccaaggccaatgtccagaaaggtatgtcctaggttttcttttagaatttttatagtttcaggtttttcatttaagtctttaatctaccttcaattaatttttgtatatggtgagaggtaggagtccaattttattcttctgcatatggttaaccagttttcccaaaaccacttactgaatagagagttctttccccattgtttgtttttgttgactttgtcaactatcaattggttgtcgatatgctgctttatttctgggttctgtattatgttccattggtctatgtgtctccttttgtaccagtaccacactgttttggttactgtagccttgtagtacagtttgcaattgggtaatctgttgcctctggctgcatttttttttttttttttgacagagtcttgctctgttgcccaggctggagtgcagtggcacaacctctgctcactgcaatctccacctcccaggttcaagcaattctcctgcctcagcctcctgagtagctaggattaaagatatgcaccaccacgcccagctaatttttgtatttttagtagagatggggtatcactgttggccaggctggtcttgaactcctgaccttgtgatccacctgccttgactttgttctttttgcttaggattgcttcggctattcacgctcttctttggttccatatgaattttagaatagttttttctaattccgtgaaaaatgatgttggcattttgatagaaatagcattgaatctgtagatcaatttgggtagtatggacatttcaatgatgttgattcttccaatccatgatcatgaaatattttcccatttgtttgtgtcaactgtgatttctttcagcagtgttttctagttctccttgtagagatctttcacctccttagatgtatttctaggtatttttgtgtgtgtacagctattgtaaatgggattgcattcttgatttagctctcagtttgaacattattgttctatgcagatgctgttgattttcatacactgattttgtgtcctgaaactttatcaaattcgttcatcaggtctaggagctttttgttagtctttagggttttctaggtatagaatcatatcatcaatcatgagagataatttgacttcctcttttcctatttgtatgccttttatttctttgtcttgcctgattggtctggctatgacttccagtactatgttgaataggagtggtaagactaggtatccttgtctgttccagttcctaaagggaatgcccattgagtacgatgttggctgtgggtttgtcatagatggttcatattattttgaggtatgttcctttgattcctagtttgttgatgcttttatcatgaagggatgttggattttactgaacactttttctgtgtctaatgagatgatcactcacttccattttctgtacctcactttcctttggctgttcataaatctttcaccacatggctgcgctggagtctctctgagtctgctgtgattctggaggccatccaattcacgaatcgttcattgctcaattaaactcctttcaattaattttggctgaagtttttgttttaacacctgattaaaggaaaaaatagcatataagcaatagaaaatgaaatgaaattctcatttgtataaagttaatattcattaattatagattgtctatattaatccccatccccaaaatattcataagtaattggaaagtattaacaaagagattagcaagtttgtagacatattttgcaaagtcagttacattttatatgccaatagttacgtatcagtcaaaaagtgaaataaggtcaggttcattacaggctcatgcctgtaatcccaggtactcaggaggctgaggtggaaggattgcttcagcccaagagttcaagattacagtgagctatgatcaccctgggggacacagtgagacccagtctctgaaaaaatgaaaagaaaagaaaaaagtaagatacatcttaaaatagcaacaaaaattataaaggacttaagagtaaacatatgcaaggaaatatttgcaagtccttcataaagaatataataaaactttattaaaagacagcaaggaaggactaaatatatgcagaaatatrccattttcttggacaggaagagtcaatattataaagatgtcaatttccttcaaactgatcttgaggtttattgcaattccaaccgaagtgttaaacaggttttggtggatattgacaagctgactgtaaagtattgtcctatttgtatccgtgggattttaatttatggaggtgactgagtggtgacacagggtggtcaatgctactgaaaaaagaatttataacaatattctgagagagagggcatgccacacagggccacagggaaaacatcaggtttggtcaggaggtagaagcaagaaggaggggaaaagcctaggccagagcatttattggggtttccataaaaaaggcaaggcagggcagaggaaacagcttaggaatggtcagtcctcataattccagtgagctctgggctatggcggtggtctctagttgcctggtccctgactctgggatgatttagggtagggaaatattggcttggtgtgtgagagttggagaaatggagtggttgggggttcagtttgcatataaaaggtgagcccccatcagagtcctttgctatctgtaagcattggctagccctgggaaagacaatctctctctggacagcaaagaattttaagatgtcgaaacatataagatacagaaagttaaaaaacatggttaatataattgtatttggaagagcaaatagctaagaataatcaaggcgcttacaaagaagaagaataatttgaggatacccstctgaccagatgtgaagtgatactatttaatttacggtggtttaaaaagcacaatttggcacaagattagaaaaatgaggccaatggaagacagtggagaatccagaaacaaacctgccttcttttatgctaaatagatatattctagtatcattttcattccttgttatttctttaactacatattttttagttattttcttagtggttggcttggggattactattagcatcttaatcttaatttataacaatctcatttgaattaatacccttttaatttccatagtatataaaacctgctccaaaatagcttcacccccttttccctctttttgctattattatcacaaattacatctttattcatcatctgcccatgaacactgatttataattattgctttatgcatttgactttcaaattagagaggagaaaacaaggagttacaaagaaaaaaatatatataactgtcttttccatttacctatagagttgtcttaatgaatattcttattttcttcatgtggattcatatacagtttagtaacctttcatttcaggctgaataaccccctttagtatttattgtagggcaagtctattagtgacaacgtctctcagtttttgtttatttgggaatgtcataactattccctcatttttgaaggacagttttactcgatataaaattattggttgacaattttttccttccagtactttggatatgtcatcctagtgtcttctctatgccaaagtttctgctgagaaattagctgttaatattttttagtgtaacttagatgtgattagtagcttctttcttgctttcaagattctcttggctttgcctttcagtagtttgattacaatttgtttaggtgtgcatctctttgagtatataccacttggagtcctattttgttaagcttcttgggtgtgtagattaatgctttccatcacattggggtagcttttggccattatttctttaaatgttcttcttcatgtgtcttcctcctttcctctaggattttcattatgcttatgttggtatgcttgattttgtctcataggtctctaagactgtttgtttttcttaattttttatgcatgctgtttcacacactgggtcatttcagtagatctatctccaagtttgctgagtctttctcctgtctgctaaaatcttctcttgagcctctctagtgaatttctcgtttcagttattgggcttttcaaccccagagtttctatttgtttttttttttttataatttctatctctttattgatattctcaatttagtgagacatattcttatatattawttctttcaacataattccttctagctctttgaagatactcaacataactgataaaaagttctgtctaataagcccaaagtctagactttgagacaatttctattgattgcttttatctcagtgaatgggaaagatgcaagatacttacttgtatcttttcatgtctcataattttttttgtagaaaagtgaacattttaagtaatataatgggcaattctgtaaatcacctttcttctcttcaggatttgtttttgttgctgctcattctaattttctttaaaaaaaaagctctttagttaatctattatttaccccaattgctatccatcacctcaggcagctgcaatattaatgcacttttctgtagacattttcaacaaatttcaccctcctgcatcaggaagaggctttgagcactgggtaagctttagtgaggttaaataaaaacaagctttcagggggaagtcttctagagaaccatcaaacagatccagtaatggatctttgggaatgaggattttcgaaggagctgtagctttgtttagcttcctcagtaatgagaatgtgagttgttatttttcaaagttaccactgagctagaaagcaggggatggaaatagagcaagttaaaacatcacaaagctcacagctcttaccaagattcatccgtttttcttgaataaaagctccctggattgctttaagcttttggttcattttcacggctttgaaaaagttgattctgatgacttttgccagttttctcattgtgttttttatagaggaaagggattttggagatcctttatcatatcactggcctccccagtgaggccatatttttgatattagattacatattagtcattttttgggggtatatgtctcaaccagttaaattaatacagattgttttactttaaacctgatatttcagtgaataagacacagccaaaagacagaagtcagagtttaagatccaataaacttccgtgaacgatttgtgttattctttgtggcttttcctccaaaattactcattttcataaatgtgttgtcatttgacatggaataaaatctggcaaggtaaatgttagttaattcagtgccttgatcccctaactgttgaggttaaatggaagcagagaagcctcaagtgtagttttgtctgctctattcacacttgttctggaagatgtactctcattctaaaggccatagagcttgggcctttggaaattataatggacccattttagaaaacaacataattttagatttgactattctgatctatataacatctgttcatcctcagcaatttctcttcttggggttaaagagtaatcacacaggactataagggtagatgcttttctactgagctgctctgcaagatgaattttaggctggtccaatcagactgcaaacatctcctggtgaagtggttgtttgtagtccttttaattttgaggaacaattattgatgtaggtcactgtattagtctgtttgcattgctgtaaagaaatacctgaggctaggtaatttataaagaaaagaggtttatttggctcatgattctccagactgtacatgaaacatagtgccagcagctgcttctggtgaaggcccctggaaacttatgatcacagtggaaggccaaggggagccagcatatcacatggtgagagaggaagcaagagagcgagggaggaggtgccagtctcctttaaacaaccagatcttgcaacgaaattatagagtgaaaactcactcatcactataaggacagcaccaagacattcttgagggatccacccccatgatgcaaacaccacytcctaggcctaccaccaacattggtggtcacagtcctacgtgagatttggaggggacaaaacatccaaaccttaggagtcacatttcatatttaccattattaggaaaataatttgatgaagagatagtaattcaatatcatttattttatttttctagtcaacctcaattgatgtgttatatagcaacagctaatctggatagagagacagatctaaagatatggcagataaagacactgtttcttatcctaattttacatctgggcccacaatgtcaagttttgtcaaatgccagctgtgttttcacaaaaaaattatctcagcactattgagtggatgtaatttatcctcaccagatattaaaatggtacattattattattattataaagggaagccaggtgactgctattattgctataaaaagtatgtgctataaaattcagataataaagataatgaacccttaaacatattgttttgaagctattagttctctgatgttaaaattactgccatggctcaaggtcatggctagattgcaaggggtggttgcaaatgaactgtaagagatcttatataccactgcttttaaaactaccatttgaatttcagaaaaacttatgatcacaaatgcaaggagatggttttccaattaactttttgttaatgggaaaaacatattgctctttaagataattcatcccctgccttattagttttcttagtaaaaaagcctctgattttacatttgtctattcacgtttgtttaccaatctttttttgttaactttaacttaattaaaaatggaaaaatgagaacttgttaaagtaatacatcatctttttaaaaataatataaataatacagaaacatatgtagtctatttaaccctctccatttccaaatttcacctttattcccaatggtaattattttaatagtttggtggtaacttccggattttttaaagtgcaattacagagtttgatttctgggaagatggagtagatatacttttccccatttttcctgctaagaacaacaaacaactttgggcattatataaagaaaaaacctacgaagactctgaaagtttgggagaagaaagcagactgggctagtgttcttggaacccatagaacaacatggtggtgagttccctgagttttccatttatctcatacatctggggcttcgacagaagaagccagaaacccagaaagatcaatggacactgacaaaaaaactcaaaaaaccaaaaaaaaacaaaaaacaaaaaccycaaccaaagcctgttctctccagtcaaaagaccaggaaaggagcaacttaacaagacaaaatgttgacaccatagtaaaaatgtggcctcacgctcacccatgccggcaaaggccgagtagggagcctcaactcccagacagtagtgaagtaccccaaatcccctataagggtagtgtcagaggaggccaggtaggaagccaggactttcatttctgccaggcagtaatgaagtccttccctcttttcatagtgtcagtggagacgatgtggatggcagaaggcattccaattccttcatgccaggaaagtatcaggaaaggtctacgggagggtcagaactctcaccctttcccagctgtaacaaggagctcctccttggctgtcaacagaggtcaagtgtgcaactggtactttatcccccatcttgcagtaatgacgcaatacctcctttcccctgttggaggtatgtcagaggaaaccagataaaacagamagtttaaatgatatccagagtctcataacctaataaccaaaacatctaggtttcaattgaaaatcttcgtcatatatatcaaaaaccaggaagatcttaaactgaatgaaaaaatacagtcaattgatgtcaacatcaagaaaatagaaatcttagaattatccgagagattttaaagcatccatcatatgatttcttcagggagcaattacaaacatgcctgaaacaaatggaaaaataaaaactcagcaaaataaacagaaaatcccagcaaagaaatagaaagtacaagaaacatccagctagaaattttagaaattaaatatacaaaactgaaatgtaaaaacctctagggataggcttaacagcaaacaggaagggacagaagaaagaatcagtggactgaaagacaaaacaatagaaattacccaatttgaacaatagagaggaaacagactgacaaacgtgatcaggtttcaaggacctttgggaacataaccaaacagctaaccttcatgtcaccagagtcctggaaggagaagagagagaataggccagaaaaatttggctgaaaactttcccaatttgccaaaaaacacaaactgtagattcaacaagccgagccaaccaaaagagataaatccaaacaaatccataccagcacatataatagtcaaacttatgaaaataaatttcagaaaatgttgacagcagtgagagaaaaatgacactttacctataggggaaaggtaatttgaataacagaaaaattttcataaaaacccatcaatctagaggtcttttatttcaatacttaaaaatccactgtcttcctgtatcttgtattctgtgaaaaagactttggacaattttattcttattctcttgaagataatctgcctcttctctgtctgtaaagctgacatcatcttattttattggaataaggcattctctagatcagtggttttcaaagtctgatctctggctcagcaacagcatcatcttgtgggaactgttagaaatgcaaattctggcaccccccaccgcagaaccaccaaagaaaaaaccctgtgggtggatcccaggaatctgtattttaacaagaccttttggtgaatctgatgcctgcaaaaagtttggaaccactgttctaaatccttgctactcaaagtgtgatcgatagttcaaaatcatcagctacatacataaatgtatcaaatgttatacggtcatggtgattacactttcaaaaacaatactttcagtacaggtgatgaaaacttaatgtttctacctcttttctttttattaaagttatttgcaaaatgctgggatggcaacatcttctaacaaggtttatattaaagtgtgatgtgcattattttattatctagtgagtgcaatacatttttagatactatcataatcttttattaattactaaagacatggaagtttaaacatagtacattaaacttctacttttatttttctctctttggttttattttgtaggctttgccagatacaagctgaagtgctaccagaaaaccagttgttaagtctatctggaaaaatagactgtgaagcacctcatcttcatttcaatagcttcgctggaacctggagcctaaggggtaaaatgtattatctttctcttcacaaacagttttttttcttttatggaacatagaatatgacaacatttgttttgtcaactgattacattttaaaacattgtacttgttcatattgtacttggctttgaaataccctgaagcatctatggaattgtaatttattgtaatgcaataagcatttatgtaattaaaaaaagcattcttaaatatggctggaaagtgtatggcagtttcttagtcagtatacctacctgtaaatatctacgatccttggagtaaatcagtgggaagaacaaggtgttgaaaggtttgatgatgatagaggagtttgctccatacttccacattttccactacaagtttcttaggaggatcttttttttttttttttttttttttttatatggagtctctctctgtcccccaggctggagtgcagtggcaccatcttggctcactgcaatctccacctcctgggttcaaccaattctcctgcctcaccttcccgagtagctgggattacaggcttccaccagcacgcccggctaatttttgtatttttagtagagacggggtttcaccatatgttggccaggctggtctcgaactcctgacctcagatgatccgccctcctcgatgtcctaaagtgctaggattacaggcatgagccaccactcccagcccatcttttacatagcaagtcaatccagtgctggaggggtggaggccaagaaaacatggccgactgagctagctctgaattaccacatgtaatcctttctatagattgctaaattggcacacaggtttctatttgtctacgtcatcttctctgacaaataaattttatagttaccctaggtgtaagagatggtttttttctctaaaatttttgattgacatttgtttggaatggtgagaaatggatactaaaacaaaacatttttccagactcttttaggaataggtgctttttatgaaaaaacatttgttgttttgtcatttgctcaaaaaattgaacttgacaataggaaatatatgtaaggtaaaacctgggcttttttacattgtgaaaagagaaaatttctttggtactttataaatgatatttttgcatttttagccctgttccaattgggcctgatcaggtcttgtttagaggtacacagcttggaartactcagtggatcattggtgtagctgtttagactggatttgaaatgaaactcatgcagttaaaattatctgtgatgataaatagtactgctactcgacttttccttctgctttgatgaagtgagggagtttagtatatatctcttaaatttagaaggctaatttgtgtttattaccctgaaattttcagagaggttcgtatctcatctctrgttttagatatttcttctgacttttaaaattatttcttaccagacatttattgcctaaagcacaattatcctgtgtcttcaggggctgggggaaattttgttttaacttaggttttccttgtttayataagttgagtatattttacatagtccgaaatgaatgattttttgtaaacaatgtgtgtttctttgctttcatttatcaaaaaagttttcatatgaataatgcttgttttacattacatctgcattgattgattttactctatatatggcccctagttatggttaagaattttttttttttttttttttttttgccaaaatgacattaggagttctacccaactttggccgggcgtggcagctcacgcctgtaatctcagcactttgggaggccgaggtgggtggatcacctgaggtcaggagatcagaccatcctggctaacacggtgaaaccccgtctctactaaaagtacaaaaaaaaaaaaaaaaaaaaagttagccgggcgtggtggcgggcgcctgtagtcccagctactcgggaggctgaggcaggagaatggtgtgaaccagggaggtggagcttgcagtgagctgagatcacgccactgcactccagcctgggcgacagagccagactccgtctcaaaaaaaaaaaagaagctctacccaacttctcactcacatgtaccatttctctctattgctatctttcttttgatcacccctcaggacatcttgtttttgtgtgtgttgtttttttgttgttgttttttgttttttcatctgaagagaatctcaactaagtcttgttttggactaggaatttcctgaatgtttattattaatgaaaagtaaattgacagcaaatctacccattttttccattttctaaaacgcgtttggctttcgctcttccttccacagttagcatataatgcaagacgttgtgctgagaccttggggtacagtgagaaacaggatgtttcctgcccccgaggtatttataatgtatggaggaagmcagtcaaagtaatagcatactgacagtaaatgaagaagggaaagtataggatgccmcgtgtccacattggagccccttccaacctaataytgaggcttccatgaggaagtaacacacaaactgaaaccttaaggatgagaacagatggaaattaaaaggagttgggagggaagaatgaaggggagcctcataggagagctctaggccaagaatattgcccatgtccaaaggcaatttggcaagtgcagctcagtgtgactgctgtgtagagggcagaaggaggcatggagtggtgagagactcgtcaaagaaagctgggccccgtgtgactgaggaactgggtgcatgctcttgcggaactatggccagctcaggaccacatcacttcgtatttgctttgcatttgttttgtcatcccaaagagttagaatcctcagagcttcaagaaatatactgtgttttaggccaggcgtggtggctcacgcctgtaattccagcactctgggaggccgaggctggtggatcacctgaggtcaggaattcaagaccagcctggccaacatggcgaaaccctgtctctactgaaaatacaaaaaattagccaggcgtggtggygggcacctgtagtcccagctactcaggaggctgaggcaggagaatcgcttgaatcccagaggcggaggttgcactgagctgagattgcaccactgcactccagcctgggtgacagagcaagactctgtctcaaaaaaaaaaatcattatatgtatacatacatatacatgtttcatttccccaacgctgcttcaggtctctttgacttcacacctactgttatttccagctagaattagaataccctgctcattcacttcccctcatctgcatgtaacgaacttcttgtttcaacttggttcatctcctttcctgagatcccctctaggccccctactttgtgctgttgtccctgtgctcagcgctcagtgccactctggaattcgtcatactgtatttcctaacccagctgactttcccaagcttcacgctaagttccctgagggcaaagttggtatcttctttgatcttgaatctcaaagcttcccatactccttattacatggctggtgtggaactaatatacattttaaaatatttaatatttgtgtccacttttaatcataattttcatagagaaaattccaaaatttaaaaatrcaatagtgcaaacaaagatgaataaaggcattgccggaagctgtgaggtggtgtctctgatgtttttccagaggttccagctcccatgtcattttgtttgacatattggtgttcatcatcttttttttttgagacagaatctcactctgtcacccaggctggagtacagtgctgtgatcttggctggctgcaacctccgcctcccgggttcaagcgattctcctgcctcagccttccaagtagctgggattacaggtgctcgctaccatgcccggctaatttttgtatttttagtagagacggggtttcaccatgttgaccaggctggtcaagatctcctgacctcaggtgatccacccatctcagcctcctaaagtgctgggattacaggcgtgagcaaccatgcctggtctatcattttgtaccagaacctcatccctatgctggtcactatggaaattgtgaaatatattcaggcccagtttataaactgagtgagtattaaaatcagaaaattaaaaaaattatttcttaaggcatagcttttgtgttccttttaagagtcaatgtaactgtcctcatgatggaactagtctaagccaagcattgctatcaacgtggctcagctctgcttgtcctctttgtgttcatcttgaggatgccattttttaacatatttgttttaactgataaaggtttaagagagagtggtttagcggtaaatgtagagagatagttaatccattaagattgaaaacagtcaataaagaaggggaggagagtccagtagacttacaaatctwggcaagaatgacagacacttaatcattcccgaattacttcacattcaagaaaagatttcttaggggacaactgggtattgactgtcataaatacttaataagttgggactgaactaattttctagtgtgaacatggggttgcaaaatttagttatatttaaaaattatttttgggccaggcgcggtggttcatggctgtaatcccagcactttgggtggctgaggcaggtggattgcttgagcccaggagttggagaccagcttgggcaacatggtgaaacctggtctctagtaaaaatacaaaaattagtcgggtgtggtggcgcactcctgtaatcccggctacttgggaggctgaggcacaaggatcacttgaacctgagaggcagaggtttcagtgagccaagatggcaccactgcactccaacctgagcaacacagcgagactcagtctcaaaaaaacatttttttaaaaaattaaattattgctaaatgtcacatattaaaaatatcctctcgatataccattggcttgccaacatttgaagaggaatattattttaacagccacaacatgaagcaggtgctttcaaatgcattctctttcccaagagagctgtgagatctgtattgttgcttccattttatagatgtagtagctgaggcacagagatgttaattaactttcttaagggccacagcttgtctgaggcagagccagggctttgcaagccaagttttccaacttcagatcaccaacacatcaaaatttatttctacatggcactgcctctcctgatttgattctgctaatatgtgagaaactaaagatacactctatctttaatccaagtattctacattctccattgtgaagtctttctaaatgtcagtcacatagagagctcagtggcagcgtgaaagactttttcatttcttgcaggatgaagatatgcattataaaatcaataatatctgtgccatggccagaacattcaatctcaatgaagaacttgggcaggtgagggctcctttaaggactggacaatgtgataggagctttaaagaagcctctagggagaacttgtgcaaattaaaatgccaaagtcagccacagagtatagctttaatggacatacatggagccaggggggaatttaaatcatactttgttcaaaatattgataatgctgcatcatgggtaatactgcatcatgggtaattgacaatactgtatcatgggtaataatattgcctcatggggtagytgataatacagtgttaggttcaagcagaacagatctaatataggttattatgtacttatgaaagaatggaagagctagaggggaagatagtgaaggttattttcagctctcaggtcgcaatgagctttcagagtcaggaacctgctggcaggagcccccttgccctgcctccctggggcagatgacccacagcaagcatcccaagactgctagaaatttcagaggctgctacaaagttttacatctgccaaactcaacagtctgctcaccactgccagaagaacaataataaagcttctacttttttactgaacattcctctgaaaggcagaacctgacttggaatcaggctgatgagagatcaggagaaatgcacaccaccccggccagtccctgcaggacaatagaaagagatgggagcaaagtcaggttaccaatggacagtcagcacaatagctttgtttaatttcccttttaaaytacaatcacgtctttataggtgtaaattacatttttaaaaactcccacgcttgtacagtacctagaaaaagaaagacatttaattatttttttctagccacttyttgttcttaatatgttttactggattgcaattttctatttttcaatgaatcggggacaatatataaattgtggtaaaaggcagagttttgagttaaatttcctgggtatgattcctggctttactattcatcagcagtgtcatcttgggcctctcatgtaacttccctggtcttgatctctaatctctaaaatgggcatgacaatagaatctatgtcatgaggttgctatgaggattgaataaaatactgtatatgcaaggcattcaacacagtgtctagtgtatagtaccaacttaattaatgctagtcattataaccagtaattggtagatatactttctaatttctagttaccttgwatagcatcatttgaataatgaattttcagtaagtatttaaaaaggattttgactcctggaaatgtctgttcagagaattacaacagcagccttttgaccttggagaactaaagatgaaggagggtggaawaatcaaatctccagtacgcttttttttttctttttttttttgaaacagcatcttaccctgtcacccaggccggagtgcagtggcgcaatttcagctcactgcaacctcagcctcccaagttcaaatgattctcctctctcagcctcccaagtagctggaattacaggtgtgcaccaccactcctggttaatttttgtatttttagtagagacagggttttgccatgttggcaaggctggtctcgaactactgacctcaaatgatccgcccaccttggtctcccaaagtgctgggattacaggcgtgagctgccgtgcctggcccaaatctccagtactttttctgctcataaaaatctgattatttgctaatcctttagaatgtatggtttctattgacagttggaaaaggatcacttcattcacgctgcctagtcaagtgaccctagcctctttaggtaagtgattcaatatattattaataaaagttacctttggttcaagctttgaaaataaattatattgtttatgtaggtaaaacacaaagatcagaaatcaatgacatttgaaacagcaagacgaaagggagtttaacatccagcatatatgaataactacaaccctacagaaaaaaaatccagttcaaaactcggcaaaggatttragtagacattttttccaagaagatatacaaatgtccaaggagtacgtgaaaagcttctcagcatcattaatcattaggaaaatgcaaatcagaatcacaatgagccattacctcatacccattaggatggctatttttttaaagcaaaaaaaaaaaaaaggtgtagctgctatggaaaataatacgctggttcctcaacaaaataaatatagaattaccatatgatccagtaattccacatttaggtatatacacaaaaaagctaaaagcagaacctcaaagaggtcttgtataccaatgttcataaaatcattatttacagtagcaaaacggtagaaaaatctctaatgactatcagtggatgaatggataaacaaagtatggtctatctacacaatgaaacatacccagttttaaaaaggagtgaaattctgatggatgctacaacatagatgaaccttgaggccttatgctagatgaaatatgccagacacaaaaggacaattattgtatgattccacctatctgaaatacctggaattctcatattcatagagacagacagtagaatagtggtttccaggatggggaaaagaggagaacaggaagtgattgttcaatagatatggagtttcgcttgggatgatgaaaaagttctggagatgatggtggtgatgactgcacaacaatgtgaatgtacttaatgacatgtaaaaatggttaaaatggtaaatattatcttatgtatattttaccaataataaaaatactttaacactgtttgtctcttgcagttatacgctacttttgtctagtattttgattttaaaatcttttaaccctgccaataagactactattgtcatcattattttatgcagcagtgcttatttagatttatccacatacttatcaatgtccttgctcacctttaattctcataactcagaactttcgtctgagtttgcacatatgtcacctaaatgaactcctgcctcaatgatgacctaaatgatgtgtttaaagtttcctttagagaggggttggtggacaaatctctcaaatttcacgtctgaaaatgtccttacttctccctacttgaaatattgttactttttcccagaatcttgaaactattccatcatcttataccattgatggttttgagaagctactcatcagtctagcattgatagctgggcatgtggttggtctttgctttctgctttgaaatttttctctttagaccactatggtttcactactgcgtaactttttatttatcctatccggattcactgggctcccagaatatgaggatcaatgactttcagcaactttggaaaactccgatctatgtttaaatattgactcatctccagcctccattttctttccctttggatttccaactagatgtatgttggcccttttatctctgccttctggcctcttaccctccagtcatatctcctatctcattatctctctgcactgaataatttcttcccatttatctttctggttttttttttttttttttttggagacagagtctcactctgttggccagggtcaagtgcagtgtggcatgatctcagctcactgcaacctccgccttctgggttcaagcgattctcctgcctcagactcctaagaagctgggattacaggtgtgtgctaccacacccagctaatttttgtatttttagtagagacagggtttcaccatgttggccagcctggtctcgaactcctgacctcaagtaatctgccctcctcagccatccaaagtgctgggattacaggcatgagccactgcgcctggcctctttctgctttctaattgtctcttcatttgactctgtggtttaatctttcagagaagttttaagttatacatatatatatatgtgtatatatgtatatatatgtatatacgtatatacgtatatacgtatacatatgcatatacgtatatacgtatatacatatatatatgtgtgtgtgtgtatatatatatatatatattggttttgctctgtcacccaggctggagtgcagtcatgtgatctcggctcacagcaacctctgcctcctgagttcaagtgattctcctggctcagcctcctgagtagctaggtgcgcaccaccaaacccggctaatttttgtattctttagtagagatggggtttccccatgttggccaggctggtctcgaactcctgacctcaagtggtccacccaccctaggcctcccaaagtgctgggattacaggagtgagccaccatgcccagcaagttttatgtttttcaaccattataattttaactttctagaagtttattttaaaaatatacagtttatttttattttcttgttccttgttcatgtttttaaactgtttttaaaaaccacacaaaacctatttatttcatattctcagtctatccaaattatttgtggatctgattctttttctcttgtatctgctggttttcacttagggtgccttgttttaactatgaccccatgatccttggaagttttttttggtaggaattcttgaaggtctgggttgaagttgcatctctgcagaaagatttgcatttacttctgccaatcacttgagactacattaatttaaatcctctacttgagaaggtttgaatccatgggtcatgtgaatttggccacaagttcctggagaggccagcttgcattgacattctctagaaaaatatatttttcttccatccagtctcagggttcaatcaggcaaatgtgtgtgccatcccattctgctgagcagtttacttctctttaatgcttgtttttaggtggtatccctcttgttcagatttatggaggggtgttccatgacactctccacctggggcagccatgtacttctagcccctgtgcaaccttcaagataaaaaccttaggattccagggcactttttcttagagcactcttagagctcactttgatactcaccttcctttcatggtttgaatttgaatttccacctaccttctacaggtctgagtttgacctcggaggattgcttacttctggaacaactttgggatgtattttaaaatatgagctttttttctttatcctgcattatgcttgtttttgtcataagggttgttcacattgttagttcatcatattccacaatatagaagactcatttgcctttttcaatagtagatcttttttcactttcccaatatcaagttttttttttcttttttttaaagacagggtctcactctgtcaggcaagctcactgcagcctcaacctccccaggtacaagcaatcctcccacttcagcctcccaagcagctgggactacaggaatacaccaccacacctgtttaatttttttttatttctagtagagatgaggtcttgctatgttgcccagcctggtcttgaactcctgaattctagcaatcctcctgccttggcgtgtataaagtcccagctactcaggaggctgaggcgcgaggatcgcgtgagcccaggggtcaaggctgcagtgagctatgattgtaccactgcactccaacctgggtgacagggtgagactgtcaaaaaacaaaaaagaaaaagagagaagagtatgtcctcctaaaaaaaaaagcgtaaataatcaggagtttgagaccagcttggccaacatggtgaaactctgtctttattaaaaatacaaaagttagctgggtgttgtggcaggcacttgtagtcccagatacttgggagactgaggcaggagaattgcttgaaccggggaggcggggcttgcagtgagccgagatcaagccactgaactctggcctgagagacagagggaaaaagaaagaaaaaggaagaagaacttcattttgttgtcttgccctctaaatttgttttaaattcatgtggtttattgtgttcatttttattttgtgtaggtacagtatcaattttctaataaaacgggaaccctcacttgcaatattatgacatataagaagtgtatcattgcaggtgtaatttacaggaaagtgtttttattgccatactctgttagaaattctctttttggggcggggggtggagtctctctctgtcacccaggctggagtgcagtggcacaatctcggctcactgcaacctccgcctcctgggttcaagcgattctcctgcctcagcctcccgagtagctgggacaacggacgcgcaccaccatgcccggctaattttttgtaattttagtagagacagggtttcaccgtgttagccataatggtctcgatctctggacctcatgatctgcctgccttgtcctcccaaggtgttgggattacaggcgtgagccactgcgcctggccagaaattctcattttttttcttaaaattaattagtttttatttactctaagacttaactgaatttctaaagctatagctgtatctgaatgagactgaaatgtaaagcttaaaatgcaaacttgtagttattttaaaaatatgatttacatctgctttgatacatgttagaattcccaaggagttttatacgtagagtcttgaaacaattacatttcctccctcatttccctgtagaagttattcaggcagaagtcctattcttttctacttttcccttgctcccttttcctgcaaccaacttttatcagtaccagagtattgacatataataccagagttctctcttgttcagatctcaaatggcagtttccagaagctcctctggacagatcttccccgtgcggtagtcagacagcctagaatctaaccatgaatttattgctttcgtagccactctggctcaaattccctataaccgtacagttctcaacacaggtttaggcatcttcggatgccattttgcagctttgagggctgggaggatgtatcattggacagaactgtaagtattattatagttctgcagactctttgtgatcctcttaaaaacagaagatgggctgtgtgtgtatttcagatccttttgaatattgactggcaccaccgggaactttttgttaatcttttctatttttcctcatagtcagacaccttcttccatcccagcatcctgtgaatttaacgaccccaagttattggagaactttgagaatggccatgtaagcctgttattttcattctaagttgacacagtggtgctatataacttcaaaatatctatatggcttcctaaaaggtatcatgttctgaacccaggaagagggagagggtcttgacattttttgatgttcatataataagcaagggattttgtactgatattatgagctaagcactgaatttatgagcatgagtgaatttaaacattatacaagaagttttactatgtagcagtctctgttaagactgtttatttgcttttaaactatttggttctattgcatgctaccaatatcttcacttatctattttaagacattgatctacttgatctggaatcttgatcttctcaaaaactaaagcgaccttttaaagcatacatttatacatgtccgtcccttgcttagaaacctcttgaggactggcaccacacttaacataaaatctgaactcattaccatggtctactctccaacctcattctgtcattgttccccttgcttgagatgctaaaggcacacttgcctggaagctccacaaacacaccaagctgtttcctgactcggagcctttggacatactattccctttgtcagctatgtgctactgtcaccatcagctatacagctaactaacctttttgtttcgatattaattttaaatgtcatctcctccagcattattccctgaccatctatctaaaatatgtccttctctagcgcctgagttccttgactagggtgacggcaaactttgggcttcaccgtggaggactacctgcaggcctgtcgagctaccctgcacaaatcccgacctctacatgttgtgctgggaaatgaagcctgtgatttggactccatggtgtctgctcttgccctgcttttttttttttttttttgagacagagtctagctctgtcacccaggctggagtgcagtggtgtgatctcagctcactgcaagctccgcctcctgtgttcacgccattctcctgcctcagcctcctgagtagctgggactacaggcacccgccactgcgcccggctaattttttgtatttttactagagaaggggtttcaccgtggtctcgatctcctgatctcgtgatctgcccgcctcggcccttgccctgctttttacctggtaaagacaactg

SEQ ID NO: 94678 - DNA, 57714 bp, Homo sapiens
gttctccaaactcttaaaataagttactcccttcatgccatatcccacatcacttgcttgtataccgtgtaaatattttatatatacctgcctggcatcagtttgtgctgattttgtaaattttgaatgtgtttgttttagattttaagcataacattatggcacatatcttaataactttttatggttacaatattctggttaaattccttatggcattcatccattgttagtgagcaactaagatgccgaagaagaaggacctaacctagaatgacagaatattagatctgggatgaaccttagagatatagtctagactcaaaagtgaaaaacatgtaaaaataattgtgtcctgggtgtcaccacaggctcactcctgtaatcccagctctttgggaggccaaggcaggaggatcacctgaggccagcctgggcgacatagtgagatcccacctatacaaaaatttaaaatagccctgggcgcggtggctcacgcctgtaatcccagcactttgggaggccgaggtgggcggatcacgaggtcaggagattgagaccatcctggctaacatggtgaaaccccgtctctactaaaaatacaaaaaaaaaaaaaaaaaatagccgggcatggtggcgggcgcctgtagtcccagctactcgggaggctgaggcaggagaatggtgtgaacccgaacccgggaggcagagcttgcagtgagcagagatagcgccactgcagtccagcctgggtgaaagaacaagactctgtctcaaaaaaaaaaaaaaaaaaattaaaataaaattagccaggtatggtggtgtgtgcctgtagtcccagctacttgggaggctgaggtgaaaggattgcttgagctcaggagttcaaggctgcagtgagctattattgatcatgccactgcacttcagcctgggcagacagagtgagaccctgtctctaataataataataacaataattgtatatggtatgtagtttttactttcatcattgtaaattacgtggtataaaatttaattggcataacacttggattcacgaatatttttacttaggaaaaaattaactttttaagaaaagcaaattggtgaaaaatatgaagtaaataataatagtcatacatggatatggaaaaaattgggtaggtgatacatgaatgactgaaattggagaatacagaattctagacaaaactgcttgtttatacttcagaaaaatgatcttctaacatcattagtcaaatgctttttaaggtagaataaacatgacaaactcccaaccactcttcaaataattttctttaaagttaaaatgtgctctgtgttttttatggaatgtcataccaacacttagagaaaataacatattaaaaaataaaggacaaaagcatatgactctgatttgtaatccctgttcagtagtaataaattgtgtgactatgaccatgaacagtagatgtaatgttactaagtttttcttagtccatgggttctgcaactccttaaaacaagcttgtccaacccatggcccaacacaaatttgtaaactttcttaaaatgttatgagatttatttgcaattttttgttttgttttgttttcgagctcatcagctattgttagtgtattttatgtgtgaccaaagacaatgcttcgtccagtgtggcccagggaagccaaaagattggacacccccttccttaaaaacttttttttttttttaaccttaaaaacttccatttttacaggctgggcgtggtggctcacgcctgtaattccaacactttgggaggctgagaggcaggtggatcacctgaggtcaggagttcgagaccagcctggccagcatggtgaaaccctgtctctacacaaatagaaaaattagccaagcatggtggcggatgcctgtaatcccagctacttgggaggctgaggcaggagaatcacttgaatccgggaggtggaggtttcagtgagcctagatcgtgccattgcactccagcctgggcaactgagcgagactcctcaaaaaaacaaaacaaaacaaaaagactattttactatgcttctatttaactaacagctatggaatatctactatcaagccaagtgctcaggaatacaaagataaactatggttcttgacctcaaagagatttaccatataatgcaggaaactgtcacctttctgaactacaattcaattaaatatcaaattgactttcatgtatccaagtatttgccttttgtataatgctacctaccatacacgttcttgtcagttttttatatacttgtgattcagtacttccaaaatatatgcagaatgactaaagtttatactcccatcagcaagatcatgtttccgcacaggcttatcaacaatatcatacaacttttaaatttcctgtaaatcttaaggtcataaagtagtacattattattgtttaaatttgcataatctgattactaacaaggttgagactatctaatatgcttattagtcattttaactttcattttgtgaactgcttctccctatcctttgtctgcttttctgttgggttttctgctctattttccgaagttctttatttttaactattgatttttgttggcaatatatactgcaaaaaatagatttcctatgtgtctgttatggatgacttttttgaacagaaatccttaaatttaatgtaatagattcatcacattttccctttacattgtacctcctgtctgttaattttacaaaattctctccaactaaaatgtccccaaattattttcctacgttttttcctaattttctggttttacttttctttttttttttttttgagacggagtcttgctctgtcgccccggttggagtgcagtggtgagatctcggctcactgcaagctccgcctccggcgttcacgccattctcctgcctcagcctcccgagtagctgggactacaggcgcccgccaccacaaccgactaatttttttgtatttttagtagagacgaggtttcaccggattagccaggatggtctcgatctcctcacctcgtgatccgcccgcctcggcctcccaaagtactgggattacaggcttgagccaccgcgcccggcctggttttacttttcatgttcaggtcttatacccatctgaatttgtatatagatatgattcaaactttatttttgttaattaaattgaaccaatttctccaatgtgataaaataatttatcttacccagtgattcataataccaattttatcatataccaactccccatggacataattagcatgtaaatctgtgtcttacacaattacattccatcgtttgttcctccaagagtatcacatactttaatagtaacaacatgctttaaatattaagagttgggtaagtataggcagagaacaagggaaataaagagaaatggttgataatttaaaaaataataaatattagagctttgcttatagcaaataaaaaataaatgttaggacttattataaatattaaactttagcaagtacttcttctgcatgtattgagataaatgtgggtttcctcctttggtctgtcagtattatggattatattgatttctgtttgatgatttctgtattcctaggaaaaccctacttggataaaaaaataattctaatacaacgttggcctcaggtagctaatatttcctatgtttgcctctgtagtccataagtgtgaattttttttttttttttttctggagactgagtcttgctctttcgcccaggctggagtgcagtagcgtgatgttggctcactgaaacctccgcctcccggattcaagtgattctcctgcctctccctctggagtagctgagactacaggcacctgccaccacgcctggctaatttttgtgttttttattagagacaaggtttcaccatattggacaggctggtctcgaactcctgacctcatgatccacacgcctcatgatccaaactgctgggattacaggcgtgagccatcgcacccggcaagattaatcttttcgttaaacatgtaatagaaagttaccccgaaaatcatctagacctggctagttttgaatatgtgggaaacttagcctattcgagttttctattttttctcggtctaattttggtatttgatgttttcccagattttatacttcatctaagcttttcaatttgttggcatttatatatatatctatagttattctccccttaatttgtgtcctttcattttttatgttcttgaacagatttggcagtgatacatcaaattgataatttctttcaaataacgttagtttttgttaatatctatgttggttttagcgtttatattttaattcttttccttctttgtgtttactctcctggctttttggtaatatgtgtgttccacacacacacaaaagcaatggattaaatttcttattacttactatattaaacatttaattaccgtgctataatttatagcctgtaatatgtcactcttgctttaaaatgcagtaattatattaaatataattattaagtacagaactaataaaaggataccatcatgatttttaaaattcaaacagagtaaatgttccctttgagactacctatgctcagaactgatggattagctggcacgacccagaccgataaactggctcatctgacctagtgtcccccaacccaggaactgactcgtgcagaaagacagcttccactccctgcgatttcatccctgaccaatcagcactcctggctcagtggcctcccccaacccaccaaattgtccttaaaaattctgctccccagtgctgctcggggagactgatttcagtaataataaaactccagtctcccatacagccggctttgcgtgactaagtctttatttgcaatccccctgtcttgtatcagttctggctagtcagcgggcaaggtgaaggctttccttgggcggttaccatccgaagctttaattttaagtataatggcaagctgttggaaagcttttttttttttttttttttttttttttttttttttgagatggagtctggctctgtcgcccaggctggagtgcagtggcgcgatctcggctcactgtaacctccgcctcccgggttcaagcaattctctgcctcaggctcctgagtagctggaactacaggcgcccgccaccaccacgcccggctacttcttgtatttttagtagagacgggcgttcaccgtgttagccaggatgctcccgatctcctgaccttgtgatccgcccgcctcggcctcccaaagtgctgggattacaggcgtgagccaccccgcccggcctggaaagctttttaagttcggaaagtaatacgatctggatttcttttcttttatttatttatttatttatttgaaaaaatgtctcgctctcttgcccaggctggagtgcagtggcacgataaatcacagttcgctgcagccccgggcccaaacaatccccccgcctcagtctccgaagtagctgggaccacaggtgtgtgccaccacgcctcgctaagtttttaaaatttttttaatttttcattttttaattttgtagagacggggaggaggaagagggtcgggggcgggggggggggcgcctccctatgttgcccagcctagtctcgaactcctgggcttaagagatatcccaccccttcggtctcccaaagtgctgggattataggcgtcagccaccaccatcattggaagctagctaagcctaggctgggcagatacttggacactttgaggggagaagggaggggaagaagttggaagggggaacggaaaaccactctcctggtagcagtctctgcccacaacaaaccttgccttctgcccttaaggaaaatggcgcctggcatagatgcgcttccggccacggagccaaacagaacagaggaggcaagaggccggaagtgaccgscctttgccactccccctgcctcctctccgcctttaacttctcgggaagatgaggcagtttggcatctgtggccgagttgctgttgccgggtgatagttggagcggagactgtgagtgccggctgcctcgacagcacgtttgcgacgctcggagtgaccttcgagcgactggggaccgggggcgggagtcgtgcatgcagcgttgtgtgacgaggcgccgcccgccgcggtcctgtgggaaaggagagagccagctgtcgggcgaacggggctggcggccgagtcgagcccacggagcccacgaggccgtgctcgggggtgggattgggggatccggacctagacggtcgtgcgcggggcgggggtgggctctggccctgactcctgcgcccggtgtgggaaggtgggaggccttttctaaggcaggtgttcacaccggccggaccggggcgttacccccacccggcttttcccacgcagctccttcgcgcggtcatttcttgactctctggaagaatccgccttctttatggccactgttcctttccatgtacacaccaggattagaccgtgattgtttgtctttggtgtctttttcttgagaaaccacctaygctttcttaaacttatagtccttgaagtttctggtactttggctggaagcgttaatgccctcttgaagccttacctttctaaatgtcagcctcacattgtgatcttagaattttatttcctcactctgcatatccactcctactcacctagagcttcaggttgagaaacttagtaacttcsttattgtgtgtgaatttggctycgcctcactaaccctgttccctgatgtactttagagtcacatgcagtgacaaacttagtcacaattagtttcgtcttcaccaaagggaaattgagtagaaattgcaaccaagattttggctaatagatttcacttattttagtgaaataycrttcaaaagtcgtctctaactgtctgactagaacaytcccaaaaaagaattacctaaaaacattttgccagcataatttatttcattggggagttgatgaatgtcactggtgtgtcatcagtttgcatgtctatcatccactttagttggtgcttttctaactttatctccctctagtagcataatggcagaacctgtttctccactgaagcactttgtgctggctaagaaggcgattactgcaatctttgaccagttactggagtttgttactgaaggatcacattttgttgaaggttagttcttcttaagtttttaaagtaattactgttgaaaatatataaaagtgcttattctttcaacgttagttattgaacacatgtatagggcattatactrtatactatgagaagtaccataatgaataaaacccctttctaacctccagaaggggaaaattaaatggtattaataacaactaagaactttagtatattaatagctcatttaattttcatcaccactaggtgatgagaaatagctatgttaatagttcatttaattttcatcaccaccatctgtcattttaaagatgaagagacgaagtcaaagaaaagttaaacagtttgcccaagatcacacagctaataagtgcccagacaaaaaatcaggcagtccacatttaaccattatacttgtctcctccccaatttagcagttaagccaagacctcagacatatctcattctctcaaatgaggctgaattgcagtggaaagggggaaaaaggagtttcataactgttaaaggtgatgaggaatgtcatgtcttactagggaatacttctttttttttttttttgagacagagtcttgtcttgttgcccaggctggagtgcagtggcatgttcttggctcactgcagcctccacttcctgggttcaagcgattcttctgcctcagcctcccaagtaaatgggactacagtgcacgtgccaccatgcctgactaatttttgtgtttttagtagagacagggtttcaccatattggccaggctggtctcgaactcctgaccccatgatcacctctcttggcctcccaaagtgctgggattacaggtgtgagccaccacacccggccaggaatccttctttggagataactgttgaaattttttctggttcttaagattatgtacctctcggccaggcgccctgactcacacctgtaatcccagcactttgggagtccaagatcggcagattacctgaggttaggagttcaagaccagcctgatcaacatggtgaaaccctgtctgtactaaaaatacaaaaattagctgggcctggtggcagacgcctgtaatcctagctactcaggaggctcgaggagggagaatcgcttgaacctgggaggcagaggttgcagtgaaccgaagtcgcccactgcactccagcctgggtgacagagtgagactccatttcaaaaaaaaaaaaagattatgcacctctcaactatacaatggaaagggagggattctgtaaatttttccagcgacagtggggaaacctttggtagattgggaatcaaactttttttttcatgtctctcccaaccctctcttaccatattttgagctcctttagggcaggagcctgggattcattgtattcctagcaccagacttgacacaattcaatgctgaatgagaaaaaaaaaatagtagtatagaatctttgtttccaattaggaaataatttgagctggcacagttgactttttaaaaatatttttttttctaaaaataataggaagtgaaaatgaagttaaatgtgtattgtacgtgttatagatcatgcatcatgctaggcactagtgaaatgacagctttagaatctgaattcagttgtacaggttttagaacctcagtaaaaatgttgcaaaaaggagacaaagcaaataaatcaagaaaaacatacaagagcaaaaataaaatgaaaagcaaaaataaatgtaatgatacttaaaccagtctgtccgttattcaccaaattgcacatattttattaatgcgttagaaaagtatggtgagatatgagaagcttaattggatgtgcactggagaagttttaagtggcagtgtttgtctctaattagggtcattcagatagccagatgaatctttttgtttttgtttttgtttttttgagacgatgtctcactctgtcacccaggttggagtgcagtggcaccatctcggctcactgcaaactctgcctccggattcaagtgatttccagctaatttttgtacttttagtagagatggtgttttaccatattgttcaggctggtcatgaactcctgacctcaagggatctgcccacttcggcctcccaaagtgctaggattataggcgtgagcccccacgcccacatgaatcttcatgtctttaccttcaaaaagaggtgataagaatgtaaacatcaggttatctcctattcctgagttataaaaaaaactgaaagatttttctatttttcaaacccaggctttttcaactacctccagccatggaggagaggtgagggctgggatgtgcggttaaaccctaaacctgataagagtgaaagtgggatacaatctgatgagatcgagtgcattcagggtggtatggctgtagataggatacaacctgtaattctctttcttctctgtctttgtgttaagtgagctgtttcacctcatccctgggggaagcagatagaacgtggtaaagtagcaaggtctttcctagcttggagaccttgcactgtatcttaatttctgaggggctcctattcaaacctcacttttttctctcagtatgtggctcccccttctgagctcaagatctgaagatccattcagtcaggttggaacaataataggtcagtgttaggttctagtttctctctttagaaatgtattcttgtctcaagggtagcttgtatgtttgagacctagaagtccacttttgactgtgcccttgcaacttttaatattcttgaaattcttttgggcgggattcttgtgacccattgccacggagtatgcaccttttaccaaacattgagatgctgtgggtggcatgttaacataaagcaaaaatacatacaatcttaggtattccattatataactaacttaatattcatttatatcacttttctaatgccatttcaattttgcagcaacatataagaatccggaacttgatcgaatagccactgaagatgatctggtagaaatgcaaggatataaagacaagctttccatcattggtgaggtgctatctcggagacacatgaaggtggcattttttggcaggtaattatttattattacttctaagattagtttccaggaatcagctttgtgtctgatgtttcaacaagtaatatttctcccatcctcccccagccccgcaagtttctgcctgtgttgaatgttaaagctgttagcatgtgaaagaatttgtgcattttacctcctggtataaaatgaagctttatgaaagtcaatcatatttttaccttttaatgattctcatctctaagaattggcttgtagacagttttaagaatggaaatatagataaatgataagcatactttgtgttttactcttttaagtttacttgattatgtgaaagtttcagaagctaggatgaartcacttttgtcatacctagacaggcctagaaggaaagaggctcttgtctgagataactatttccaaggactttctagaaattctttcaaatctcctgctttgataagacttatcaataaacatactttaggactgccttaattcagataaaatgttttcaggagagttcttgcccagtaatggcatctccgccaatgaactgacaataactggcgttgaacctctggaaccaaataactcttgtttctaggcagcttatgtaaatctctttttgctaatagaaactcctcttaccctcactgaatgcactggtatgccattccatgcattccagattataatctttatttttgattcccaagtaaactcagcatttttttttccccctgagagggagtctcactctgtctcccacgctggagtgcagtggcacaatctcggctcgctgcaacctccacatcccgggttcaagcgattctcctgcctcagcctccctagtagctggaattataggcgtgtgccaccatacctggctaatttttgtatttttagtagaggtggggtttcaccatattggccaggctagtcttgaactcctgacctcaggtgatccacccgccttggcctcccaaagtgttggaattacaggcgtgagccaccgcatccagcctaattttttttttttttttttgagacagagtctcagtccgttgccaggttggagtgcagtggcaccatctcggctcactgcaacctccgcctcccgggttcaagcaattctcctgcctcagcctccctagtagctgggactacaggcgtgtgctgccacacctggctaatttttttttttttttttttgtattttagtagagatggggtttcaccatgttgcccaggctggtctcgaactactgagcccaggcaatccgcccacctcgacctcccaaagtgctgggattacaggcgtgagccaccgcgcctggccccagcataatttttatatttttattagagatagggtttcaccatgttggccaggctggtctcaaactcctgacctcaagtgaaccactcacctcggcctcccaaagtgctgggattacaggcgtgagccactgtacctggctaatttagaggtgattttctttagtgtctttcttaagtttgacaattatctggattatggcggggagaaaaaggcagtgatcaggtacgtcttccaaaattttcaactccatcattcctagagggagagtaggaggcgtacattggtgtaacagtccagagtgatagggtgatctctgccacagcttatatgcaaagacaaatgactagctccataactggttattcagctatctgtgctgtgtaccaacagaggcatttatttactaaataacttcataggccttctaagctattttcccatcgtagggcttttgcccttgcaattccctttgcctacaactcacctttccttgttgtagctacgtctagtgccttctcattcttcatatttcatcctaaatgttactaccttggacaccttctctgaccaccctatctaaattattccttctcagttattttctgttaaagcatcctcttaatgtctttcaacacttttcacaaagctcttattttatgtttttattttctgcttctcccatttgaccatattctcagggccttacacagagtctggcatgagacagctccatttaaaaagatcctacttcagattagggtggagtaggaaggaagagcctcctgggaaggtgatgactcaactgtcctactgagaatgagaaataggtatagctttggatgtgaaaaaggtccaaaagctcatttcttgcagaaagccataaatagaaaggggtagggagaccacagtgtgtttggagaactcaagtagttgaatttaaggtgttacgaaacaatagcaaaagaagagactttgtaagcaaaagtcagattgtaaaagaccttgtattaatatatcatggtaaggcgttctgcattcttttattttggaaaatagtcctgagaggattggmtgttacaattataaccttagatataatggggagaatgaattgaatgagaacaggggtaggaggcagttgtgataatgttaccagaaaggggccccactcctaaccccaagagagggttcttggaccttgcgcaagaaggaattccggatgggtccataaagtgaaagcaagtttattaagaaaataaaggaataaagaatggctgctgcataggcagatcagtcccgagaactgctgctttggtatttttatggttatttcttgattgtatgccaaacaaagggtggattattcatgagttttccaggtaacgggtaggcaattcccagaactgagggttggtacctgtcccccactttttctttttttgggagacagaatttcactcttgtcacccaggctggagcgcagtggcgtgatcttggctcactgcaacctctgcctcccggcttcaagcgattctcctgcctcagcctccctatagtagctgggattacaggagtgcaccaccacacccagctaatttttgtattatttgtagagatgggatttcaccatgttggccagcctggtctcgaactcctgacctcaggccatccacccacctcggcctcccaaagtgctgggattacaggtgtgagcccccgtgcccagctggtacctcccctttttagcccatatatgcatccattctggatgttgccatggcatctaaactgtatgtattatatacatataatatatatattacaatgagcagtgaggacgaccagaggtcactttcatcgccatcttggttttggtgggatttggccacttcttttatcagcaaggtctttgtgacctgtatattgtgccaacctcctatctcattctgtgacttaaaatgcctcatctcctgggaatgcagcccagtaggtctcatcctcattttaaccagcccctgttcaagatggagttgctctgcttcaaacacctctgacagtagtataggcaggaaattgtgtgtgtttaatacaactatatatattcaagtatagttaccaaaaaggcagttggaaatatgagacttggactagggagaattctaggaaatttaggaattattggcttatgttggtgattgagatcacaggagttgatgagatgatccagggagagtgtgtaatgaaaaacaatgacagcactggggagaggaagagggactatccatggaaatgccagccaggggccaggcgtggtggctcacacctataatcccagcactttgggaggccgaggcaggtggatcacctgaggtcaggagtttgagaccaggctggccaacatggtgaatccctgtctctaccaaaaatagaaaaattaactgggtgtggtggtgcactcctgtaatcccagctacttgggaggccttggcaggagaatcacttgaactcaggaggtgcaggttgcagtgagcttacatcgcaccactgcactccagcctgggccacagaaggagactccatctcaaacaagaaaaaaaaatgccagccaggtaaaaggaaaattagaaagcattggtatggtataaaaagaaatatatttgatctttgtcccattcttgtcacagagcttctaaaaccataggaattccctgagtgattggagtatcttgttttcataatgagccctttttaatgacaactgaatttatgctaatgagtggtttagggtggggtgcctagataacctcagagggtgaccagtcacctgaaaggttaagtgatcaggggattagaggactggaactttccttcccacccacccatttccaggaagggtgggggaggacaggctgaaaattaggctttatgaaaactcttgaacatgattggacttccaggtaactaaactcatggttacgctgggagagtggcatgctgagagggcatgaatgctcagacatctcatctgtgtcacttacaatatcctttataatgaaccagtaaatgtaagtatagtgcttccctgagttctgtgagctattctgacattgaaccaagatgggaagaggtagaaatgaatgataggacacccagttggtgtttgctggagaaccacttcatgcatgtggaaaaatccccatatatctagttatgaagtgttctgtgttgattttgatagtagaggagaaaaagtttctattttcacagttgttttttttgttcgttttgggaaggcagggtgacagtgtgtctcactttagtatgcataagaatcatcccaagagcatccccagagtcttgattctttaggttcacagttcacttgaggaatctgcatcattaatgggctccccagatgattcttatatggggtggagggacccaaactgtaactatagtaggtccatcacccaatgtatgcagcaagttgatatgctgagacaccaggttgcagcagagaagaggtttaatcgtagggtcaccaaatgaggagatgggggggaaccttaatccatctccccaaggaatttgaggttagggtttttaaggtttttggagtacccaaagtgtagaggtcgttgattggttgcaacttgcagagtgaagtcatgggacagggagataataaggctaggctgtattcgcatgctgatccatatcattcctctgtggggggtcttcaaactggttgctggatctgggggcccaaaaaacatcttaagctatccttaaaagtgttacgattctaatgtcagagctcctgtctatagaaagaatgggggtgcaaatggtcagtatctggtgttacatgacatttagcaacaaggaagtgggccaaagtgcagcctgattattaatgagctacagccatatttctgtccagaccccggcatgtaattcttgttaaccctatggggatggtttcagaactactcttgaggatcactgcaaggcttcatgaaatgtccagaaagataaatcttaagagagatcctaggcatccttgcaggatgtggtatattggcaatagaagccaatgttgagctaatgaaggcaagaaggttccctgggaagggagttgggaatgatatccataacataaagaaaagttctttccctcttatgctaaaggaaagaggtaaaacatatgccgaaaagataggatgcttttgcagtgaaccaaaaggctcccagtgatatctgggacttgggttgacttaatggaaagcaagtccctgaagtgagtatgagttctttgcatttcagagccatcaaaagtgtcctttttcctatgactgcataacagattacccaaaacttagcaacttaacagccattttattatgttcactgattctgtgagtcaagaatacagatagggcacagcggggatgtcttgtctttgctccatggactctggagccttaactgagaagatgtgaagattggggtggctcaacaactgatggttgaaatgatcttaaatcttcactcacatgtctgggacctgggctggaatgattcaaagactaggactgttgagtagagcactactcagagctctccatttagcttgacttccttgcagcacagcagactcggggtaagtggactttttacatggcaaggctccaagtgcatatattccagggaacaagatagaagaacctgcattgtcttttatgacctagtcttggaagtcacccagtgtcactcattttgtttttttttttttttttttgagactcagtctggctctgtcgcccaggctggagtgcagtggcgcgatcttggctcactgcaacctccacctcctgggtgcaagcgattcttctgcctcagtctcctgagtagctgggattacaggggcccccccaccacacctggctaattttttgtatttttagtagagatggggtttcaccatgttggtcaggctggtcccgaactcctgacctcaagtgatccacccaccttggcttcccaaagtgctgggattacaggcgtgagccactgcgcctggccacccactgtcacttctgatgtgcattatttgttgaagcagtcacaaaccagcccagatttaaggagatgggatattagaccccatcttgtgataggagtagtgttgcagaattttgacctgtgatttcgaattgccacaaaaagcaagaaagaaaagttgaggatactactgtgagaaaggtgggatttgtcttcttgcactttattttttctgaaatgtacattgctagtatttgtgtaagccaagtggttaatcttttcataaaaatgcagtcttaagaaatcttaacaaaatttggattttaaaaaagttgatattagacccagtgaaagaactactttttttactgttatgttttgtttttcatgattttgtatattcttcaggacaagcagtgggaagagctctgttatcaatgcaatgttgtgggataaagttctccctagtgggattggccatataaccaattgcttcctaagtgttgaaggaactgatggagataaagcctatcttatgacagaaggatcagatgaaaaaaagagtgtgaaggtatgatctttaacctttagcagaataatatacctgaaacaatgtcctgaacttattctttaataacatttttataagatgtctgcatcgctgacatcttataaaaagaactgttaatatttttctttttttttttagacggaatttcgctcttgttgcccaggctggagtgcaatggcacaatctcggctcaccgcaacctctgcctcccgggttcaagcgattctcctgcctcagcctcccaagtagctgggactacaggcgtgcgccaccacacccggctaatttttgtatttttaatagagatgggggtttcaccatcttggccaggctggtctcaaactcctgacctcatgatccacccacctcggcctcccaaagtgctgggattataggcgtgagccactgcacccggcctttttttttttttttttttgacactgagtctcactctgtcacccgggctagagtacagtggcgtgatcttggctcgctgcaacctctgcctcttgggttcaaatgattctcctgcctcagcctcctgagtagctgggattacaggtgcgcaccatcatgcccagctaattttcgtactttttttttttttttttttttttattagagacagggtttcaccatgttggccaggctggtcttgaactcttgacctcaggtgatccatccgcctcagcctcccaaagtgctaggattataggcatgcgccaccacacccggccaaaaagcactgttaatatttctaactttgaaagccatcactaagtattttgagtactctaaatttttttttcacttcataactaaattagtgaaaaaataaaacttgtccttaatttaaaggtatattagaattaacaagttttttaaatctacccttccagtgagactaacattattttagttatttatttgtttttagatggaatcttgctctgttgcccaggctggagtgcaatggcacgatattggctagcaacctccacctcctgggctcaagtgattctcctccctcagcctcccgagtagctgggattacaggcatgcaccaccacacctgcctaatttttgtaattttagtagagactgggtttcaccatattgcccaggctggtcttgaactcctgacctcaggtgatccacctgccttggcctcccaaagtgctgagattacaggcgtgaaccaccacgcccggctgagactaacattattgaagtgtatcattgctgtttaatcgtgtatcattgctgtttaatctcaaatttgtcccaccttggcctcccaaagtgttgtggttacagacttgtgccaccatgcctggcctccgatttgtctttttgaaacagaattgcttaagaaattgggccctggcatctgtttttgatatgtatctgtgtttttagaaactgtcttacctcaggattatgtagtaagtatatttatgaataaatattttaactttatcagatgagggccaatggcaattccctacctttcataaatttctcaattcagtgccactccttcagccaaaaaaaaaaaaaataaaaggaaaaacaaattaggatgcaaaatgttgactctggactgaaagcagttagttaaggcactgtttctcattgtggttactttctcttgagtctaaagatctcttccacaaacacaaaagttcagtgcttgatgatccatgctattttatttcttggtaaagtcatgggtggttcttctttgtgaatttgctctttgatgtaaatcaggtaactcaatctgtaagttttagaataagcatacccttcagattagttattagaaaaatgagatgatgtttatgaaaatactattcaaggccgggcacagtggctcacgcttgcaatcctagcacttgagctggtcggattgcttgagaccagcctgagcaatatagtgagaccccatctctacaaaaaatacaaaaattagccaagcatagtggcgcatacctgtagtcccagctacccgagtggctgaggtgggaggattggttgaatctgggaggttgaggcttcagtgagccgtgatcactcagcctgggaaatggagcaagacactgtctcgaaaagaaaagaaaatactaatcaagcttttaattcatataaatgaaggaatcactgttgttttgtgattaagatttttagcaaatcaaaattcaaacttctcgtgacttcagagtctcaaagtatgctgttattttaaagaaatcatctctcattttcctgatccatgctcttccagtcctcttcacactcttttcctcctccttattttagattcaggggttggttacatgtacaggtttatcacatggatrcattgtgtgatggataggtctgggcttcaactgagcccgtcacccaaatagtgaatgtagcattcagtagtttttcagctcttgtcaccttccacctttacccctgtagtagctcccagtgtttattgttcccatctttatttctgtgtgtacccaaatgtttatctctcactttttttttttttttggagacagagtcttgctctgttgcccaggctggggtgcagtggcgtgatcttggctcactgcaaccttcacctcctgggttcaagcaattctcctgtctccgcctcccgagtagctgaaattagaggcacgtgccaccatgcccagctaatttttgtattttttgtagagacagggtttcatgatgttgtccaggctggtctcaaaactcctgacctcagttgatccacctgcctcggcctcccaaagtgctggaattactggcatgagccaccgcccccggcctagctctcacttttaagcaagaagatgcagtatttggttttctgtttctgcattaattgacttaggataatggcctccagctccatccatgttcctgcaaaagacttgatttcattcctttctatggggtgttaaaagctatgtaattttaacctgttttaataatgacatttcttctaatgacatttcttccatatgactaagtgatacacatttatttcagtagaatcagaaaatacaaataggcaaaaagaacagagactccagaacttatatacttcacaaaatcagtatcaggagttgcttagaattctgttgctggagttctttttgagggaaccattttttttctacttggaaatttaaaaattcaggttctcaagattgctcagaaggttttatttcagagttttaccttttatatacctgttttgctaaaataaatgtaccacaatgtttttaatttttattgaattttattacaagtggagtttatttttttcttttcctcctgctttagacagttaatcaactggcccatgcccttcacatggacaaagatttgaaagctggctgtcttgtacgtgtgttttggccaaaagcaaaatgtgccctcttgagagatgacctggtgttagtagacaggtaaaattacatgtggattgcattttctctggaagtttatttaatagtataatactgcttactttagcatatggtataaaaaattacaacattcagttgccattttgttctcattagctagattaaggaagagatatggtattggttttattttataagttacataaaagcaccaattcatcactctgattccatttcaagaaattttaaggatggccactttttttggccagagtgcagtgccgcagtgccacgatcttggctcactgcaaccttcgcctgccgggtacaagtgattctcccacctcagtctcctgggtagctgggattacagacacacaccagccacctcacctggctccattttgtttttgataatggattttccttttaaatggaaatgagtgtttcaagtaatccatagaaacagaggagagagaagatgttcatgacaccaagatatttggtttaaatacaatgttaactagtttagctttatttcatagccagattgtatctatgacccagtcagtcaagattgacagttggatagatacaagaaaatatgaatgagatctagtatttggtaccaaaatgggtaacggtagtgaaaaataattgatttttatttatttttttgagacagagtctcactctgtcacctaggctggagtayagtggcgcagtgtcagcttgctgcaacctccccctccggggttcaagccattcttgtgcctcagcctcctgagtagccaccacgcctggctaatctttgtattttttggtagagacggggattcaccatgttggccaggctggtctcaaactcctggcttcaagtaatccccccatctcagcctcccaaagtgctgaaatgacaggtgtgagctgccgtacctggctgaataacaatttaattgtacatttaaaaataactaaaagaatataattgtattgtttgtaatacaaagaataaatgcttgaggtgatagatacctcgtttaccacgtgatttttttttttttcggaggcagggtcttgctgtgttgcccagtctggagtgcagtggtgggatcatggcttattgcaaactccgcttcccagtcttaagcaacccttccacctcagccaccagagtagctggggctacaggggcatgccaccaagcctagctaattttttttttgtgtatgtggagtcagggttttgtcatgttgctcaggctggtctcaaagtcctggactcaaactcccgccttggcatcccaaaatgctaggattataggaatatgccactgcactcagcccctgatgtgattattacacattgtatgcttgtatcaaaatacttcatatacctcataaatatgtatacttaattaatatatacccacaaaaattttaaatgaataaattttttaactttttacaaatatttattgttggcaaattcttcactgcagctcctagtacagttggtatattaaatttatatttttttatttgtgtttataagtgcttaaatcatctctgagccatactggatatagctgcttgaaccctcattgtttagtatctattagcctagttttatatttcagccatctaaagcataaacattaaaaagattgaaatattgagcwtgttatttgctttgtcaaagatcactaagttaaaatttcctagacttcttacagatgacagctggaaatcctggtttttaaacttcaaattatatataaaagctgaaaaaattctgtaacccaaattttctttttaagaaatataatacaatttttatttcactctcattagtccaggcacagatgtcactacagagctggatagctggattgataagttttgcctagatgctgatgtctttgttttggtcgcaaactctgaatcaacactaatgaatacggtaggatttaatcatattattgtgtttcgatggtaggaaatgaaatggtatctgttttaattctgaaaagcaagggaaatccatatcgtggattagaaaaaacttctaaaaacaggcatgaatgaaggggtttgtgttttcatagaaccagaagggctgtttctagtctttctatagtgtgtagttccctggatttctctagcagtatagggcttgatggttctagcttctggttatttgtcagtctcagggaaaatgagtgccagaaattttaggatgcttatttaagtctcttgaataaagtataaaccactccttccttctgccatctatcaggcaaggctttttatattttcagtattgtcagctatttccagcttcaccagaatatactccaggtttcagcttaactgtgtacactttaagctgctgtcagacttagaagattatttagccagatgtctggagccagactcatctgaaataaactttccagagtttaggtaatctaatattcaaaattataacatgattttttaaagttatcagtttttttcatctttgaaagtttaatgctcatagagtgctttgggatcctttgtcagtggtgttaattactgtttaaatggttcagactttctcattaaaataaaatttcaattataaatgtaaattatagtgaatgtactgtggggttttttttgtttttcaggaaaaacacttttttyacaaggtgaatgagcggctttccaagcctaatattttcattctcaataatcgttgggatgcctctgcatcagagccagaatatatggaagacgtaagttgttatttttttttttgtaggttttgaaatacagtcacatacattgttatttgagaaaacaatattgcttatagaatagaaaattataagagctattccatgaaaagaagatagttagagaaaacctgaagtaggtatgtgataaagaccaaagtctgaagttactttgagggaaaattgtgttatactatctagttatttcaaagcttgaaagttcttttttgtttaagttgttattgaaatgtacataacagaaaagtacataaatcgtaagtgatccttccagtttggcttcctaaagtgctgggatgacaggcctgagccaccatgcctggccaaattttacaaatttaacacacctgtttcaaaatccagatcaaaaagcagaccattctgaacaccccagaaccttcctcttacctacctccttctaacttcccttctgtcctacttcccaaggagaaattatccatttatcatgacttctgaccccctaaattaatctttctggttgttcaactttatataacagaattatataatacctgctcttgcatctgtttttgtttttatttaacgtgtttgtcatatgtgtccatattattgtgcgtagcatagttgtattgcattcccattgctgtatagtattccatctgtgactatactacaattgatttattcacagtgatgggcatttgggttaatttactgtattcagttatgaatgctactgtgcatatgcttgtatatgtccttctggtatgcatatgtatgcatttttgttaggtagttctcagtgtggaggatggacagttttgacctcaatgggatatttggcagcatctgaagatactttttttttgttacaattggggttttgtgctactggcatctaatgagtagaggttagagatgctgttacacatgctctgacacagaacaggcccccaagcaaacactggccaatccaaaacgtcagtaatgcagacgtcagtaaaccatgggtatatgtacttagaggtaaaactgctagattacaagttaagaatatgttcgattttagtaaatatatagcaccagagttctccaaagtgcttggtgtcgatttatactcctgccagcagattgagtttcataagatttgcatcctcaacttttttttttttttggcattttagtcacaccaattgtagaaacttaaaaagaagtatctggaatttgaactataaataatatttatttaatttgcttgagactatttctgattttaatagtagtacgagattattatatgtagaggacaagataaaaataacttaaactatcccatcactgttcacatgataaaattatttgctttcatttttccccaattggaattttgcataacatcatgttttatatcctcctgtcattaactgttgtcttacagtcttgctctttcaaattggggtctcagaattaggaagcatcactcataaattatttttccttaaatatttcagcattcctatttagatttatttttgcaagtcttaatatagagatctctcatcatagccataatactaaagactagtactaaatcctaacttctaacccttaatcttcacttcagtgcccaagtggtaatcttgaacccaacattgcaattctaatgcctggttaatgcattctacccaaccttaactccccaaccttaactttgttttttgagacggagtcttgctctgtcacccaggctggagtacaggggcacgatcttggctcactgcagcctccacctcctgggctcaagcgactctcctgcctcagcctgcccagtagctgggattaccggcacctgccaccacacccagctaatttttgtgtttttaataaagacgaggtttcaccatgttgtccaggctgttctcaaactcctgacctcgtgatctgcccgccttggcctcccaaagtgctgggattgcaggcgtgagccactgtgcccagcagaattttaaatagatgttcaaaagacagaatcgttaagagaaagatttcctgtcatcaagtatcaaacttcatttattagaatttcttaaattcattagttatatggtaacttttattatatcactgtgaataaagtaagtattggtctatagtcgttggttattatatttgtttaaattattagaattcttttaataccgttttctctgtaggtacgcagacagcacatggaaagatgcctgcatttcttggtggaggagctcaaagttgtaaatgctttagaagcacagaatcgtatcttctttgtttcagcaaaggaagttcttagygctagaaagcaaaaagcacaggggatgccagaaagtggtatgcattacctatagatttcctgtttaaatataaaaatatttaaaattggctgggtgcggtggctcacgcctgtaatcccagcactttggaaggctgaggcgggcggatcatgaggtcaggagtttgagaccagcctggccaacatggtgaaaccccatctctactaaaaatacaaaaattagctgggcatggtggtgcacacctgtaatcccagcttcttgsggggctgaggccagaaaattgcttgaacccaggaggcggaggttgcagcgagccaagattgcgccattgcactccagctctgggcaacagagcaagactctgtctcgggggaaaaagtatatatatatatatatwtttaaaattataaaatcagtagcctaccagaaaacatatcttgctacatactaggtttttaaatctttgcctgtacgttacaggtgtggcacttgctgaaggatttcatgcaagattacaggaatttcagaattttgaacaaatctttgaggtaggaattttgtgattgtattgcctaatacaaaactctttctttggttggagaaagcataatcttctatttttatcctttgtctttgtcaataacttttgctgttatttagtttagttactgacacagccagtaaaatgtggaaagtgaagaaaaggagcccctgcaaaatgatttgtaagaattgagaattaaagattgtaatttattccttattcttatttttatgtattttatataaataagaaactgtgtttcaatattgctgtgttgtgcaatgaatgaaattccctgtattcaataatttggaacaagagtaaacaagcgtaattgctgttggaatggataatagagcaaagtaagcattatccttttttactttgtgccgcatgactaatagaagtatacaaaacatgattaatgccatttgacaaaattttattatatttatatactgtgttaccacatgtccattctccatattttgtgccaaacattctaaatgaataattgagtagaaaagagcttcagcgttttcagaaacttctaggaaactattgaagtgcctgagtggtagatggggagggaggctagtttcttatgttgcattgtaagtgtttttattcagagacattaaaactcaccctacatttgactgaatagttctttagatattaaccttctgaacccctattttgccctgtataattcatatcaccttcccacttaggaatgaacacagtgacttcagcattgaagaaacctcagtctgtaattattcttataagtagtaactgctttaatgtaaaggggacatgaatgttgagtatacttggcaggatttttaaaataaaaaatgtgcttactatctctcatctttaatttggtgagagaaaaaaggttattagacagatgaagacaaactggaagaaagcaaatccactgccagctatctcgataagatctaattgttcagaggctactggattatcagtagatgtcctctcaagccaagctataggatacgtgaagtccccgttactcaaagactattgtttgttttttttcttttccttttgctttcaccaaagggttgatgctctcctcacctcttttttctcttaaagaaatgggatctccctctgttatccaggctggagtgcagttgggcaatcatagcrcattgcagcctcgaactcctgggctcaaatgatcctcccacctcagcctcctctcctcactgttatcagttatttcatccatggggaaaatatgtagggagaggatctattctacttccttgtctttatttactgaccttagtatatatgtgttttatgtatgtttatcattgatttcttctaaattatacatttatataatgtataattgtgtaatgttctgttacacatttatactgcttccatattggttcatggtatagcttgtgcttcccaagaatatctcgttgaggaggtgggaatgagaagaataagatatgctgtagggaattggttcataagcctagctgatcatcagaatcacatgacgtgctttagagaaccacaggctcctgacctatcctatccccaaccccagatccagggggttggggttggtctaggaatctatatacatatatattcaaagttccccaagtgattgcaataatcagacagacttaggaactattctttttaaatgtttttagaggaaacttggcagtttatgttttattctaatggtccatttgggattctaaaatttatgtatggaaaaaattgcttatgagcagtagctttttgtttttacttaaagtcatggaatgtccagctttagagtttgaaaattttaagtctgaaatatctaaaatgagaatcagttaaaaattatttgaatttttccaaacaatcagctgggcaaaaaatattatgtctgaatgtattaaaaagagacaaaacattttttgttaattaattacattgaaagttttagtcagctttattccaaaactggtatttgttacttcttaagtcagttttggtaatttctgatttcttagaaattggtgtatttctgaacatttataatttagtagcataaaattgtttgttttgaatctcttgtttctcacttctatatttaaatataaatatatatctacatatacatacacacacagacccttaatgggtttgccaatgatttatcatccaaagacacagccccagctcttatgtaatttatcacttaataaatatcatttttggggtttcattcactaagttctttttttttttttttttttttttgagacagagtctcgctctgtcgccgccaggctggaatgagggagtgagtgcagcggcgcgatgtcagctcactacaacctccggctcctgggttcaagggactcttctgcctcagcttccctagtagctgggactacaggggcacaccactacatccggctaatttttgtatttttagtagagacggggttacacagtgttggccaggatggtctcgatctcctgacctcatgatccacccgccttggcctcccaaagtgctgggactacaggcgtgagccaccgtgcctggcctgtgttcgtctttaacattgtttacgttgaagatgcattggtttttgcttattcttaaagaaaagattcaggattgtgaatttgtgactgcagctttaggcgtatcccaaggttttcagtactagtttagtttttgttgtttttgtttctaattatccttttggcatttccttatcaatataagactttttaaaattcaagtgttttgattcattttatccaatttttggttactaatttcttggtttctttgtgttgtggtcacatcatgtggcttttacacacattttctctgttttggggatttgcttacttttttttgtagtcgtgcaagattttttgtgaaaagaaaaactgtatcaagttcatcacctttatcaatttgacctgtgccgtgaacttctttagattcatttgattcaaatggatctaagtattttaaacatttagaatactaatttaagcaaggcttgaaaattaaatggagtaaaagcaataaaaaaaatcaatattagcctgggcattggtggctcatgccagtaatgccagtactttgggatgccaaagcaggaagatctcttgagcttaggagattgagatcaggttgggcaaaaacatgaaaagactaaatcacatctctagcaggaaaaaaaaaaaatccagatatgatagctcatgactatagtcacagctaccccagaggctgaggtagaaggccaagaagtttgaggctgtggtgatggtgagctatggaggtaccactgtgctccaacctgtgtgacagagtgagactctcttttctttcaaaaaaaaggaagaaaggaaaatcaatgttagtctgtcaatacattttcttattgttttaaaactgtatttggaaagtttcaaaatgcatttggactgcattgttctaaaggcaagttagaaatccaaatatcttttgcacagttatttcaccattaattcttactagttttggttgtatgatgggagatagacgtataaaaataacttatttaaaatgtcagtggatttttttgtaatggacattcctggatgataggtgaaatttgaacatgaactgtttgttagataatagtattgtctcaatggtaaatattctgaatacaattgttttgtgattgtgcaaatgttttctttcttagaagacaagtattgatgtgttaggtaacaagcttgtgatgtagtaatgacctgtcaaaatgttcaggaaggaaaataatacataagtatatataaaaatatatgcctctctttatatatatgggggtcatacattttatatwttcattgcaagacatgtattatatatattatatatatttattatatattatatattatataatacatatataaatattatatataatgttatatataaatattatatatatatgccctcacacaggagagagagtatcgagcgcgagtatggagggaggggagaagtaaacaaaaggggctgaatgttaatatttgatatatctagatgaaaggtctatttcttgcactttctattgaaagtatatcaaaataagttggcagtgatgagtagcatgttaggtgtttgtagggtctgttttcaagggaaattgacaagtttgttggttttatgttttaattacatatataaatttatattattaatgtatgattagagttcctgataaaataaatctgggaactgctgcatattatatatgttccccatagagattaattagcatattagtgtagtaaggatgctgagaaataacttagaaggggaactttatttaaattaacacttcccatacttatttggagtaaaatgttcttttttcaaggtacctcttaaatatcctacagatcagtgggaacaccaatgtgggattaytttttaattgattattttcttctctatacttactcatcattatatatttttgaatcagacagtaacttatattgcctaataacttttggagatcttttctgtctcgtctagctctaacactgtgctgttatctacaaatttggatcttcattgctgatatctagatctgcttcatcgaggaatatagactttattttaatctttttccttttaaaaatatttttgtttttataattttgcagaagttaatttgacacatttatgaggcatttatttaaaataaagtcaatgcattattttagttattaaaaaataagtagtttacaaatgttcactattatgtaattattggtgattttaaagaagaaaacatccrggtatgttttatctttaggtgtgtacagaacaggaatgctataacttcctacattaattttttcaaaatcagtgaaaataagtgatgcataaatgagcttcaccatgggaaaaaatgaagctaggcaatgcaagaaagtaatggcttcagagttaaatattgactaaattaattaccctcatgtgctctatagctaaataatctgttttgttttctctacctcaaacgaaatgctgaagaggggagctaaaatggcagtagagattatagtctttctgagtgctcaaataatttcagagacatgaaggctaagcataggtcgtaaataggacattgaatgcacgtgtagcatcctgatgatttcaggataagaaatgtagcactagagtattaagtaaatgccttttgaagcctaaaagccatttattaaaggaaggatagtaatgaacttcaggaagcaattaccacaatttgtattagctaaatatatagaggttcgagaagatgaattcattggagtatcagagaattaatatatccctaatttttaaaaaatttatcatagaaaataaacatgtctcttataaaacatctatagtacttactgtgctatatttcagtgcagaatttgactttctgtgaagtaaaaatgaaataagacaaattgtaatataaaaattttataaatttttatttatttattttttgagacagagtctcgctctgtcgcccaggctggagtgcagtggcgctatctcagctcactgcaagctccaccttccgggttctcgccattctcctgcctcagcctcccgagtagctgggactacaagcgcgtgccaccatacccagctaattttttgtatttttagtagagatggggtttcaccatgttagcctggatggtctcaatctcctgacctcgtgatctgcccgcctcggcctcacaaagtgctgggattacaggagtgagccaccacgcccggcccaattttataaattttaaatgataaatcatagtaaatatatatttataggatgggcgtggtggctcactcttgtaatcctagcactttgtgagactgagacaggcagatgacttgaggtcaggagttgaagaccggcctggccaacactgcaaaaccctaactctactaaaaatgtaaaaattagccaggcatagtggtgcatgcctgtaattacagctacttgggaggctaaagtaggagaatcacttgaacctaggcggtggaggttgcagtgagtcgagatcatgccattgcactccagccttggtgacagtgcaagactgtcaaaaatatatatataacatatataacatatatatgtaatatatatataacatatataacatatatatgtaatatatatataacatatataacatatatatgtaatatatatatataagataacaagtattctatatattgaaaattgaaacaaatgtgaaatgtatccattgataaatgtgatgcattgtgacgtattttttatttaaataaacactggttataaaacactgatttataacaactattttaaatgggttgttagcttgaagataaatgagatagggcatgattcaggtttctgtgtacacactatattctaatgaaagtaattacaattatcttctaaacagctgcagatattttttctataaacaattttagatgttacattgttaaatgttagctttcaaattcttcacattttaactcaatgaagtcctttttagcaaacttacaggaatcattgtatcattcagctattaaataaggaattgttctaattcacatcttaattaagaactttactaggttatatcttttgcaagtatgagaataatctagatagaaggactagaattggattaaaggtgatccagataaaaatagtaattctaatgaggaaattttttaacattgaaaatagtaccctgtttattttttttaatgttagagtcaaaccattgcacattactgtgtaaaaatacacaaagatggtaacttgctgcyaaagccctttttacttttgaatctttgtatttttttcacctttgtaattttaagttgtgcttttatcactcatttgttttctatctttatttctgtttgggttaaagttacaaacmgcaagtttttgtgtttaaattcctgaaaatgttgcgatggaattacagtaatgtgttayggcttgggcccctcgcaggagtgtatctcgcagtcagcagtgaaaacaaagttcgaacagcacactatcagagctaaacagatactagctactgtgaaaaacataatggattcagtaaacctggcagctgaagataaaaggtatgagttcattttgttgcaacataaaaatgttagtttttttgtcagacttttgttaagatgaggttttaaattgttgtactataaatactttttacactgaaatcaaccttgtgggtttaactgatgcctacttctatatttttaagtgcgtatttgaaagtgtcgatatttattctgcaaccttgcacacatcatttatatcccctggacctcactattcctgtgtatgaattgtgatttttaaaatgttttgtggctttaaaatatctttgaagcagtggaagaaccatttcttcaagcagatttttatgaagaagtccaaaacaggtgatcctctttctgcattcaacccacgacccattttttaatatggtcatacattggtattttgaaatcactattttatactagttgtgtttgtttattgcctggtgaacaaacaaggcgatgctacctgccaaccagaaagttgatttggtaagcagtaccctttatgttatactgtacggcattattttatactatttgttaccttgtaaaggtggcaatgaatacatgaaaataccagcattatcgatacaaagtataattttcacaaacttggtatgcttgaaacacagatcgggatgttattagatgtgacaaaagtaatgatgttaagcctcrataggaccttcagtggacttaagccagttgaaggaaacataaacgcatcaaagcttaagtccaagatgacataacattggaattttaaatgtatttgctctttcagggaacaaagaccccttcatgtccctgtctgttgctttataatggtactttcttaggaatgaattaagttcaaatgcagagaattgccagcatataaaacgcaaggatcagaaccctgagtttgaactcagcccctgtgtacagcctccgtgtggcctctgtttaattagatcgtgctgctatagcagttccttctagctcagttgctttgatgtagtacccaaattttggcctaaaagtgatttaattagtaataatttttaaagatataggatgttgaacaaagtatagcacaaagaagatgtgatttgaggattgtataatcataatgtcctgggaacttcttaagtaaaagatcttcttaaatggatctcaggtctttattttcctgtatcagccagagttgaacaaacttttgtttaaaaaaagagccagatagtaaatattctaggctttatgggccataaagtctcttggagctastcatttctacagttttagagcaaaagcagccatagatagataataggtaaatgaatgggtgtggctgtgtttcaagaaaactttaacaaaagctggcagctggctagatttggcttgtaaggtgctatatgctgacccctgcttattaactaaagtcagtattgcattctgttttgcctgttcatatctatgaagacttagaattcttattcatcctttctgggattcaggtgccacatgggcagagaaacgtggtttctatcaaatcatctatataaaatactttataagtgaaatattacttgaatcctttgagatgttacaagttttttttttccttgagtcatgctaatagatggttcaatacatgaatgagtcccttgctgaaatgctttaggacttcagactaccctgaacgttgattrctctttatactgaaataggcattattcagtggaagagagggaagaccaaattgatagactggactttattcgaaaccagatgaaccttttaacactggatgttaagaaaaaaatcaaggaggttaccgaggaggtggcaaacaaagtgggtaacagtagcttcatgattaaaataacctggatggaaattatttttgataatgctaaaaatgttattcctgttactttaaaagaatgttttcagatttttcaatttaatttttttgaataattgataatcttgtttaattattttaactccaaaattttcatattttcaggtttcatgtgcaatgacagatgaaatttgtcgactgtctgttttggttgatgaattttgttcagagtttcatcctaatccagatgtattaaaaatatataaaagtgtaagttaaagtatagataaaattattcagagacagtttcttmttattctataccctcatttatttcatggtttggcatttcagtgtatcagtacaaaatgaaactgttagatctcttgtgccctcttgtaataaatgtaaactgtcttgtataaaaagtaaatagaaaatttatacttagaatgagataaagatcattttaggacgaggcacagtggctcatgcctgtaatctcaacactttgggaggccgaggtgggaggatcagttgggccccagagttcgagaccagcctgggcaacacagtgagaactctaatctacaaaaaacagttaggctggttgcggtggctcctgcctttaatcccagcactttgggaggctgaggcggacggatcacgaggtcaggagttcgagaccagcctgaccaacatggtgaaaccctgtctactaaaaatacaaaaaaaaaattagccggtggcaggcgcctgtaataccagctactctggaggctgaggcgggagaatcgcttgaaaccggaaggcagaagtggcagtgagccaagatcacaccactgcactccaacctgggcaacaagagcaaaactctatctcaaaaaaaataaaaaatagccaagcatggcgacacgcttctatagtcccagttactcaggagtctgaggcaggaggatcgcgtgagcctaggaggtcaaggctacagtgagtcaagatcaaagcactccagcctaggcaacaaagcaagaccctgtctcaaaaaaaaaaaaaaaagtcaaattaaaaagaccattttggcatttactgaatattttatgtctttataaaaactacatactttctggagaaaaaataatatggatatttaccattgttaacaggaattaaataagcacatagaggatggtatgggaagaaatttggctgatcgatgcaccgatgaagtaaacgccttagtgcttcagacccagcaagaaattattggtaatatttatgtctacaaggtcatgtmtggtttgttttttcattcatgactggtgaagagcttattttcctttaggcattccattgaaggtaaaacatttaccattcttatcttaagtgttgtaattttgttctttctagaaaatttgaagccattacttccagctggtatacaggataaactacatacactgatcccttgcaagaaatttgatctcagttataatctaaattaccacaagttatgttcagattttcaagaggatattgtatttcgtttttccctgggctggtcttcccttgtacatcgatttttgggccctagaaatgctcaaagggtgctcctaggattatcagagcctatctttcaggtatgtatctttgaatctaccaattaagactctcctttattattttgtttatgtggtttttctataataaaactagctttacaaaatctgcacatttaaaagctagtatctatctcttagagccatttctgaggtagatatttagtttgagcatctccaatctgaaaatccttaaaggtccaaaatgaaaaactttttgagtacggtgacaccacaggtggaaaattccacaccagacctcaatgaggtcatagtaaaaacgcaggcacacaacacacagtttattcagtgtcctcaagggaaaaaagactcagcctcttctagctgcaatatatcttttccacgtatgcccaaattcccccacacaagcacacctatgaagggtactaaaatggcacatgtgcaggtccagtgcaccaacagcattttccccatgatgccccacaaggggccaagacctttgtgcattacccagtatgggcttctttacttcctgtcttttctctggtgtaaagatactgtttaaaaaaaatttttttttgagtggggatgcgtttgagacagagacctgcgctgtggctcaggctggagtgcagtggtgcaatcttggctcactgcaacctccacctcccgggttcatgcgattctcctgcctcagcctcctgagcagctgggattatacgcacccaccaccacacccagctaatttttgtatttttagtagacatggggtttcaccgtgttggccagactggtctcgaactcctgacctcaagtgatccacctgcctcagcctcccaaagtgttgggattacaggcgtgagccacagcacccaggctgtttaaaatgtttaaaaggcctacagatacccttgtgggtgacattgataagaaaaagaagaggcatttatttttatttataacacataaatttaagctgttggaaaaactggacaataatgtaagtgagaaacttcttacagaagaatgatgttggaatgaacaccatatatgacctaaaagaaagaacaactttcctaaagttgttctttaggactaaactgttgaagttccatgctaaaaatgatgacagaagttaatgaaaaaaacaaaaacactgcagaaagttaaaaacgaagatcttgatcatgcattgaaagagtggatccatcagcattgcagtgaacacgtgccacttaaggacatgctgatcatgaaataaacatctattaaaatgaactgaaaatcgaagggaactgtgagtattcaataggctggttagagaaatttaaggtaagatagcattaacttttctaaaggtttgtggtgttaaagcatcttgatcacaaaacagcagagaaattcattgatgaatttgccaagattgtctctgatgaaaatctgactccagaacaagtctataatgctgatgaaacatcactgttttgccattattgacccagaaagacactgactacagctgaggagacagcccctacaagaataaaggatgcaaagaacagaataactgtgctgggatgtgctaatgcagcaggcataaatgtgaacttactgtgataggcaaaagcttgcatcctcactgttttcaaggaatgcatttttttactagtccattattgtactaacaaaaaggcatggatccctagggacatcttttctgattggtttcacaaacattttataccagcttgtgtgcacttgcagggaagctaggccggatgatgactgcaagattttgttattccttgacaactattctgctcatcgtctagctgaaattcttattaaaaaaagtgtttcattatttcaaccttgtgaccagggtattctacgatcaatgaagagtaaatacaaaaaccttttttgggcagcatgctagcagcagtgaactgaggcctgggtgtggaaggttttcagaaggagtttagaatgaaagatgccatagatgcttttgccagcacaaggagtttaggatgaaggatgccatatatgccagcacttggaagacagtgactcagttgtgtatgcctgcagcctctgcctgtcactacatttattgatgatgaggagcaaattggtgactttgaagtatgtcaagtgagctccttatgcaaaaaataatatcttcagagtccatccgtaagctggaagaaggatatatcaaagaagtgtttgacattgataatgaggtttcagttgttcattcattaactgatggcaaaatagctaaaatgcttctaaatcaaggtgattatgataatggtgataatgaagatgatttcattgacctcgcagaacaactgcctataggcagcatggtgatgggcttattgaagcactagagcagcatgtattcataacagaacaagaaataggtttataaaatcaaggagagacttcaacaaaaaccattgttaaagaggcaagtaggtggtactgcaggaaacattttaaaaggccattcagcacaatgtcttattatgccgagaggacccacttcttggtccctcaactgcttctgatgtttcttctcacctaacaaagtactgtgtacmggaactttttaatcaaaacataacattgtaggtagagactgaaagcctgccattgttgctgtttaacagctgatacaggtgttctggtgatgccactgtgctgcttagtttgaatacgttatttttcactgttattaatggtgtgtcttatatttttactattaagttcctttgtgtgaatccgtgtaagaaaatgattgcttgtcagtagtatgtaaattcaatcaagaatgatggtgatgccaaacaaccatagagtgttcacatgggtggctgacatagcaacacctgtgttttctgataagtcagtgtacacaacctttgtttcatgcacaaaattatttaaatattggataaaattaccttcaggctatgcatataaggtatatgaagcataaatgaattttgtgtttggacttgggtcccatcctcaagatagctcattatatctatgaaatattcaaaaatcctaaaaaatctgaaatctgaaacacttctggtcccaagcattttggataagggacactcaacctgtagtatgcttaagggaaagcttatcctaaagctttcgtccaatactgttgcaggtggtgctacattcatttttgaaacatttctgttttcttaaaagatttggttttcacatttcaaataaactagcataaatacaagcatttttttaatttttttttattatacttttaagttctagggtacatgtacacaacgtgcaggtttgttacatatgtatacatgtgccatgttagtgtgctgcacccattaactcatcatttacattaggtatatctcctaatgctatccctcctccttcctcccatcccacaacaggccccggggtgtgatgttccccttcctgtgtccaagtgttctcattgttcaattcccacctatgagtgagaacatgcagtgtttggttttttgtccttgcratagtttgctgagaatgatggtttccagcttcatcgatgtccctacaaaggacatgaactcatcattttttatggctgcatagtattccatggtgtatatgtgccacattttcttaatccagtctatcattgttggacatttgggttggttccaagtctttgctattatgagtagtgctgcagtaaacatatgtgtgcatgtgtctttatagcascatgatttatattcctttgggtatatacccagtaatgggatggctgggtcagatagtatttctagttctagatccctgaggaatcaccacactgtcttccacaatggttgaactagtttacagtcccaccaacagtgtaaaagtgttcctatttctccacatcctctccagcacctgttgtttcctgactttktaatgattgccattctaactggtgtgagatgatatctcattgtggttttgatttgcatttctctgatggccagtgatgatgagcattttttcacgtgtctattggctgcataaatgtcttcttttgagaagtgtctgttcatatccttygcccactttttgatggggttgtttttttcttgtaaatttgtttgagttctctgtagattctcgatattacccctttgtcagatgagtagattgcaaaaattttctcccattctgtaggttgcctgttcactctgatggtagtttcttttgctgtgcagaagctctttagtttaatgagatcccatttgtcaattttggcttttgttgccattgcctttggtgttttagacatgaagtccttgyccatgcctgtgtcctgaatgatattgcctaggttttcttctagggtttttatggttttaggtctaacatttaagtctttaatgcatcttgaattaatttttgtataaggtgtaaggaagggatccagtttcagctttgtacatatagctagccagttttcccagcaccatttgttaaatagggaatcctttccccatttcttgtttttgtcaggtttgtcaaagatcagatagttgtagatgtgtggtattatttctgagggctctgttctgttccattggtctatatctctgttttggtaccagtaccatgctgttttggttagtgtttggtagtgtagtatagtttgaagtcaggtagcgtgatgcctccagctttgttcttttggcttaggattgacttggcaatgcgggctcttttttggttccatatgaactttaaagtagtttttttccaattctgtgaagaaagtcattggtagcttgatggggatggcattgaatctataaattaccttgggcagtatggccattttcatgatattgattcctcctatccatgagcatggaatgttcttccatttcacccattcacaattgcttcgaagagagtaaaatacctaggaatccaacttacaaaggatgtgaaggacctcttcaaggagaactacaaaccactgctcatcgaaataaaagagaatacaagcattttaaaagaaaaactttaaaaaatttatcaattcagtaattttttaggaaatttgtgaaattgtaaaaccatcaccacaatttagttttagtttttgtcacctcaaagctgttttactcatttgtagtcaattatgatttccacctccagcctcaccactaatctgccttctgtttatggatttgccctttctggaggtttcctataaatgcaatcatatagaatgtggccttatatgactggtttctttcacttagtataatgttttcaaggtttatcatcatggtatcagtgttgtaggatgtatcagtacttcatttcttattacggctgaggaatattccattatagatacaacactatccattcaccagttgatggacattagggtagtttgtagtttttggccattatgaatactgctataaatattcatgtacatgttttttatgtggacgtgcgttttcatttctcttgagtatatacgtaggttctaatgggtatagagtagtattcgttgtaggtttgatttgcatttccctaatgaccaatgattttaaacatcttttttgtgtgctcactagccatttgtgtatcttcttttgtgaaatgtctattcaaagcttttacctatttttaaattatttgggtcctatagagttgcaggatttctttgcatattctggatcaaatcctttctcacatatatgatttccaaatatgtttctttattttttgagacaaggacttgctatgcccaagctggagtatggtggtgtgatcacagttcactgccacctctgcttccaaggagctgggaccacaggcatgtgccaccacacctagctaatttaaaagaaatttttgtagacacaaggtctcactgtgctgtgctggctggtttcaaactcctggtctcaagctatcctcctgccatggcctcccagagtgctgggactacaggcataagtcactgcacccagccccaaatatatttctcttgcctgtggctgtgtgttttgaagtttaagaggtttttattttgaagtcctttttttttttttttttttttttgagactgagtttcactctgttgtccagactggagtgcagtggtgcaatctcggctcactgcaagctctgcctcctgggttcacgccattctcctgcctcagcctcccaagtagttgggactacaggcatccaccacctcgctgggctaattttttttttttatgtatttttattagagacagggtttcactgtgttagccaggatggtctcgatctcctgacctcgagatccatccacctcggcctcccaaagtgctgggattacaggcgtgagccaccgcgcccggccgaagtccttttttttttttttagtttatcattttttgttgttgtttgtttcaaggattgtgcttttgttgttagtttttttaaaaacacactttgttcctcttgagagttgagggcctactgttacatttagaccccattgtatattatgaaaatttattgttcatgatatcattggtccatattgtagataagaatttccaaattatttttattttctacatatatttgtggtgtactyatcatttagggtaatttttccctcatagatgtgcwactataattttagagttttataaagataactttatagttgtttaagtgtaatcttttttcctttctcttttttttttggcagctccctagatctttagcttctactcccactgctcctaccactccagcaacgccagataatgcatcacaggaagaactcatgattacattagtaacaggattggcgtccgttacatctagaacttctatgggcatcattattgttggaggagtggtaagaaacattacttttagtataattaaaatcgaaatgtttgcaaggctgcctgttagctcacaaaagaaaaggtatacagtatttacttctatttataggatctgtaaaatagtatgaaaatttgcaggttaaaagtagtgaattamatatcacaagtttcatcttaaatttttaaaaaacatacatctttaggaatgaactatcaccacctagctggtctttaatacttcctaagcattttcacatcacagcacacaaagaaatatttgtacrttgaggtaataagaaaaccccaggtgccctatctagccttctctgaatatcaaggggatctgtcttaagtattaaatgttatttttagtagtagttcttatttgtttctttaaaaaatgtatatcattaacagcatggatatgcttgttttggtttttgaaaggtctgacctacaatatttaacattgttttatttttgagatacattgaatcaggataagtctggcagcttataaagctctccctcatttgtgtgctgatcccttttaagcctgattgatttctggtaacttcaggttttctcatggagaaggaatatacatttttagaaaatgtatctaactcaaagatccatagggaactaaaatgcttttaaatgtactctccaaagtggtgtttttccttctcagactaagctatgactttatcttacagatttggaaaactataggctggaaactcctatctgtttcattaactatgtatggagctttgtatctttatgaaagactgagctggaccacccatgccaaggagcgagcctttaaacagcagtttgtaaactatgcaactgaaaaactgaggatgattgttagctccacgagtgcaaactgcagtcaccaagtaaaacagtaagttggaaggtgcatctttcctttaaaaaaaagttactgaaatatgacatacatgcagaaaaagcacaaaataagtgtattgctcaaagaattatcacaaaatgaacatgtttcgtgatggccataaatgagaaaaaatagaacaatactaaacctcactgctgccctttctccctcctaatcactattcttctttccattctcctgatagattaggtttgaacattagaaaattggtagataggaactctcaagaactctggaggggtttaaaaagatagttcttaattttttttcttttttttcagagatagggtctctgtcgcccaggctggagggcagtggcacaatctggctcactgcagcctcgaatcttgggctcaagtgatcttactgcctcagcctcccacgtagctgggaccacaggtgtgtgccaccacaccaggataattttttaattttttttttttctttgagacagggactcaatatgttgcccgggttggtcttgaccacctgggctcaagtaatcctccctcctcaagcctcctgagtagctgagattataggcatgagccaccatgcccaactcaaaagatcttcagcagacctattctaaatttatgtacctggctgggcaaggtggctcacgcctataatcccagcacattgggaggctgaggcaggcggatcacttgaggtcgggagttcgagaacagcctggccaacatggtgraaccccatctctactaaaaacacaaaaattagccgggcatggtagcacatgcctgtaatctcagctagttgggaggctgaggcacaagaatcgcttgaccctggaaggcagaggttgtagtgagccgagatcacatcactgaactccagcctgggcgacagagtgagagactatgtctcaaaaataaataattgcccttaagatatttgtggtttctttttttttttttttttttttttttttttctgagatggagtctcagttgcccaggctggagtgcaatggcacaatctcggctcactgcaacctccaccttcctcattcaagtgagtagctggcgtgtgccaccgcacccagctaatttttttttttttttttgagatggagtctcactctgtcacccaggctggagtgcagtagcacgatctcggctcaccacaacctccgcctcccaggttcaagcaattctcctgcttcagcctcccaagtagctgggactacaggtgcatgccactacacctggctaattttgttttgtatttttagtagagatggggttttcaccatgttggccaggatggtctcaatctcctgacctcatgatccactcgcctcggcctcccaaagtgctgggattacaggtgtgagcctccatgcccagccccttgcccagctaattttttttgtattttttttttttagtagagccaaggtttcaccatgttggccaggctgatcttgaactcctgacctcaagtgatccacctgccttggcctcccaaagtgttgggatcacaggcgtgagccaccgcgcccagccagatctttgtggtttcttaataaagaaaactgaatgaatagaggtagcctggccaagcagtctaagaaagctgaatgaattcttagcatttaacaaatgaacttaatggtaggtagactcctgatttcatggtgaatgtaatgtatatttgctctcgcagttcaaatgtatacgttaaatgctattttatttttagatctcaggagaattttattataacatatacctaagtccacccggtttctgcttttatacaacttaaatatttgtttcattcatgtggtaaaaatatatagaactccagtcaagtcagggtacaatattctgtatttggatgcctctgagagcagaatttaaaaattctttgagttcaagataacttcagtttaatggaagaaactaacatttacataattataatacaaagtgagagtgataagaaatataagagaaagagaaaccattatcataaggcaaggctgtacaagttacttaaatcatgaaggatagtagatcaataaaggtttcctaggggagatgtgtagcatatgagatttgaacatgctgtatcggaagatcagatggagacaacaacccaaatcaaaaacaagaaggtaaggggaaaagactgcattcaaagacatgaagagaaatattcaatgtggcacatgtgtatctaagctgtgtacatacattcaggtgtagacttcatagcaggatgtggccttgtctgtatgtgtagattggggtttggataattaggaattccgagagtgatgtcaacacttagttctagaacagataactttgcagtagtatttgaaattgtttagactcaagagacaggaattgcaggaacggtaaactgttgcagatacaaaatcaaagtctgaactaacagttaataattgtagagaatggttaccaggagactgcaaatttgaggaatttgttcatttattcattcattcattgaccaagttttttgagcctctattttatctgatagttttaatttatattaaggatgagttttcatctarttaagatacttggacatccaaagaatcagctgaaattcatataaataaaaacaaagttaatgtagctttccctgcattgattatcaaacatttattaattgcctcccacgcagcagttcatgctaggggttatgggaaataaaaactcgacttgatcctctttcttagaagactttgcacattaatggaggcaacctcaaataatttctcagttaaaataaactaagtaaatatttaatatttaacaaaatattaaaagaatgacacatgcttcatctgtctgagatttggtggaatgggaagaggtatgctcccatttaaaaatataatgtttgccaaagttaatatatgaattagccctcaaatataaccctttgattctagaaatattgttaaattttgctataaagtatttttgcctatgtcacaaaagtgcatggaattttttttctgttcttgataatttcttactttgcgcagggccccaagcatgagtaaagtttattgtgcttctgaagaaacacrcccatcttttgtctttatgtagcttattcatgttcacagccatatagcagaggtaatatcgtctcttgagccaggataaaatgcagcccactagtgccatatcttccctcttatcattcttagtgttctgattccctatagtttagaagttttttaaaacttgtgttcttctttttatgtgagctttaaattaaagcttattcatttttgaagacatttatgactgcttctaaatttttattttaagacaaatagctaccacttttgctcgcctgtgccaacaagttgatattactcaaaaacagctggaagaagaaattgctagattacccaaagaaatagatcagttggagaaaatacaaaacaattcaaagctcttaaggtatttaaacctttcttctcaataatttgaacatttactggtctcattacaaaatatgtaaaattattaatgaatttgtattcattcctaatagctttttgtgttggtttaaatgaaaatcttccatatttaattccatgtggtttgcagtttcaccgaaggtttaaatgaaaatcttccatatttaattccatgtggtttgcagtttcactgaaggctaattgcaacaagaaaacaaatctgaattgaaagggactttatagatcgaaatttactcttcattaggctatattattcccttttcagaacagaagttgtataattaaaagtgaatttttagttgtgtatgtccaagacccataacttctgttttcatgggggactattgattatgtatacttaaatcataaaagtaagatgtcctgataaaatgtggatttctggtttgatatgattcattatatattatttagggtctaataaaatttgcttttggggacaagactgaaagtgtcaccattcggtctgtagttggaaattcttactcagtgcttaagaacttaactttcagctttcttacttttgcttacccattagctggcttgtcagaatgtcttggaagaaccattaaacctcatttagtccctgctgttacttctaggacacatgctacacaaaattgcctgtgtaagaacagcttagtagtcaatgtttacaaattggagggactgtctttgtgacctggattttggggcatgtacttaaaacatccatagtagtgattatccatccatagtgtcttcatctgaccaacaacacgtgttcattgtaccttagtttcaaaatctctggaaaagatgactgcctatcacttagatatttccaacctcacccacccatgtgaattgtatgtattagattgctcctattttaagtcagctcatcccatatatacctttcaaatgtggtgaaactgtgcagtagaaattgtttttttgtcttaacctaggtaagtttttatggttttttggttttgatttattcagcttttgaaagaggaatactaggtaagtttttaaatagtatttcattttgttataataaatgataaaatagattattggcattagtcatgtagctttctgatttgggcaagactggcttgaataagtatgaatatttttggtctgctaatcatttttctaatagaaaaaagttaaaaaaaacaaataccataatatttggaatttccattttttactagattaggctcagccatttggatagaatttaatgtgctaacgctgcaggagagctacctcaagaaatatatacagtagagttcagagctgatgtatacttgtatgacctgaagcatatgcacacaggaataaagtaaaacaagaccctccccgtccataatggagagagagagcccactcaatgaatatgtgccctggcatagtgtgagagtgggaaacaaatctgtttttctgtcagttttagttccagttttcctctcttgtgggcatttggctgcatcaaggatgaatctagtgtttaaaggaaatatttttggtatgccattgccgctgtaacatctgctactttccttgtatgtccataagaaacactgtgtactttgtgcattatttaaagggaatttgcaagcataatcatgactctaggtaacttaggatatcccgtgtaaggtatgattccactgtctgttatgctcttcattgtttattattaaagtttttgtcttttaataatggatggaatgcatttttctccttgacctttatrgtaattagattggtgttttatttttttaattagaaataaagctgttcaacttgaaaatgagctggagaattttactaagcagtttctaccttcaagcaatgaagaatcctaacaatagagattgctttggtgaccatgataggaggaaacgaaacttgtaagattggaacagttgttatttttatgaaattactttaaatatgaattgtactaactgtacctaaatagcaaagccctgtgtagattctggtaatgatctgtctcagggtatgtgtatttttgaagagtgttatgtccttagttttaattttgagtaaagaaaaggctaaaatcatgaattagttacaagcaacagtaccaacttatgtgacccctgaggggtggggctgtgagctcttaatttgtttttgattctgaaaaactctgcttcctggcatccaggagttagagattgagcctttcatcttctttctcaaaactagtttttgatgctttctttcatgggaatagtcacttttttatttagtaaatcgcattgctggaaccaccaaggagtgtggaatgtccttgagtgtaktatttatgcaagtcacagtcacgttgccatcatggcagctatgtgaaacactaataaatgtgtttttactttttattccygttaaaactgatgtaaaacaggataaaggcttgttatagtcacttataagtatctgggtctaagtaatttccttagatgtttctaaagaaacattttcagctttgctcccattatgattccaataaggaacgctttcctagtgcaattttaggagtaaagtttgaagagataaaaatagccaaagataggagacgtctgaattttgaatgataaacagtgatgttttaaaaargctgttgttcttcaggaggcatttgcctaggatattgctggattataccccattggaggcttttaattttatttgtatgaattttccaggatttcattaaaaattattattgtattttttaccttaatgaaagattttgggttcaaatatctttctatattaaaagctgattgagtctgtacatatgtaaattatgcctagtggaggttctgttgactttcttccccactgtggaagaggccagttttgcctccatttgcacattcatttcagttatttctgatccataaatataacatttacaaaattcttccttgagctggtggaaatgcctcaccagtttcctctttaatgaatcaaataaaatctttaactgatgttaaaaaaaattgattgaaactcagatggaatggaaatgtacaaaaatgacaccattctaggaatttgctagacaaaatgtaggactaccagatcagtatctcctagacacttgttagaaatgcacaatcccggggaacrcagtacatttggccacatgtagtttatgtttccttttcatgggagggataaaatttaaagctttttttttctttgaatacagtccttccttttctatgccttttaaggcttctagatgctattcagcctttttacagcaggtgcaactctatttttcaaggtatcttagaagataacactaggccattgaagcctttcaaaaatatatttttatgcaaattgacacgagtgcagtatactaatgcaaattaattttggtgtttagcttttattgctcatttataacccaagaaatggtacagaccacagtaagtgggattaggtaacaactacaacatggaaaaacagtgtctaagatcacgtactgctaatttaggttacaaaactcaaggctgtaacctttatatgaaagtacttaagcttgaaagttcataatagtttggtatcacctcattagtatagtacagtggttctcaaagtttggtcctgggtcatcgacattacttctttttctttctgagacagggtctcagtctgtcacccaggatggagtgcagtggcgtgatcatggctcactgcagcctcaacctctcgggttcaggtgatcctcccacatcagcctcctgggtggctgggactacaggcacacgccaccatgcctggctagtttttgtaaagacgaggtttccccatgttgtgcaggctggtcttgaactcacagactcaagtgatccttttacctcagcctcccaaactgttgggataacaggtgtaagccaccacacacagctataatcaaccttcaaacttataaaaagtgtggatccttgggtctgaacccagacctatggagtcagacagtaggtttgaggcccagcaatctatggtttaacaagccatccaggtgtttctgatgcacagtgaaattggggtaccactggtattaggtttggtatggcaactttttcatcacttgttttatgtagttgtctgatcaattgtgaaaacataatgaatgttggaaatggaacagtaaaataacgaaagccaactttttttttttttttttttttttttgagacggagtctcgctctgtcgcccaggctggagtgcagtggcgcgatctcggctcactgcaagctccgcctcccgggttcacgccattctcctgcctcagcctcccgagtagctgggactacaggcgcccaccaccacgcccggctaattttttgtatttttagtagagacggggtttcaccgtgttagccaggatggtctcgatctcctgacctcgtgatccacccgcctcggcctcccaaagtgctgggattacaggcgtgagccaccgcgcccggccgaaagccaactcttatgcctagaaatatgtgcacctatgaccaagcccatgaattatacaggaattatgtaattatgagtgatgtacttcaaagttattgcacatacacttgtttactttgtatgtttgcaggattaaactttgtataatctttttacaaaaattttttttcagtatgcaagcttgcaagatgaaaataaaacctgtttgcctgatagttgacaaatgtagcatttatactagtatttagtgagtttttatctttcattcttaattacttttatggtagatatgtaagttatcttaagtagacctcttttgactgcattactgtttgtttagttcttctgggcaagcattaaaagggtaagtaagtaagtcagagttacatacaccagtcattagtataagatgtcatacaataccgtcagaggagcacatttcaagaagttttctaccttaaacataacaatttacaggtacttagtactcttcactggacaatagaactaatttagtgtcaaaggggagtttattcttgccctctgcttcaacctgtagtgctatgtgcccctccacggactcataagtttaagggaaagaaacattttattatagaataatattaaacaaggacagagataaccaggaaagcataataaaccttcattactccattgcccagcttcaagaattaccaactcatggctaaaggtgttttatcatctcccacattttgaagtaaatttaagatgataatctgtaaataattaatattatataacatctttttatcttaatttccaccctcatcctcccccaagggtgtggtggtgaaagaaagtagtaaagataagataattaattaatcaacaccataggcagcatcgcttatttaaaaattacagaggccaggcttgttggctcaagcctgcaatcccagcagtttgggagatcagggtgggatggtcccttaaagccaggagttcgagacatgcctgggcaacaaagcaagacccctgtctcaataaaaactttttataaaaaattggctgggcatggtagttcacgcctataatcccagcactttaggaggctggggcaggcagatctcttgagcccaggagttcaagaccagcctgggcaacatagaccctgtctctacaaaaaatataaaaattaactgggcatagtggcatgcacgtacccatagtcccatctactccagaggctgaagtgggatgatcacttgagcacgggaggctgaggttgcagtaaaccatgacgacaccactgtactccagcctgggcaagagagtaacactctcaaaaaaaaaaaaaattgtggcataaaaaaatacaatgaaatctggttaaaagcactttattgattacagtatcaattcacaacatttcataaagccactgtacaaatagaggaatgaatcactgtgtaagaaagatctaagaacagttaaatcatgatacaagtccatagtttatatggtttagagctttaagagccttaatctaacacgtttacccttcccataattagactactactgacattcatgttcagttgaccacgagtgtgtacaaatcattctaggtaaagacaaacactttcagaatgctttaacagaaaaataattttaatcaactttaaaaacacacttagatgtggatgcctttggataggaaaatagaaatgcaagtgttcagatgcttctttgaaaagaaaacaataggatagagcaccattgtgtaaaagacaaaaggcttgagatatctaccaagtatatcactgaagttctattaattaagaaataaatactgtatgatgtaagattttgttgaatacatttaacaccagttggaatatagctttttcccccccgtaatgctgctttatcacaactgtattttacaaaatcagcaactggatttaagaaagaagacataggagattttatcaacatgcaaacatttgctaaatacaaggtgtaccatcaatgtgtgattaataagttactttttaaaataaagtgctagcttagatattctactataaaccatttcattgagtacctattatgtaaccaatattttaaaatatacactgaatctgaggcaacccaaaatgaacaatggaaagaaaactagtaaatctgaaatgtacttcacattctacttaatctaatttaaaatataaattcattgtgcaacccataagaaagatggtccaacctgtgggtatttttaaaaattctaacaggagaaatcatttaaaattttgctttttcacaatggcaaaaaggaaagaatttgaacataatatttaatttttaaaaaaattcagcctgactccgaccctgaagatttcagaaagaacatcgtcactattaaaatgatgacaggcccaaatgggggattgtttaaccagttttcctaagttaaaccaagaataagccacaagtattcaattgtgttacaacttagatctgagacatttacatcaaagcatacttccctgaacatgttcacatttaaaatgcttaaggtcttattattaaatccaaaataccaaaagtattagaggagctagttatacaatattggcacagcatttttaagcaataataaaagtttcattttgtcaccttaagtcaagatccatttatctattaataggttaagtctgaaattctgtaacatattctagaagcacctacatccattatttccaggagactagtttactactatcatgcaatcgctgaggtcatatgagtctaaaatgaagggaattgctgaacaggcccttttgctgttgagatatgaagcccaaatctttgcctctgaagacggaattcaatgtggtgtgtgtaatcacaagtaaaaacttgagctagggaggaaccttggatattcagtctacatctcaaacagcatagctgccaaaaatgaggcctgtccattaaagtggaggagatatccttgctgatggcaaaaactgctttttctttttgggacggaatcttgctctgtcgctcgggttggagtgcagtggcgccatctcagctcaccaaaacctccacctcctgagttcaagtaattctctgcctcagcctcacgagtagctgacaggcgcccacctccacgcccggctaatttttgtatttttagtagagatggggtttcaccatcttggccaggctggtcttgaactcctgacctcgtgatccacctgcctcggcctcccaaagtgctgggattacaggtgtgagccaccatgcctggccaagaactgcttgctgaagcaggtttttgggacgatatgctcaacaccacagggtgataacatacttagaaaagaatatgtatctctaaaatattcttgccagatctcaaaaaactactcttcttgacatgctacagagtcaacaaattaaccttctcaggcacattatgtttaaatgtttcttagaaggtaaagaaggaaacctggctgggcacggtggctcacgtctgtaatcccagcactttgggaggctgaggctggtggatcacttgaggccaggagtacgagatcagactggccaagatggtgaaaccccatctctactaaaaatacaaaaattagccgggcatggtggcacatgcctatagtcccagctacttgggaggctgaggcacaagaattgcttgaacccaggaggcagaggttgaggttgcaatgagccaaaatcacaccactgtacactccagcctgggtgacagagtgagactctgtctttaaaaaaaaaaaaaaaggaacattaactgcaatattcttgatgatgcaaatttttaaaaactaaatccagccagatttttcagccttaaaaactaagatccaaactattcaacatctctacaaattatatactcattgaattcaggaacaataacagaattcaacaatcagctcaacttaaactgtaagtaaacaaatatatttagcaactggagcccctattattagaaagcaaaggtgtaaccatgaagtaattgtggtagtgaggctactctgtcgccatttgtttatgtgtataattaaccacaagtgttaaatagtttttagttgccgagtaaatatttaattatgggaattgctttaaactcctcttcataaactttaagaacattaaaataaatgtaattttaaaatatgttaagaccatagaattcctgtggtctgtatgcctgtgactactataataacttttaagtagaggagatactctcttacatatttaaggttatttttatgcataatagaattgctttcttctgactaacctacatggcaaactttccccaaccctctttttctggaaatgaatacattcctttattcttttctcaaagaactgttctttatgaagtgatataaatagcctacaaataaacattaatagcaaaagttcatataattttttttttttccaatttgagatggagtctcactctgtcgcctaggctggagtgcagtggcacaatctcggctcactgcaacctctgcctcccgggttcaggcgaatctcctgcctcagcctcccgagtagctgggattacaggaatgtgccaccacgcccggctaatgtttgtatttttagaagagatggggtttcaccatgttgggtag

SEQ ID NO: 94679 - DNA, 159964 bp, Homo sapiens
  misc_feature (1)...(159964): n = A,T,C or G
agtagagacggggtttcgccatgttggccaggctggtcttgaactcctgacctcagttgatccatctgtctcagcctcccaaagtggtgggattacaggtatgaaccaccatgcccggcccatgtattagttaaaataactttatggggcagatactattatccttactttacagttaaggaaacagagccagagaagttaagtaatttgtccaaagtcaccaagctaggaggtagaagagtcaggattcaaacctgacttgagaatcctctcaaccacgaaactgtctcttgtatagccaaccattagtacaataaaccactaataatttgctgaagaatgcttgctttgcatgtaataagggctaaactgaatgactacatttattgttaaatacacataggaaatgcttatgacatatttaaatgggggagaaaagccggatatcactgtacatacattataattttaactatagaaagttgcagaaaaatgcccaggaagaaaacaggccaaatggttcaattctgtttgtggttgatgggctgacaatttttcccccttgcttctttaactttgtctgacttttctgaattttctaaagcaaatgttaactgtaacatcagaaaaaacactattaaaaacatgagaccttacggacgcaggctcgggacagatcaccaccaggcagcaaacactgatcctcctccactcaaagaaattaactgcaaagaactttcattgacctgtgtaacctcttgcacaaaacattgactatccctacgatttattctaactgtcatccttagatcattaatacataggaggcaatttctactttggttctgatagaagtctcccaagagaagccaatttcctgaatctttttgagagaatttattataagcatctttgcttcctcagagtccccgagctcttgtattccctgccattatcagtgtatctggtctcctgggcatagcttatgagtagatgttcaatacatgaaaatcattattacgaactgagatattttgctaaaacacatgtgatttgggaacagagtcttggtttctcctcgtatcttcccagggacttaggatggggttggacacagaagataattgggtgaagggcagcctaactactcatgtgcccacatgatacgtatatgtctatttctctgacctatcctgatctcgccatgcccatgttctactctgaggtttctggagccagcaagtcacttcttgctgtacttggggctgtgggggcagccatcctcccagtcttgtggctgtgatcctttcatgagaccctgttctagtttcaggccctggcttctagcactcttttctctgccccactcttgtttattaggccatctgtgcaggtctgcctcacagcaatcagcaggagccatccctgtgtgcttaaattagagatgctgtatccctctctctctctcttttaataaagaaaaggaagtcatttcttatagttatggaggctgaggagtccaaggtcaatggactgtatctggtgagagctttcatgcaagtggggagtctgcagagttctatagtggcacagggcatcacacggcaagggggctgagcatgctgctattttctttctacttttaaacttgagttctacagacttagtagactagctgtgaacatatatatatatataaatatatataaaatcatccataaggctggcagcactgaaagccaacatggtgggcacaggcaaaccacagttcttttaggccccgaacctatcctcatattagacaacatgtactgaagaggagacgtgatatgaagaggagagctgtgaggtttatttaaggaacttgatgaacatctgtagtgggtggggaagaaagatttgggaggaaattttcaactgcttattgtcttttttttttcccctcatgaaacatcacctccaattcaagagtgttatgaacatattatttgcaagtggattgttgtaaatgaaaattatgtgtattaatccgtaagatgtctgaaatgatgactgagcaatgcattacctaaaaatattatatattggctaaggttgaggtcaagggttgggggagggatggggratgtgttagtctgtttgggctgctataacaaaaacaccataaatcgggtggcttgtaaacaacaggagtttattgcttatggttttagaggctggtaagtccaacattaaaataatggcagacttggtgttcagagaaggctcagtctcctggtcataagtggtaccttctagctgcagcctcacatgttggaaggggctagctagctctctggagtctcttttattttactttttaatatttatttatttatttacttatttttgagagagagtcttgctctgtttgcccaggctggagtgcagtggcgtgatcttggctcactgcaacctctgccttccgggttcaagcaattctcctgcctcagcctcccgagtacctgggactacaggtgactgccaccacgcccaactaattttttgtatttttagtagagatgaagtttcaccatgttgaccaggctagtctcgaactcccgacctcaggtgatctgcccgtctcaatctcccaaaatgctgggattacaggtgtgagccaccatgcctggtccgggtctcttttataagggcgctagttccatttgtgagggctctgccctcataacctaatcacctcctccagatgccccacctccaaataccatcatcttgggggttaggaattcattgtacgaattttggggggatacaacatgcagaccatagcaggaagctgtgggtggagggcccagaactgagatactgtccagagggaaagtgggtatctgtacttctcaaaaaaaccaaaaccaacctgtcaaggcagggaccccagagaaaatgggaggagaagcctcacatgtatagactgggaggacaggatcatctccaaagtaatgccccagcctctgcctctcacttataggtcagagggtcctaagtgataagagagaaccttggtggaggctgctccacaatggcccccatcctggaattttaccaggagcacccttgcttgcccactcatctgtctcagacgcccaggaaatttttgcacgtgtcatatcatctgtgcttatctcagtgttgagataaccttttcccttgttttctccttaatttggttttccagttctctgcaaaagagaactgcggagtggggactggacaacctctgaaagagcgccttctgcttttgtggagtgcagtggcgtgatctcggctcactgtaagctccgcctcctgggttcacaccattctccggcctcagcctcctgagtggctgggactacaggcgcccgtcatcgcgtgcccgcctaattttgtttttgtatttttagtagagatggagtttcaccatgttagccaggatggtcttgatctcctgacctgtgatccgcccgcctcggcctcccaaggtgctgggattacaggcgtgagccaccacgcccagccccggttaatttgttttgtgtttttagtagagacaaggttccactgtgctagccaagatggtcttggtctcctgacctcatgatccgcccgcctaggcctcccaaagtgctgggattacaggcgtgaaccaccgcaccaggctgttcttagttcttaagtaatgttgacatatgggtgatgatgaaggagatgattaaagctttcaaagaaagtggaagaatgtgtcaaattctctcttcacttcctagatgacttcagtttcctaatccataaaataggactaagaccattacttatctgatgaaaaggagagacaatgtaataaataaggtgctttgaatcctgtattagtccattgtcacactactgagaaaattataaattacctgagactgggtaatttataaacaaaagaggtttaattgactcacagttccatatggctggggaggcctcaggaaacttataatcatggtggaaggtgaaggggaagcagggcacatcttacatggcggcaggtgagagagagaatgcaggggaaatgccagacacttatcaaacaaccagatcccgtgagagctccctatcacaaaaacatcatgggggaaaccgccccccacgatccaatcacctcccaggaggtccctcccctgacacatgtggattacaattcaagatgagatttttgggtggggacacagagccaaaccatgtcagatctccaaatggtagctattatttagatgtccttttcttctgtcttgttacagtcactgacacagttcaggctcttattatatctccattgatgtcagcttccaatctagtctcttgcattctctgcttctgccatctattttccagtgtggtgccagaggaatccttgtaaaatacaaagatgcatgtcatgctactgcacakaatcttttaatagcctcctttttttttttccctttttcgaatagggcctaaaatcttcaatgtagcatccttccagaaatagtcttctgaacttggctgcttctattcattcacgcatacatacattttactgtcaggagcaccttctatatgccaaacactaagctacgtgtttcacgtaggtcatttcacaggatcctgaaaacaacgctttccttaatatctccattttgcagaagaggaaagggaggctcacaggatgtggaactcacccaagaaggcacagcgagttggtcataaagatttgaattcactctggctggcactcccttcaattggagctctttgtactgagcaaaaatgcctcaggggcagcagggaagggaatgacagtatcagcagaagggagccaggatcaggacagggaggaagcagtgtttggaagaagggtgctggggacagggtgcggatgtaacttccctttccaaggttggtgatgtggggtaggcacctcatttggagacagaactctgggcctgggcttcaggcactttaagtgtgcactggactttgtgttcccagaggacccccaaaccttccagtatctccttcctttcccctttcccacccagcacacagcctggtgcctagtgtgcactcagtagacaactgggatatgactattgcctctggtagtcacatcctctctttgggctatgggaggctggactggaggccttaaaggccccttccgccctcctgttgggcagtttttctttcttagggaaatcgccttggggctatcggggatggtcagtacgcagcttggttaatcctctttccttccccagcagccccaccgtcgtccgggtgaaaagaaagaacctcgctcccttcaccatccaggctgaggcttcagtctttcagcctgcagcttggggtggaagcctctgggtgcagggrttcgaggacgctcctctccttctgtatttgccatttgagagcgcccagtaggagtcatgcctcaatgttaggaggttaatgccaaacgcagtgaaagattttgttctttcctattctagataagagcaacacgagtcttcggagaggttaagcgacttcctcagggtctcgcagtcagccggtagcagagaccgggtgtacagcacccgcatgttaggaccaaaagccggacactgctggattgacccctcgcggccaagcggggaagaggcatttaggggtccttgcgcagccgcgtggcccctcccactcggccctcgatccaccctccttgagggcaggcaggattctagcatcacccagtgccttcatcaggagtctttaaccccaagcccgctcgctagcgacctccaggccggtttggggcgcggtgtggccggtggcgagaggtggagtgggggcggagaccgacccagtcttcgcaactctatttgcatacggaggcgactcgcttccttcccgcccctccgccgcgctcttcttccttccttctccagtcccttccactgtgcgtcttctgtcccccgttcttccccmgcggacccctctttcgagactccctagtggggtycccagctcccgggcgatcctgcccttgccgagcgcgttttctggagtcacctgggggaggggagtcctgggcagggccgggctggggaagacgcctggggcactgcccggcgttaacaaagggagccgataccgaccggcgtgggcgcggagcgggcggccgccaccgagcgtgctgagcaaccgcagcctccgcggccgagagtgcagmgagtgagtagggggtgcggtgggcggcggcgcggcccgggctatcccgggaggagtgtgatgcaaaggggcgcgggaggatagcggaggcgcggggcccgcggcgcgcgtagggcgcagggaatctctctccagctccgcctcagctgccttggctccggggctggccgccttttggttgggggtgtgtgcatttttgtcagggccaaagggccaccctggcttctctctggctccgcgagcctgcggatccacaacaaacccacgtgcgcacagccccggggaacacggatttctccacggcaccgwcagtatggggtggggtggcgggggggcattgcgccttgcagagtctgggttccttcaaatccygccktctgggtttacggatcgacaaattgaggcccgcggcagcggagggggcacaggcaccataacaaacgcacgtgcgccctgcccggagagctggacgcactgcatacccttaggggccgccctgcggtgccrggccattgtctcagcctcgggggagggagtggctctagaggcgccacttgctggaagagggcgagagagacatttaaaaggtaccgcttgggcatcagactaaactgccagacttaaaaagggaaaccaaaacaagaaagcagctacaaaaaggttactccaggctgagtcggtccccggccgtggcgcattcttttgggtgaagtggaccacccctcaccttcacctcctggaggtctcttagagatgtgggttgggttaagggtctaagggtgcccctcaaaaaaagagagtgctgggtgcactattgtccccgcactccggcgattgcctctgtggggatattttggtcgcctcctcagcctgcgggaagaatgtacgagtcgcccagtgcggtcttgctctttgcctctgaggcccgtgtccgtgtgcccagacaccccagatgtcactagccccttttggcttgttaatgcattttcgcaagcaaggccagccgagacctcgtattctagctggggacgtacaattttcagttctgagtttatttgaaagaaattccgaggtccggaaaragagractcttgtttgttttgctttttctttgcttacatatgctcagctcagctttgcagatgttaatcggacacgatctgcagcggggagatggtttcgcggtgaattggtctctgaggcgatggtgttggtgcaggttgtgggcgtgcagtgtgagcaggaatggaggcgccgccgccccagtgtgtgcctgctgagcgggcgggctgctgcctcaccttggctagtgtggctgaagattaacctgtccccggggggggaactggagagcctccaatcctattccgctgttattgaaaaggtctagagagcatctagggagccttctcattttacaggcaggaagctgaggccggagagttcagccacttgtccaagtttaaaccgggtgaaacgggccacagagagaacacttgagtgtgggtctcccaactcccactgcatcgctcagcgggcaactaaaggcaaaaccgggattctgtgattggcctaaaaggcagtggccttaggcagaatagggtgaaacaaagagtaattcaaatagaaagctgcacccttccattatccctttcaagaattctttattctgttgagaaaaaatagatttagtaattccttactctccttcaagcctttcaaaagcttagttatttttctctcctggctgccccttcccctcaaattggaataaggccagctacggagactcagatgttttgcctctcatccttgtgccaggaggcctttgtttgggcaaaagcatgggctgttgacatcagccccacggggaagaaagtgtgtcttagcaagctactcctgagccacttgtgggagaacaaagcattgttttcactgatcttattaaagttacttttttttaacgagagtcccatggaagtagctgcttatttttgtatttggcagagaagtaggaaaaccaaaaaaacactgagaagccggatttccccaaagttaacatgttgttttgcactgtgcctgttatctcctagttacacttgtttcttttccttagagtttccagcgtgtttcactttcaatgtgattctggtagcaacaggaggcagctggatgcctaggcagatagggtcrggtacccggtgaaacccccacctccaggccaaagacagtttaaagcctgaaagccaagctacgagttaaatcctcagaccagagtgagaacttgtttggcgtgctttcccctaattgattcctacatttcgcctgttttacatatacccacyttttcctaattggttttctacgctgccgtgcccacctttgagtggtgtctttgctttmatcttttttgcatactcacaaaccggtcagcatgcactccctattctgagtccataaaaggcccctgacccagccacattggggaacttttccgtcttcaggtaggggaccaacccggtgtcccctctctgctgaaagctgttttcaacactcaataaaattcttatctgccttcctctcccttcaatgtccagtgtatcctcattatcctttggtgtggtgcacgagctcggaaccaccgaaygcgggtacaagctataatacagtgagctgggacacacctgcatggccgagcgagcacaggtggggcattgctggcccgaggaccaagaagaaaaatcctacatcaattcctcttggcactgcagtatagttttctcaccaggaygctgaccctgtaaggaacttcagaaatcatgtgactggacccttttactttccagatgggaaaagtgaggcctagagaagagaaattgcttgccyaatgatacacaacaatgcgtggtctacttttagtgcacctttttgcgtaaaagggaaatggttgcatcaaaccagtagttgttggtactccagagaaaagccaaagttatggttgttataacaacaccctttaagtcagagaaccaattccttatggatttaaataggtttggttattaagcaaagccagggatcccagtagtaggtatgctgaatagtgcaattatctctggggatcagctttctttagtgtttgctgaacggttcactttactcttgtgctgggttcctccatgtctctgtcttgtgcttccccatttaggggctgctttgtatgaaatcataaggcaagaggcagtgagaagacagaagagagaggcgccacttagctgttcatgctacttaacctcttgggctccagtttccttctttgtacagtgagggttctccttgcccagtctctgcacaggctgttccagcggagcggaagatgctcaggccataggaggggtttggggtcatcttcctgtctctagtattactttaaaaccagcaggctgggccaggtgtggtggctcactccagtaatcacagcacttcaggaggccgaggagggaagagttcgaattccttgagctcaggagtttgagaccagcctgagcaacatagtgagactacctcccccaccgccatctctacaaaaaataaaagaacaaaattagctgggcatggtggcgtactcctgtggtcccagctacctgggaggctgagacaggagaatcgctggagcctgggaggtggaggttgcagtgagccgcgatctcaccactgtactccagcctggggacatagcgagaccctgtctcaaaaacagaaaataaaacaaaacaacaacaacagaaaaccagcaggctgcctctgcgttgtgtaaagtgaggggagtaaggcgtatgaatctcctggggttgttgagggcattaagtcacatgatgcattcttatgactggtcagacctcttggcaggcttgagtgcttaccagcttttaaaaaattttatttatttatgtatttatttatttatttattttttcagatggcgtctcgctctgtcacccaggctggagtgcagtggtgcaatctcggctcactgcaagctccgcctcccgggttcacgccattctcctgcctcagcctcccgagtagctgggactacaggtgcccgccaccacgcccggctaatttttgtatgtttagtaaagacggggtttcaccttgttagccaggatggtctcgatcaaaaattttattttttttaaacttttattttgggttcagaggtacatgtgcaggtttgttatacaggtaaacttgtgtcacgggggtttggtgtacagagtatttagtcactcaggtactaaacctagtacccagtaatgattttccctgctccgtttcctcctcccaccctccacccttcaagaaggccctggtgtctgtcgtttcccctctttgtgtccacgtgttctcattatttagctcccacttataagtaagaacatgtggtattgattttctgctcctgcattagtttgctaaagataatgacctccagctccatccctgttcctgcagaggatatgatctcattcttttttatggctgcatagtattccatagtatatatatawgtaccacattttctttatctaggctactgttgatgggtatttagrtctttgctgttgtgaatagtgctgcagtgaacatatgcgcgcatgtgtctttatggtagaacaatttatattccttcgggtatttactcagtaatgggattgctgggtcaatggtagttctatttttagtttttcgagcaatccccacactgctttctacaayggttgaactaatttacactcccaccaacagtgtatcagcattgccttttctttgcaaccttgccagcatctgttactttttgactttctgataatatccattctgactggtgtgagaccagcttttaaagtggtagggaatgttagtgggagaatgaccccgtagggtaagctcatgtgctcagattagaagacctcacctgtcacaaagaggtgtaaagcaaggcctgccaaactatcaagggaggctttgagcagttgtgaagtttgtgtgactctaaggtgactagaactagtaaaaaaaaaaagaaaaaaacccagaaccttcacacataagtgagtaatatctcaagtcattctatttatgtattctgtatttaccgacaaacaggtggtgggagtggagggggycttgtgcttagcctgggattacaaagagcatggagacccacccattctttgtccgagggaagtccagcctagctccaccacccttgcttaaaacacttttggctctcccttagaaattgccctcaggagctcagagaaaattgatctaatttgtctcagtattgacctctggggtccccttctcttcatgaataaagggaagagcaggtggtaaatgacagaatacaagagggaaggcttcagagaaaatctggccctccataaatatgaggacatggttgcattaaaaatatacaggaataattcattaatgaaattcacagtaattgttctggaccattagattcctgagaatttagacagggaattagttgctctgatgtagtatcagtgatttgttccataagaactgaattagaggcaaatgaattttttcttgcttgtctgcagaaaactatacgatggcagtctgactcctatagatgtatttttgataggcttatatgtaacagtagcattgagcagtacagtttcaccatattaaaatactgagatgattttctaagtaattattacaccagaaaggtcaggttagccttcagaatcaatgtagtgatttaaattttatttattctgattataaaaataaagctaggggctgggcacagcggctcatgcctgtaatttcagcactttgggaggctgaagcagctggatcacctgaggtcaggagttcaagaccagcctggccaacatcgtgaaaccccatctctactaaaaacacaaaaatcagccggacatggtgggcaggtgcctgtaatcttagctactttggaggctgaggcaggagaatcgtttgaaccctggaggcggaggttgcagtgagccaagattgtattactgtactccagcctgggtgacagagcaagactgtctcaaaaaaaaaaaaaaaaaaaaaaagaaaaagcttgaccattgaggataatttggaaagtactgtacaaaaaaacatagagaaacagaaaaaaattccgctatccaaaggcaacccctcttaacagttggcaattttccttcttcttttttttttaaatggatatattttttgtaaatggttgagaacatactgtatgtgcagttatgtctcttgccttcttgcttaaccttcccatatatacatttcatggttaacattgcattaaagctgtattctttcattcgtcacccatatcagctgttcggcgtctccaaggatgtgtgggcccctgggatctgatcatttcagtgagggcctataaaatttcaggagcctccaactgcctctgcctttcccaccattgcctcaggtgttcagccatcacccgtcggttctttagaagtctacaggtactgacagtacagtggggagagaagaggcctgcacatggccttgagttccagtctgcccttgtgaccttcaaaaacttaactttaataccccagtcttcaacgtctgcatatgttaaatgagcaactccaaggtcacttattaatttattcaccacatatttgagtgcccactctaaaccaaagacaaataagaagagcttagttttttagaagctcatagttcaaaggaggaggcaggggtaacaagagattagtgcaggatgccgtgcgaccttgaggagggagtcaccaatgactggagcagtgggaatggcctcctgcatgaggccacactggacagccaaccacatctaactttctcttattgtaattgacactgtgattaaaatatctgtgaagagccaggagtggtggctcactcctgtaatcccagcactttgggaggctgatgcaggcagatcacctgagatcaggagttcgagaccagcctggccaacatggtgaaaccctgtctctaccaaaaatacaaaaaaacagccaggcgtggtggcgggtgcctataatcccagttactcaggaggctgaggtgggagaattgctggaacccagtaggcggaggttgcagtgagctgagatcgcaccactgcactgcagactgggtgacagagcaagactgtctcaaaatgaaatgaaatgaaataaaataaaatattcatgaagaaatctctgttcattttccagatgattcccatagggtagtcctaaagttgaaattactgggttatactttaaagggtatgaccatttttaaaacttcatggatttagttcaattacctrtaaagtcttaaagtagctaaatatatattgtgggaatgggaaaaactaacagcgcaagcaagtcgggatttgctttcttgcccactatgtatcgcctatgtagacttggacaagctacttaagcttactaagcttcaatttccttctctgtaaaatggggataacagaccttatctcatagggtgattatgagcattagatgaaatcgtgggtgaaaggctcagtacagtgccaggtatacaagaagcattcagttaagtaatagctgttattgttataactgaggttttcacaagccgcacacttttgctcctgatattttttcttaccatgacagcaggccattgtttggttttctgtgctgagggaagcagaaagttaattaaaatggaaacccccaccaagtgacaagttgagagagaaaaatgatcgttcacatgatgcataaaaaaagaataaaaggtcttttttattagggaaaatttcaaacatacaaaagcacaaagaagagtgtarggaaccctatatcatatcccttggcttcaactatgactgaaacgcatggctgatccgtaaccccatsgtcaaccccagattacgtgcaagtacatcccagacatcttatcagccgagccatagctatttcagtcacatgatacatatttgaggcactgagttgtgctggctaagagcctgcctctgctgtcgcagtcatgggactgtgtgtgtgtatgtgtgtgtagggaggattgggagtcaggagagagacagaaagtcaacctaggacctttagggaggattgggagtgaggagagagacagaaagtcaacctgggaccttttttttttttttttcttttttgagacagggtctcgcactgtcacccaggctggagtgcagtgggatgatcatgacttgctgcagtctctgacctcccaggcacaagcgatcctcctgcctcagcctccgagtagctgggactacaggcatgcaccaccacacccagttaattttatttattttttttgtagagatgggtgtctcaccgtgttgcccrggcttgaactcctgggctcaaccgatcctcctgccttggcctcccaaagtgctgggattacaggcataagccactgtgcccagcttccaacctgggcacttcttaagctttactgcccaagtaaggaggccttgctgtgtcacaaacagacagggtggaaggagcactgaattcggagtcaggaaacctgatttcaaataagggccccaccccttaatggatttatgcttttagaaagtgacttttgaatttcttggagcatatttgtaaacattttgtgagtattaaatgagataacccatgtgacagctcaagtggctcaatatgagttggacctaaatcagactcgagcccagccttcccttcctgagaggcagcctccatatgcagtttaggtccctgactgccacctgcagcctcaccagaatgcattcagggagcgttgctgccggtctctcatgccgaagatgtggtggtagctcagatgagcacctgacacacacaacgccccatgcttgcaaatctcccatcccctctgttagttagccccttccctctgctttatggatgaggatgggggacctagagaaggtcccagtccttggtagcaggccctctctcacaccccrtctatgggaagacagggtcccttttctacctctgactttgatgattcttggtctcctctaacttgctgttacacccaagtaggaatttttgactcaaataaaataggaaagtcgatccgatttagtaatcaagtcaaagtcctctccttaatccactgggacacccattatttcaagacctggactgtgacttgtggtctctggctgttggtggctagctctgtgaccttggacaaatgcatgccaccctgggtatgccacctcagagaatcaactctcagccctgtgcagccccttccagctctgagattatcaaatgaaacatacatgtaagactgggaggcttcttcacataaataataaatgaaatggttttttttttagagtattcaaatggggtaaaaaattaacccctcagcttatgccattcctccctcattccacttctctttgcaatgactactgtttgcagtttgatgtctgtccttctaacccctttgtacacatttatatatgtatttgtggctatatgcaaatacatttttaaaactcagtagatggattacaatcaaacttgttcaacccgtggcgtgggggccgcatgtagcccaggatggctttgaatgcggcccaacacaaattcgtaaactttctttaaaaattatgcgtttttttgtgtttttcttttttctttaatctcatcagctatcattagtgttagtgtattttatgtgtggcccaagataattcttccagtgtgggcccagggaagccaaaagatcggacattcctggcattatactagtccatttacaaacttgccttgttcattttactgtgtgtattggaggtcttcccatgtcagtgtttttttttttttttttcatagctgcattgcattctatattttgaatgtgtttaccttaccaatcttctgttgatggacatttatgtattcccataaaaatatatttctaagtgtttttagacctcaaacatatggagagatggttgtaaatgtcagtgggttaaatgaacctagtccatcaagttctggaaaggatggtgagagagtgggcacagaaacactggggtctgcactctggaaagctgaattgaagggctctcaggaagctaccaagaggctgtttgcatggaagcttatttttggagatagcctgcctggtttggtgtcctcagcttcaagtgcaaacactgagctgcgtcatcacgttcccctccccttcccaccatccttgggccttccaagtttgtttctggtctcagggtcaggaacaggacctcgtgggagaactggcacttaagtggtagggagggaggagagagaactgaagaaaaggagtgtttgatctcgggctctggaggaggaattgttacagttatattgtactttgtctggttgttcaaacctacctggagtgttatgcttccctgggtcccctccagagagtgataaaatgatgcacacccagaaattggctacttggatgacagtggcttaggacaacatatcggaggtggaataaatgtggaaactaggactttctagtctgcaagagataaaaataagaggcatccttttcatgcggaagaaatcacacttcattacagtcacactgagtggctgctgcagacgggagaagcaagatgggcggggggtgaggaggggaaagagttgcaggaaaacaaataaggaagaactgacttaacggagctacccaacaatggaacaagctgtgttacaaggaagccactgccgtgttataaagtgatccaagcaaaagttgcaagtaggctgggcacggtggctcatgcctgtaatcccagcactttgggaggccgaggcaggcggatcatgaggtcaggagatagagaccatcctagctaacacagtgaaaccccgtctctactaaaaatacaaaaaattagcccggcgtggttgtgggtggctgtagtcccagctactcgggaggcggaggcaggacaatggcgtgaacccaggaggccgagcttgcagtgagccgagatcatgccactgcactccatcctaggcgacagrgcaagactcygtctcaaaaaaaaaaaaaaagttgcaagtaaacttgtttgccatcagaggacttctgcattgcagaggggttgacctcaatggccacttaggccccctgcagctttgagagtctgtgactatggggcaagaagcagaaaggtgcaaactagaactaaaggggtgggacaagttatagacaatgtagtgaagtagttttcacctgctctgaaaaggtggaataagatggaagccatcaaaggaggcttaagccttgtttcccttggatcttggcaactctctccctgttctgtccttggcttcagctccctttgaccttgtattcttaaattatttccacaggaataaataccttacgtacactttagatgatcaggaaatctggcacctggaaaagaactgcatgtcccaggaggatggttgtaagttttttcattgcagtctttgtaaatctgcatccgtctgttggttgatggagttttccttagtacagtgccgagcttccagctttaattttaggaaygctgtaccctttacaacctctcgatggtcctctgtgctggaatcgagggcacccaccgtgtttaaggctgatccctttctttcctgcaagtgaagaagaatgttttgacttaagtcktaaccaagtctggtgaaggaaacgtggcaaaatttaccatcttctgggcttttgctgtgtgcctggccctgattaggcatgttgtgtgttctctcatccaatcatcacaggaagatctgctgtgtcggtatcattagctccattttgcaaataagaaaaccaagcttcagaaagggctagaaactcatctaaagtttcaggtgcccaccactacgcccagctaatttttgtatttttagtagagatgaggtttcgccgtgttggccaggctggtctcaaactgctcacctcaggtgatccaccgacctcggcctcccaaagtgctgggatcacaggtgtgagccactgtgccgggactgcagtgctcatttttagaacatagatccaaataatccccatagtctgttgcttccagagcttagttgaaggcagatatgcacatattaattacaatatagtgtgataaatattatgatttgggtgtgcacagatgatgggaagaagatccagtaagtttgggaaagatttctggaagaggcaacacacaagctgtgtcttagaaagtagtagctrttagcctctgggaaatgagcatttttgaggcaggggaaggctgcaggagcaaagatttgagggtgagaaatggctcattgtatatgtcagggaaacactagcaggttgatattcctggagagaaatgcatgaggcatgaagtggcgggacttgaggctggaaccattacatgtgttatttaatagaattttcataacactgcatacactattattatctcaattttttattttattttatttatttatttttagacggagtctckctcttgctcaggctggagtgcagtggtgcgatctcggctcactgcaacctccgcctcccgggttcaagccattcccctgtctcagcctcctgagtagctgggattacaggtacacactaccatgcctggctaatttttgtatttttagtagacatggggtttcaccatgttggtcaggctggtctcaaactcctgacctcgtgatccgcccgcctcagcctcccaaagtgctgggattacaggcatgagccaccrtgcccggcctattatctcagattaataggcgaggaaacaaaggttgaaggagattcagtgacttgctcaaagtcagaccgtgagtgtgttgagttgcgtggtcttgaacataggcctgcttgcctccagagcccatgtctcagcctccacttcagtgcctgcagaggcaggctgtgaaagtctggcttgctggctaagacgattgttccctctcttttaatgtttcaaggacaacatcccytgccgaatcctcttctttcaacctgcctcatggtgttacccaactttttgttaaattgggactagtgggtctgatgttgacaggttttctgagtcttggttctagggttcaccttcctttttatccagccaatcagtaatccagaagtcttcaaataaaatctttatgtgcccaaccacgtgtgaagagggagaagattcatctcgtttctcaaaagatccaggtttatttgtgagcccaggtagtgcctgcgaatcctttagtttggagaaacactttggggactggaacaggaacaatcacagctggctggaggaacgtggggtaatgggccttgagctgtccctttaaggatgagtaggagttgggaaggtggagggcataacatatgagcaaaattattgtctcacttaatggtgaatgggacatcttttgcctattctccccatcctccaagataattcctgggttagagttggctctcgggtaggagaggcagtatggggaattcattcatgcaaaatcaagattattgaaaactaattaattggatcccaaagacaagatgatgaaactactcaatgaaataaaaaaggtaattacagagccaaggaagacattggggataaaaacaatgtcattacagaaaaagttaccaggaaacataacagaatctgttgaaaatgaaattgctaacagagaaggaaggcttgaggaaaatcacagcctatgctgagaaaaaagataacgcacttaaatcagagatctaaagatcatacaaaggtgggccttcaaaagggtaattggagagtctgcggaggcacgygtcgcttttgctcatattccattggccaagacttagtcacatagatagacacacctggctgtaagtaactctgggaaaaagtctccagctgagaggccatatgccttcttaaaactcagttttggggaaagctttctactactgaaaggaaaacctggatattgggatcaactagtatctgctttaagggaagtcatgttggtctcagacatgactgaacaggtttacagaggccaggtgaggtggctcatgcctaaaatcctagcactttgggaggcagaagcctgcggatcgcttgaggccagaagtttgagaccagcttgggcaacatagcgagaccctaatgaaaatcatcagctgggtgtggtagtgcatgcctgtagtcctagctacttggaagactgatgtgggaggatcccttgcccaggagctcggggctgcagtgagctatgattgtgccactgtgctctgggctgggtgaaagagcaagaccctgtctctatttaaaaaaaaaaaaaaaaaattgtttacagagttctggggcaaaggcaatgggactgaagaattttacactcaaattactttgcaagtatgtcaggcagacatcctcacacttgcaagaatttagggaatctagcactgaagaggccttctcaggaaacccacttgaggaagaaaaagattaatcgacaaacatacttagaaggcatagtggaaccgtcaattggtgaactcttaatccgttcaaatagagaagcaaagctaagcaggggcagggatgggcagtgaggactaaggaacagaatgtgaggaagtagaaagaatataccagaaatagggggttaggggagacgtgaggagatgttaagtgctaactttaattagaagtgtaccttttccggctgggcacggtggctcatgcctgtaatctcagcactttgggaggccaaggcgggtggatcacgagatcaggagatcgagaccatcctggctaacacagtgaaaccctgtctctaccaaaaaaaaatacaaaaaaattagccaggcgtggtggtgggcacctgcagtctcagctacttgggaggctgaggcaggagaatggtgtgaacctgggaggcggagcttgcagtgagccgagatcgcgccactgcactccagcttgggtgacagagcaagactccgtcaaaaaaaaaaaaaaaaaaaarragggtaccttttctggccgggcgcggtggctcatgcctgtaatcccagcactttgggaggccaagcgggtggatcacctgaggtcaggagttcgagcccagcctaaccaacatggtgaaaccccgtctctacgaaaaatacaaaaattattttgtactgggcatggtggcgggcgcctgtaatctcggctgctcggtggggctgaggcagaagagtggcttgaacccaggaagcggaggttgcagtgagctgaggtcgtgccactctagcctgggcgacagagtgagattccatttcaaaaaaaaaaagtgttccttttccttataaaataaaataataaaattagctattttattttacttttaaaaaacttattattattattttttgagacagtgtctcattctgtcacctaggctggagtgcagtggcgcggtcactgctcactgtagactcgatctcccgggttcaagtgatcctcccgccggcctccgaaagtrttgggattacaggtctgagccactgctcctgacccaaaacagctattgtgtaaagcaatccccatctatcctttcacgcatgctttcttccatctttcacacttctatccatatacagatatagagacttgaggaatgatactaattcatttattttttcctggatagagggctcttgggtgatttttagctctatatagttttgcatattgattgacattttataaataatgaactagtcttacttaaatcagaccactgaagctattctgaaaggcaccattaaaaactggttcctggggagtgaagagtgggaacggagatacagatggatgaacactgtgggggatttgagagtcagttatgcaaacacctcactctaggcagaacaaaatacgttatcaatcagatggacagctggggattggggcccacacgacaatggaaaaggtttcacccaggagaccgatggagttttgataggtggagaatgggagaaaggacctttctggcctgggggcagcaggaacacaggcctggggatgaaggggcgttggcatgtctggggttactgggagcagtttgttggtggttcgtggttggagaagcaaggatgaaggaaaacatggctgctgttaatacagtgtgcacagcacactagatactacacgtagatatctctaggttgcccaacaaccctatagcacaggtacaattatctctactgtacacatgagggaactgaagttaagggtgagagatctgtgcttgcttcagcagcacatacacgaaaagtgcaatggtacagagaaggtgagcattaaaaaatagtgatgtttatctgcccagaggcgcatggtggtgagactgatttgagctccctgtgctgcctgcacagccatgcccatggtttttctattgtgctatgatttgtggtgcacagagaccggaatcagccacctttatgaaacacaaaatgtaaaaataattgtataggtaaatattttataagtaagtctattttatacatttacgtttatgtttagattggtatttattattatttacatttacctataaaataaaacatggtttagatgtaaattttgtaggtaaatttttaggtaaatataagagcctacatgatggtccagactccaccatccagcagccgtgtggccccaggctacttaatcagaaccctaatttccttgcctatagaaggggataataattgtgcsactgcctagcctgagattagtttttatgttcaaattagatcatagacgttaaggatgagacagtttgaaagaggcacacagaagggtttgttattgcggacacacyccttgctctgctgagagcatacatctgttcaagcacccacaggtgtctgtgaaaatgttcacagtcatagacacagcccctacagggttgacacaaacaacctggtcaacaggcaagaaactgcttccctgactcagttaaccagctggaggctgtaatgaaaggcagcagagagtgagggagggaggaggcagggagtgtgtctggctctctccctgcctgggtgagaatccgctcttgcctgccttcctggttgctggggaatttctgggccagagttgcgtcgggatggctgtcaacagcttggtgagggtggaggaggctgttccagacgtgccaagctacaggaatgaatgttggagctgccacgccggcaggccctgccatgtctggtagacgccagtggtctgaaagagggaccaggaaggatagggttgtcaggggacttcggtggccagctttattctccagaagtaccgatgaggacaaagcaaggccctgacctcaaagaaattgggcttctgacaacacttatcaaactgggcgggcagccagacctctgctctgagctagtgtggctggaggcacctgacgtttgctccgggaaggatcaggatggttgtagggtgtgggctggggcctggtatgctcttgggggttcagaaactctagtgtgtgtgtgtgtgtgtgtgtgtgtgtgtgtgtgtctgtgtgtgtatgtggtcgttggagagagacccaggctattccatatcgctgaagagatccgtttcttccttatctcactggtctctctgctataccaacacctttggctcagcctcagctccagccagcctcagttccggaggagccccctcaaattcatggcccacaaaggagagagaagacctctgatctcttgtgccatgctcactatgctatgtgaaatttgctatgttagaccttgacatcctggatggtggggatgatgactggtttctctgcacagccctgggcccagtatcctgcccagcccttaggagtcctcatggaatgagctcagctcccgcgatgctcctgtttgtccactgaggtaagaacacatccagccaccagtgagttgagtgggtgttctctcggtaagatcaaggtgtgacagcaggcagtgaatttgcagtagcccgtggtgggaagcccgtgaggctgtagtgggccctcctgctccaccagagagtcatttttcctacctgccaattctagccttggaaataaaagccaagcaggcgggtgaaagagggaaaattctctgggatggttcatggatctgagccctggaggagagtcaagcttgggaccttgttcttcttgtcttattttgggaaccagggtcataggaatttgttccaggtgagagagggaagaaggcagctagggagctgtgacgtggcagccaggctgagttatcagttacctaagagtctgcctcagggattgcctttgtggactgcacagtgctggttctgggaggargctggccttgggcctgagctggaggtggtggctgacagtgtgaggaatgaatccccagaagatgattcctgccagagggcttgtgacggctccttttttgcttttcacaatgaacatcttattctgggctgcaaatttggatgaggggaaaaaactggccaggaggagatgaaccaaaggcgtctcacagggaatccttctgtacttgaagagtcctgcccttgtctccccagccagatccagtgactcacagtaggagggcttggaggcaactcactgccttccctgttaactaccgtttgcaatgtcaccttcctcagaaagaccttatcattcggaaaaaaaaccacatgctttgtagccagacagacttgggtttaaattccagatatgccacttctcaggtgtgcaagcttggcagcttggcctctctggtcctcagtttcctgtcttagtctatattcatcctttctgccttgtagcattggtgtgagtcctagaggtagtgcctaacctagttttgggcacatggttggagaccaataaatcgtggttattttcaatatcacagcacatgtgaacggttattctcagttattgtccacctgatgggccactttgctaggggctgtgaatagaaagagaaatgagatacagcctctccctggaggagctctccatctaggaggagagccaggcctgtggaagggggcacaaaggaragcaagttgcacaagctgtggagggagctggaggcaggggcagagaaggccagaaaaagagatgatatcctcaaaggctttaaaagaatgaagaagaatctgccaggcagttggggcgggggcagcattggatccactcataagggagggcagagctaacagtggaggctccctggacaggtgagccctcgggcttccccctctctgctggcatttgatcctactcagtttgggtcaggatagagtctgcagtcgttttccagcaggtggttttacatgggcaggaatccagccaggcctgactgggggagagggtgttgaggtggcacttgtcatcccagtgatctctccataggtatctgggctccaggcttagggctaggagcaggagtgggcctcctcagagggagtgggacagattaccaggcaggaactgcaaaggcagagctcactaaagtgcaggctccaggtcatgtggatggaggggcttcacaaaatggtacaaagcggttgttatcaaattcagacagcaggtaggtgggaggaggggtgacctgtgacttctgtgatttctgggaagtccactgaccctttatgcagtgctcagtgtcaaataaaaagaaccggagaagaccaccttgatagttaaggatatacatttgtggttttagttattcacaaatgactctaaagttctgtgatatgatatgattgggtgaatcatttggatgagataaaaacaggattttatttgctgcatgcatgttgtgtgtcacctaggtggtgataaaaacaaacgtagaagctttcatttactgaactcttaccatgtctgggcatgctatatgctttacaagtatctcatttagccctggctaaatccagctctttgaacaccatacctactccacaaatctgagtgtgactgtagaaaagcatagtgtcatcctgaatggtcccactctaattcttttttgtttattttttttgagacagagttttgtttttgtcccccaggctgcagtgctatggcgtgatctcggttcactgcgtgcagcctctgcctcctgggttcaagcgattctcctgcctcagcttcaggcacctgccaacatgaccygctcattttttgtatttttagtagagatagggtttcaccatgttggtcaggctggtctcgaactcctgacctcaggcaatccgcccacatcggcctcccaaagtgctgggattacaggcatgagccactgcgccaggccgtaattcttggccatgactcttaaggggacattggtgttgtaggccatgtcrcttcattttgttggtccgttggttctcaaccctggctgtcattagtgttactggtgggaattataacacgtattgctgcctgaattcctctcaaactaacgaaatcaaagtctttgtgaggttgacctgggcaccagtatctctttgttaacctgtgctgttaattccaatgaatgatagttgagaagcatgaccattcctctgtcatctagatgactgtttcgcacctttttctctctcttcaagyctctaacaccttccctatccatactctcagttgataccttgttttaaacttacctgaaaaaataatggcagtcggaggaaaactttcataccttttgtcttagtccattcaggctgtgataacaaaataccgtaaacagggtggtttataaacaaaagaaatgtattgctcatagttctggaggctgggaagtccaagttgaaggcaccagcagattcggcgtctggtgagagcttgcttcctaatttatggatggtgctttttcaccgtgtcctcatgtgctaacagggctcactagttctccagagcctcttttataagggtactactgtatgagtccatgttgccttgctataaaggaaaacctgagactgagtaatttataaagaaaagaggtttatttggctcatgattctgcaggctgtrcaggcatggcacccacatcatcttctggtgaggcttcaggaagcttttactcacggcaggaggtgaaaagggagggggtgtgccaatttttatgctcctggagagagttgtctgcatttgcaccctgcactccctcttctctcattctcatttaaactcaacatgatcagtcttttgtacccatcacaccaccaaaaccataccggtcaggctcaccagtatcctctcttgccaaatccagtggtcagatctcagtccctatcttgactgatcagcaacttttgatacaattgaccattccatcctccttgaaatagtttcttctcttggcttctggaacatcactgtctttgcttttcctcttctctcactaggttctccttctcagttccttttsttggctcattttcttttcttttcttttctttttttatttttattgagatggagtctcactctcttacccaggctggagtgcagtggcgcgatctcagctcactgcaacctccgcctcccgggttcaagcgcttctctgttggctcattttcacttggtcactgtggagtgcctctgggagtggcccttggacttggcctcttctctgtctcctcatgcccaggccatctcatatcatcaatttcctgacaaccctcaatttatatttccaacccacacctttcccctgagttccatgctcagatattcaaccatctacttgacaagtttccktagacatctaatatacatctcaaatatgacaagcccaaaatcgaactgctgcttttctccctaaaagagccatcctcatttcagtggacaacaatttcatctttccatcttttagggcttaaactctggagtcattctaaattctctttctctcatgctgcacccactctgttagcaaaccatgtcagctgtgctttcacaataaattaagaaacaactacttaattcatcaaattcatgttggtccaggacagaagacctgttctttctcttagaatcgtttcayaactgagcctcctgcttgtagtcttgctcctgtggtatgttctcaaaacagtaaccagagtgatcattttaaaagctgtagtgatgtgtcattcttccgctcaaaaaccaggaaaggcttcctcttttactcagagcttagaaaggcctacaggattctgtgtgacccagccttcagaccctgcagacttcatctcctgctcttttccaccgcttcattctgcttcacctcactgagcctactcctcagatataaagcacactttggtctcagagcctttccactgcttcctccaggcaggacaccttccttcatgtatcctattgttttcgtctcttcttcaggtttctatttagatgtcaccttgtcaaacaggccatttgacagccttatataagattataatctcctgcctgtctcctcccaccgacttggctctctcccttttatccttccttgttgctgttcaatagcgtaggtggccatctgagttactaccctgtgtcttttctcactaggaacttgcttccatgagggcaaggatgttatctcttttgctcacagctatttctttaggacccagagcaatgcctcaggtatcataggcataatccacatttgttggctgaatttaacaaaatcctcacaatgacatttcaaaattagttggaataacccaaaatttatacatgaagaaactgagacacagagaggttttttttttttttttaattttattttattttaagttccaggatacatgtgtaggatgtgcaggtttgttacataggtaaacatgtgccatggtggtttgctgcccctatcaacccatcacctaggtattaagccccacatgcattagctatttatcctgatgctctccctcccccaggccccctgacaggccccagtgtgtgttgttcccctccctgtgtccatgtgttcttattgtttagctcccacttataagtgagaacatatggtgtttgattttctcttcctgtgttagtttgctgaggataatggcttccagctccatccatgtccctgcaaaggacatgatctctttcctttttatggctgcatagtattcygtggtgtatatgtaccacattttctttatccagtgtatcactgatggacgtttgggttgattccatatctttgctattgtgaatagtgctgcgatgaacatatgcgtgcatgtatctttataatagaaggatttatattcctttgagtatatactcagtaatgggattgctgggttacatggtatttctggttctagatctttgaggactcaccacactgtcttccacaatggttgaactaatttacattcccaccaacagtgtaaaagcgatcttatttcttcatagcctcaccaacatctgttgtttcatggctttactaattgccattctgactggcatgagatagtatctttttgtggttttgatttgcatttttctaatgatgcatggtgttgagcattttttcayatgtttgttggccacataaatgtcttattttgagaaatgtctgtttatgtcctttgcccactttttaatgggttttttttttcttgcaaatttgtttaaattccttgtagattctggatattagagctttgtcaaatggatagattagattgcaaaaattttctcccgttctgtaggctgtctgttcactctaatgatagtttcttttgttgtgcagaagctctttagtttaatcagatcccatttgtcaatttctgcttttgttgtaattgcttttgatgattttgtcctgaaatctttgcctgtgctgatgtcctgaatggtattgcctacattttcttctagggtttttatagttttgggttttacatttaagtctttaatccatcttgagttaatttttgggtaaggtataaggaatgggtccagtttcaatttgctgtgtatggatagccaattttcccagcaccatttattaaatagggaatccttttcccattgctagtttttgtcaggtgtggcaaagatcagatggttatagatgtgtrgtcttatttctgagatctctgtgctgtcccattggtctgtgtgtctgtttctgtactagtaccatgctgttttggttactgtagcgttgtagtatagtttgaactcaggtggctggatgcctccagctttgttctttttgcttaggattgtcttggctatatggactcttttttggttccatatgaattttaaagtagttttttttctaattctgtgaagaatgtcaatggtagtttaatgggaatagcatttaatctattaattattttgggtggtatggccattttcatgatattgattcttcctatccacaagcacggaatgtttttccatttgtttgtgtcttctcttttttttttcttttcttttgagatggagtgtcactcttgtcacccaggctggagtgcagtggtgtgatcttggcttattgcaacctccacctcccgggttcragcgattctcttgcctcagcctcctgagtagttgggactacaggtgcgtgccaccatgcccagctaatttttgtatttttagtagagatgggatttcaccaggttggccaggatggtcttgatctcttgaccttgtgatccacccacctcagcctcccaaagtgctgggattacaggcgtgagccaccatgcccggcctgtgtcctctcttatttccttgagcagtggtttgtagttctccttgaagaggtccttcacttcccttgttaggggtattccaaggtattttattctctttgtagcaattgtggatgggagttcattcatgatttcgctctctgcttgtgttttgctggtgtataggaatgcttgtgatttttgaggcgcagagaggttaaacaactttttcagagtaacacagcttgctagtgtagaactaggactcaaacctgccaagtgactgtgtcgttagatcgtctctctgtggagcctggccttccccctgcacccacatctcaactgcctcatttttttcatgtcttgttgcaagcagccggtcccacagagtgagaaaaatccctgtgaaaaatgtcgcaagtgtgactggaggtgtgggaaatgcatacacaaacaagcccttatctgcaactttcaagtccaaaaatttgtgaaagtcaagctttattcttaacccatttggtggcaaaacctgatttggactgatgtgaggctatttataaatctatgsctgtaaaatgtttgtgtttgtttttttttcttcctggtaaattagtatttcctttaaggctctttccaggaacatgctcagttttaagacccgattaagatcaggcacagcaggccaggctaagaggggcatgtgtgaaatgcagttctataccagagggaatgagggaaagtccacatgctcaccagcgaggcctctcgctgctcccagcactttttctgcttctgtcacacagtgctggatactagagtcaaattctgctttccctagtcatgaggctagaggagtctttctgcataaacttaagagcccaagagaaaaagcctatagatattgatatttagggtgttccaaacaaaatttacagctgactcacaatcaccctcccgtaagatccaccagttcagaagcactgatcatgcacacagaacatccggtcagtttttagtgtctcacttttcaatttaaaaagacagctaacgatcaccagatatttgagaaaagtttgaaacatgaaaggcagaaattaaaagagacaacaacagcactagaaactcacaagaaatagagaaaatatagggagcagaagaaaacttcacaaaacctgtaattactagtctaagagagataagagaatatgttgcattaatraaataaaagcaatgtgcaacaaagaggagtttcagagactaagaaagaacttttggaaattaaaagtgtgatagaagaataaatcagtagagggtttggaatatagaattgaagaaaacttacagaaccttgcagaaagtcaaagaaagaaagaaaatgtgctgggcgcggtggctcatgcctgtattcccagaactttgggaggccaaggtgagtggatcatttgaacccaagagtttgagaccagcctggccacatggcaaaaccccacctctactcaaaaatacaaaaattagccagacatggtggtgcacgcctatagttccagcaacttgggaggctgagatgggaggatcacttgagccaaggaggttgaggttgcagtgagctgaggttgtaccactgcactccagcctgggcaacagagtgggaccctgtccctcccgcctaaaagaaaagaaaagaaaaataagaaggattattctaagaagcccaacatcagaatagtaagactcgcagaaaaagagaatagagacaatgaaagggaaaatttattaaagaaataatacaagaaaaactttgagaacattgaaaggacattgaaaggcccacttgagtacctggggctgtgacttgaaaaaaagacatacaccagaagaaaagcttcttgacaggagaaaatcctccccccaaccaaatggattatatataacaatagaaatatgattgacatcatctatctctacagaagctaggagacaatgaagccattccttaaattctgagaggctagtatttccaactgagaaattatatcctgacaaattattaatcaaatatgagggtggaataatggcattttcaggtatgagaagtctcaatgattttatctcccacacagccttttttgaggaatctatgatgcatttgtttctccaaaactagacagtaaactaagaataaatgggatcttcctttaagcacagaaagcaaccacttcaggttgaaggaggagaatggaaggttccagaagggagatttttaagaattaaaaaaaaaaaaaagattagtacataatggtatatttagtgtactgtgatgagttttatagttttgttggaatgttgagggctgaattcgtgacaagtacatagaaagttaagcagacaaacaaatgaggtaataatggactctacaaatggcaactaagaaatatacatgaaaggaattaattgtaacaccacacatggctcagctatgaataataatttatctggttataataatgtaacttaataattacttgacaaaataatgtaacttaataatatagctattagtgttgacttaataaaaaatggtataactattgggagaatgtgggacaggagaggtggtatatagaatggtggtaaggagctaaatccttattttctataataggaagttagtgaataatatctaatattgaaaaaaatccagagccatataagcgtgctatttagatacactgagatgactctggaaatagatacaggagttgaaagacagaattagggatatggaggggtggggcagggcctgctgtttctccttacagccttgcagtaccactggaccttaaaaatcattggtgtgtgttgctttgatttaaaaaagggctcactgtgccgggtgctgtggctcatgcctgtaatcccactaatttgggaggccaaggctggtggatcacttgaggtcaggagttcgagaccagcctggccaacatggtgaaaccctgtctctaccaaaaatatcaaaaattagccaggtgtggtggcatgcacctgtaatcccagctactcgggaggctgaggcaggagaatcgcttgaacgtgggaggcggaggttgcggtgagcagagattgtgccactgcactccagtcagggtgacagagcgagactccatctcaaaaaaaaaaaaaaattaaataaataaataaataaataaataaaataaaataagttaaaaagggctcagtgtctccccctgtatccagattggcacctaaaataggcacccaatcaaagctgaatgattgtttgctgtagagaacatattaacaacacaatcaaataaatgtgcagaggtaccctcctttggaaattttgcatatggcaatggcagaagagcttcccttttctggttctctaaatgcagacaccttttctctttttgtcagagctcacccatgtactcagtgtgcaactcatacttagtttcagctctttgctggaatctcttggcctagcactaaagggaagataaagaaaagcccctgggaggcagctctgggaggcagctttgtgtgtggaactctggcttagtcacttacctgctttgtgcccgtgctgtcaccaaagctcttgtcacctcatctgaaaatggagaagacactcctcgcttcataggcttgtgtgaagaataaatgaataacttagtacataaagcacctggcacacagtagttgctaacaaaaaaaaattgaaattaaaaataaaggaacatttatggtgaatattattaggtctaggacaggagccccgtaatgttggatctgggctccccatatgaaccatcaagaagggatgtgagccctgggagaggaagagggggacagaaataatccggaaagtctccttatcttagcagacgttcttactgtgttttgggtgcagtgtcttctgatttgactgctgtgttcagcagatttgtggagacccagatcctggaatgttttatgcacaaggatcaataaaagctcttagcttatttcacttccatattcaaacataatcaaaaccattgctcacatctcagacaatgtggaagaatggctccagggttaaaagggttatctcacgctgaggctcctgggtgctgagtggggatggctccttgaagccaggggcttggggccacagccttactgctgtgacaggtgaacccctcctctgagtcaacacagagcactcgagcaatggttctgctttgaggggctgggccatgaaattcttggctcaatttatgaacttctttgggttccttggttcctggtgagctctccaaatcctggttctgggtctgtggttggtgcctcacacatkgtacacttacttgaaggaaacacttgctggaggcaagaaggagtcactgcgcccaaggcagcctctcatttagccaccctcttccttagaatcatcttctgtgtcatctagatgcttctgggtctaagggcagaggagaaaggggattggctgagctgctgccaggggctctagagttgggggacagtgcagtaagggctgccccaagagataaaacagagaacaggccctgagsagaaggaaggagttgagcacaatcttggctggctgggcctcgagaggaaagtagagagaccaaatctgggtgttaggcccagtgacccttgtgggataggagggaggtcagagagcagaacttgtggtgacagattacagagcgttatgaattaagtggaaactatattaaaatggccaggaagcacgtgagtagataggaggcttggggaccctatgatcagctgaatctgcagtgctgagtatggtgataggaggaagttatataatctacttaatagaaaaaaaaaactttagaatttaagatagaagagtcatccaactacactttagcaatctagcgtggtcctgtcagtagatttttgtttcgttttgttttctgttttttttttaaattttttaaatcttttttattttgagatggtacctgccaaccctagtggcccgcggccrctagactcactacatacctgctgtcctgggcctgcatggtgtcctgtctacctctcccagggcctctgccctgctctctttgtaggccagcttcctctccttccatagagtccctgtagctccatcatttgatctttttttttttttttttttagatagagtctcactctgtcactcaggctggagtgcagtgattgatctcggctcactgcaaatttgcaaattccacctcctgggttcaagcagctctcctgccttggcttcctagaaactgggattacaggtgcacgccaccatgcctggctaatttttgtgtttttagtagagacagggtttcaccatgttgaccaagctggtcttgaactcctgacctcagatgatcctcccgccttggcctcccaaagtgctgggattactggcatgagccactgcgcccggccccatcacttgatcttgtgcatggcatttgcttgtcatggttccaccactacctttcccttcactctagggtctaccaccagctgactagagtcttttttcacagttgcagttttgaaagagtgtcagattggcccagcttccttatgtatggacgaattgtctttaagtcagagttctaccctttgtccatcaggggaagtccagatgaatgagcaagtggggtaggggcagggtgggcaggtagaatgacttgcctaaatattggagatctgcaaaccattttccaaaggacttaagaagcacaaaaggaatcccccattccctcatgaagctgcagattgctatggctggagtgtagggtgcatgagagtgacagggcatgaggctggtcagctggaaaggggcatgagacaggtccccaaggcttttgcctgggtcacagggctgaraaacctagttatctgtgtaggtgaattctccatctctcactgaaagtttggcctggagtgaaaggaaggatacaagagctggctagggagagatggagagtggagtcttccttcctgttaaggaggcagagcagtcagcccagcagtgcccacyctacctccaccccaggagcactttgctcttgttcccccaggagggctccttgtgggtggctcctagctgaccactagctcagctgtttgcctgtaaagacctcttccctgactgctctcatttccccacagtgaccctggctcctggtgttttgttggcattaattacaaacagcagcaaagtgcccgaagcctcaagcaacttgttctttttccgtctcaccagatgcctttgttgttcgccctgttctgtcctgaatctttgtgaggtcttgacgttaccacccatcgcatggctcacttcagcttcagttctgtctatcagcatctcccgtctcatgggatgactcttgtttctctttgtatctaagggtttctttcccctggacaccgtccttgtgtatctatcactcccctgtccctccacgggtttctctttctctccttacgaattgtcattcatgtacccctctttcccaagcttgattagcagagttcatttagcataatgggtcttatcttaggctggggctgagctgagtgtgagcatgaaaaatgaaaagtcagacttggagaactgcaccttcatttccactagaaatggttacaccaggtgaacgaggatatgtgggtgagggaggggcttgggggagagaggagtgttaggggaatgggcacatttctccattgctgggagcagtttctatggtaccagtagtcctgaaggtagcatgctaagactgttcagaagcctgaagaatttggaagctctttgacccagcacagttttattcctaagactgtgtccaaagaaaataatcatgggactccctggaagattttgtttcaaacactatttgccattagccaaaaacaaaacaaaaggctgaagatgacttaagtgtccaggcttggagggttgggtacaatttatggtacagctctgtggggcactatacatggctcattggagatccttgggtacgtatatattatgcagccattaaaatgatgctgctggagattacttactgacacggcacttactaaaccatgcctagctttattacatctttataaaaaatctgaaaaataaaaacaagaaacaggtagagtatgttatctgtagttatcttggatgaagaaagaatgggtacattttgtctttttcatttaattatattttctaaaatttatagattgaacatactttttctgacacaaggaaacacaattactttaaaaacaaatgccctctattcaggcaactataataatatatgggttgaaaatttaggatcagttaaaaatgcttccaaaatgaattagaaattaaattcactttaaaaaaaactttttttttgagacggagtttcgctcttgttgtccaggctggagtgcagtggcacgatcttggctcactgcaacctccgcctcccgggttcaagcgatgctcctgcctcagcctcccaagtagctggggttacaggcatgaattcacatttgtaacagcataaacaacatactataggtcaaaggagactgtgaacaagcttgatgtagttgttgattgaaatccattgtccgcaggccttctctaaacacragacttgggcccgatctgtagctttctaacccttgctttttcttaccacaagtagtgagtagcacaaggattccacgactgtagcagagtttgctttgcccaatctgcaacttactctcaaattgtacaaccccagagggatgagtctgggtgaacatgtagctcgtttaggtcctggaaaggaggctggctgccccggagctggcagtgggaggagcaaagactctttcctcctgaatgtattaacgtatgtgcttctggtgaaactttgctttgttgttgttttttaaccctctgcaggcaaggggagagccagytgcgcagagccctgcaaccagcagtccagggagaagtggtgaatgtcatggagcccagctgaaatggactggcccccttgagcctgtcccaagccctggtgccaggtgtccatccccgtgctgaggtaagaccccctgaagcccagcctgaggaagagaggacacaatgccttttttgcaggggcaggaggcagagggccttctcaggaaagaaggagcagttagttgtttctggttcagtcaaaccatctgcttcagcctcagcccgttgggaggcaaggtcaattggtggccaaagaggcttctgctttgtcagagcaggtctttggaatyttgatgggagttgtattttctcagttgctggtgaaatttgaattcccaagggaatacatttatcctccaggtaagactgcaccggattcaggtgaatgcttaagtatacctcctctgctctgcaagggagctcttgggaaacacacacacacgcacacacacacgcgcgtgccacgctctctctctttcaacccaagggtgacagagtgaaacattatgcagagaggttattccaaaacattctgggaagctcactaaaaattgattttaattacctagatatgttctgattataaaggtaataggtgctcatagaatgattggaaaaattctgttgtggaagaaaatacaatatatctgaaaccctgcccctgttaacaatcctccaggtggtattctattaaggttactctttaagcttccacaggatgttgatttttcctgtgtggaggtagaaaggtgaggcagaaggagaacttgtccctaatctggaaactctgtttcccaatttttatatattcaagaattttgcaaactgcttgttaaaaacgattaaaaacaatgggtggcttgaaactgaccacgatggggaaacttatgccatggaaatgggcaagtgctacaacccagggcttttttgttttggaaattccgattagataagcaagctgctggtttcagggcttaccctaccccaggctgtggggcatccggcaaatcacctcccctatgcattccttcatttcctcacctgtgaacggtaggtgcccagtaacatgagttgcgtgaataaatgaaagtgagatttccgtcattatttcatacaacaatcgtgagggtcccataaaataatgaaaacagaaatgttttgcgtacagtgagcctccctgcccctgtagagaggggcttagttgactgggcaacctttggtttagtggtagaagttggctgcatttccccctttggctcttgctccttggggagccttcggattactgacacccttttataaaggcagatgaaaacccaccatttactggccaacatctggggcacatttccttcccggaaaagtcacgaagttggtcagagaagtgtgaaaagggagcctcagcaatgcaggacataagagccagaactgaaatcagagtttttgactcataatctctaatgcgggtgtgggggacttcctgccaaatgtgaaattgcaacaaaagcctctttcttcaaagccctgctgttgcagcagattagagctaataaattagcataatgaagtcccagcctctgtccccctccctctgcttcctgaatctcttcctgtgtcccaaaggagggatagggagcgggtgggacatccgttaagcaccagtttatccttgtagaattgtaggttcagaaaattataaaggtggtaaggtctacagagtccatctggtcccacaccctcattttaagaacctcaggccactgagctggtgattaccagtgactgaggcgaaagtacgtactcctgggaggaagggagctcaggtggaggggtggaggatggagcgctgctcaggaggccgcctcctcacagagcttacatataactggcagggaacgtggtgggtggtctccaggtgccagccctgcctcttctcttcctcgtccttcccctgtatctgaagtcccagtgtacttcctgaggtgcctctctagtgtgtttggacttaaggccatcagaggcctggttttctggtcagcaaaatcaactaagatcttattttttattttttcgggacagagtgtcgctctgttgcgcaggctgcagtacagtggtgcgatctcagctcactgcaacctccgcctcccaggtttaagtgattctcctgcctcagcctcccgagtagctgggattctaggcatgggccaccacgctggctaattattttgtatttttagtagagacggggttttaccatgttggtcaggctggtcttgaactcctgacctcaggtaatccgcctgcctaggcctcccaacgtgctgggattacaggtgtgagccatcgtgcccgacctaactgagatcttattctgagaatctttagatctatttatgacaaagggaaggaagggaagaggctgttgattgagctcatgatggttcccggcacagtgttttgtaatctgtctacattatcttatttaattctgcaatgagctaacaaggtatctatcccatgtcacggatgtggaaattgggtctcacagaggtaaagagacttctgcaagatttcacagctcataagcaaaagagatacactaaggctgtctgtgacctccacagcttctcaaagctagtgagtgctctttatggcaagcasttgcccacgtggtagttccaaaatgcagttcccacacacagagtctctcccgtcggggaatatcattccatctcggaagctctgtgaacagctgcagctcaaagtgcttggagctttgcaaaatgctacactgttcctttcaaaccccaaggtctcttccttgtagygtaagatagcaccagagctgggagcatttatagagtgctatagtgtagtcctctcattcagctgatgccccaggaggtgaggcccagtggtgctgggcccccagatctccccgccagttagaagcaacaggcgtgtcagtccctggactctcagaactgtttcccggggagcgcacaaagacagatatgcttgcgtttcctctgcaactcgggaagagattattcctctggctagggggatttaattcagttccacagatacttactgaaagcctactatgtgccctgccaaatatctcagcttgtttgggcaagaaactctggcccacacttggacatacagatctgacagggacaagaggaggagcttccatacttcaaggctgtttagtaccttctttttccgtccgttctgtcaccactcatgtccagcctttccttcaagaactctaaaggagaaattatgtctcaagtagctgtgtgtccagggtttccagactcctgaagaggtgtttttttgtttgttcgtttgttttttagacggtgtcttgctctgttgcccaggctggagtgcrgtggcgcaatctcagctcactgcaacctccgcctcctgggttcaagcgagtctcctacttcagcctcccaagtagctgagattacaggcgcctgccaccacacccagctaatttttgtatttttagtagagacggggttttgccatgttggccaggctggtctcgagctcctgacctcaggtgatccacatgactcagtctcccaaagtgccgggattacaagtgtgagcgactgcgcctggcccgaacacagagttttaagtrcctaacttgctaactggggaacaarccagcagatgggggagggagtcagggtctttggaagatacctactgagggacagggctgaggggaggaggcagagtggcagagggagtgatttggggaggcactgctacgtggaggtggtgccctgccttcagctttggctcagcagggcactcagaacatgaattacagccgaaagagctccttggaaggcttgatcgttagccatcatgtctttcacttaaggaaatggaggcccagaaaggggaaggatgttatttgcagcatgagaggaattggagtctgttctgctgactgtctggtcaggtccttgacacaaaaccaccgtggcagtagaggccagggtgtcctggggagccggcacagcccacttcctgccttagcccatctggcccgggatgggctggctttggctgttggaggtatttgtggcagtggcaatccaagagagagagggtgtcattttagtgatgccagagatctcctgcagccccagcccctcattctcatttggagccttcttcgaggtcttgcttaggccggggagttatggcctgtggcttcaggttgggaatttgccactgtagaaaggcatcacagtacggagaaaagtggcccagctttgaagccatttgacttgggtctgagcctgacctgaccatagctgcatgacctcccggctttctgatccagtttcatcatctgtaaaatgggccgaataatacctaccttgagtgaagatgaataattatttatataaagttttttccccacaaagtagatgcctattagatggtacccattaatcttgttttatatacccttattgaggtgtaattgacagacaaaaccctgcacatacttaaattgtacaacttggtgagttttgacatatgtatacrgtcatgaawctattcccacaattaagctaatgaacataacgattacccctaaaagtgtccttccgagctttatccctccttcctgcccccttccatctcctgccctccatcctcaggcaaccactggactaagctgctttctcacactataggttcgtttgcattttctggagctttatgtaaatggaattatacagcatgcatttttttttcattcagcgtaattattttgctgttcatcaatgttgtgtgtatcagtagtcctagttgtggatataccacaatttatttatccatttacttgttgacacacatttaggttgtttcaaattttggactattaaaataaagccattagaatcatttgtggaaaaaaatgttgtggggacataagtatttatttctcatgagtaatctcctaagagtagagtggctgggtcatgtggtgggcgtttgtttaacttttaaagaagctgccaaactgttgcctagagcacgggtaccattttatatcaccaccagctgtgtactagaattccaggcacttcacttccttgccaacacttggtatgatctatctttttctttttctttttttctttcttctctttttcttttttttttttttttttgagacagattctcactctgtgggccaggctggaatgcagtggcgcaatctcagctcactgcaacctctgcctccggggttcaagcgattctcctgcctcagcctcccgagtagctgggattacaggcacctgccaccatgcctggcctatttttgtatttttagtagagacggggtttcaccatgttagccaggctggtgttgaactcctgacctcaagtgatctgcccgcctcagccccacaaagtgctgggattacaggcgtgagccacagcgcgcagcccatctttttcattttaataggtgtatggtgatatctcattgtgtttttttgtgcattcccgtaaacactaatgatattgagcttcatttttatgtgctttgtttgccacctggatggctcctctggtgaaatgtttagatttttttacccatttaaagaaaattgggttgtttgtcttcttatgattgagttgtaaggtttccttatatattctacagataagtcctttattggatatgctttgcaaaattgttctccaattctgtggcttgtacatgacaggagatggaagcaagtaagctaattattgcaattcagttgaataagtgctgtgcacaggaagtgcagaggaagagcggtgatctcaggatggggagtcaaggaagcttccttaaggagaagctatatgaattggatcttaaaggaaatgaaaagttatctaggcgagggaagggtagcctcagtagaagttcgtatgtgccaaggcatggaaacaggaaacgtcgtggtacacacagtactatgaataatttgacctggttggaacaccaggattttggagcgaagagtctgaactggaatcccagttttcttactggctgggtgccttttctttttatttaactttttatttggaaacgattgtagatgcacaggaagttgaaaagatagtacagagactcctgatgcatccttcctttagtttcttgtttcttcttacataattatagtacaatatcaaaaccagccatctgagattggtacaacatgtgtatagtttgtgtcattttctcttgtgtgtaggttagtataggcatccctagaatcaagatagagaactatttctttttcttttctttttctttttttttttttttttaagacagagttgcactctgtcacccaggctggagtgcagtggcgcgatctcagctcactgcaaccaccgcctcccaggttcaagcagttctcctgcctcagcctcccaagtagctgggtttacaggtgcctgccaccacgcccggcaaatttttttttttttttgtatttttagtggagacaaggtttcactgtgttagccaggatggtctctgtctcctgatctcatgctccgcctgcctcagcctcccaaagtgctgggattatagatgtgagccactgcgcccggtggatacagaactattttatcatcaaaaaggtcttccttgtgctgacccttttttgtcaccctgcccccacctctgtttttcacttctataattttgcctttggagaatattctctaaataggatcatacaatatacaaccttttgaggttggcttttttgcactcatcataatgcccttcaggtctactaaaattgttgaatttatcaatagtttgctctttttgttaaattaccgaatagtattccatggtatgcatgtatcacagtttaattgtttgcctatggaagggcattttggttaatttcagtttttggctattacaagttaagctgctatgaacaattgtgttctgatttttgtgtggacataaatttttgcttctctgatataaatgccgaggagttcaattgctaagttgcatggtgagcatattattttgtttttgaagaaacggccaaaccatttcctagaggggctgtatcactttacatgcccaccagcaacataatccacttcctccacatgcttgccagcatttggtgttgtcactttttctcaactttagctgttcccttgtttttggacacggagtttcactcttgtsacccagcctggagtgcagtggtgctatcttggctcactgcaacctccacctcccgggttcaagcgattcttctgcctcagcctcctgagtagctgggattacaggtgtgcgccaccatgcctggctaatttttttgtatctttagtagagacggggttttgccatgttggccagtggccagtctggtctcgaactcctgatctcaggtgatccacgtgcctcggcctcctgaagtgctgggattataggcgtgagccactgtgcccccccaacgttagctgttttaatagatgtgtagtgatatcttattgtggtcttaatttgtgtttccctaacagctggttgtgtgcctctctttctgctcccccagtctggctgtctgaatctagaccacagcctgtactccttaagtgttggaagcaagaagatttggtgctgacaaaccccctcccatcattttcagagctgccccaggaatctgacttccttgttcttcagcccagttcaccagttataggaaatctttagtcattgtcctgggtagcccatgaaaagtgatattttatagagctgtgtatttttccagggaggattgtttttgttcacagatgagcaaacatcctgtaagtgctgatttttcactgtgctttccaccctgttcctccctggtgccagcgtgccaacatctctacttactggcagcctagttgaagaaacctctagagttggcccaggaggactgttttctcagtgtttagagatcatacagtgccaagggcagctgccatggcctcaagccttccctagctcagcatcttctactctttcctcttacagatggagaggcaacttcaatgcactggggaaagaaacgaacaatgacagtgaatgatgatattgcacttcttatggaccaggctctaagtgttttatgtatattaattcacttaatccccatgacaaccctaagaattgggtacaatttataactccattttataaatgaggaaacaggcatagagaggtctcatagctagtaagttggaatttgaacctggggagtaggacacccaggtctgtcctcttagtcattatgctatgctacctgctactttcttactttctttttttttttttgagacagggtctcactctgacacccaggctggagtgcgcctgggagggatgtcatctcactgcaacctccacctcccgggttcaagtgattctcatgtctcagcctcccaagtagctgggactacaggcacgggccaccacacccagctaattttttgtgttkttagtagagacagggttttgccatgttgaccaggctggtctcaaactcctgacctcctgtgatctgcccgccccggcctcccaaagtgttgggattacaggcgtgagccaccatgcccggccactgcttgttactatgtgtacattacctgcactagggtggatagaacctcatgtggcacacacatgacgccacataacacggctcatgtgttcacagtgcccagcacagaagcatgcacatagtaggtgtttatttaaaaaagttgattgaatgctgaatgagtgagtgggcactcttcactgacgaactggggtaaggcacatactccctgtttgatttcagtgtagcactgccctatagctgggcaaacaccttggtgtctccccttaggagcaygtgggaagaagaggaggatttgccatgagctttctctgggacaggagcagtttgggatgttgagatgggaaatggagtattgagaagtgagtgtatttccagggggaatggagaggtctttggagacctgcattggccatgggctscccagttgtgagtgggctcaggctctggatcaccrctgggaagatacccttctatttatttattcattatttttatttttgagatggagttttgctcttgttgtccaggctggagtgcaatggtacaatctcagctcactrcaacctccgcctcctgggttcaagtgattctcccacctcagcctcctgagtagctgggattgcaggcgcccgccatcatgcccagctaatttttatatttttagtagagacagggtttcaccatgttagtcaggctggtcttgaactcctgacctcacgtgatctgcccgtcttggccttccaaactgctgggattacaggcgtgagccactgcgcccggccctcttctgttttctgagtctcctgtgcactcagggctggctcacatatactgcaggaagaggcaggaggaggatgacacaggggactggaccttggaggatagcacatgattgcactggccctcagattttcaaccccctgcctgtgcagcagtaaccttgactgcaytgtagagactcccatccacttcatctcacccttgcccatcaggggtgtctgggaaagagaggtttctagcctgacagatctgagttccaattgcartgcctcagttgcctcacctgtagacagagcaataataatagctggtttgtagattgttgtgagggcaaagtggagaagtgtcttagggagtgttggctccctctcctaactctttgcctctcctcctctcctggaggccctcttcatgaacacccagctgtagggcagtgctgcactgaaagaaaacgggacatgtgccttacccaagttcagtcagcgaagagtgtccattcactcattcagcattcaatcgactttttaaatgaacacctactgtgtgcttgcctctgtgctgggcactgtgaacacatgagccatggcgcttgacctcctgtagcatgtgagctaaagagagagagacaaatgctaattaaatagtaacacaatcaaatgtgaaaccgtgaattgtgggggttgctgtggaggaagctctgtggtgttgcgtgaatgaaccacagcctgggaagccagtggatagatacttcctcgggaaagtgatttcatcctggggtttgactctctagctttgggccactggagaggccagtgtggaagattcagtaggatcagtccactttatgctatatcctgactataggctgaccaggcgcctggccaccccagggccctcaccccgcctccaacagcctagaccgttccttgagattacccatatccaaccatccacaggtgctgccgatactgcaggaaccgactgagcttggatcccacaccttacagacccggagcatcttttctgttgtttatttttgggttagctcataactcactttatcactcagccgaacagtgagccaccatggaccatsgtggttttgatcatcatacagatatttaaagacaactttattgaggtacagtttatattccatgaaatcaacccatgttaagtatacaattcagtgattttttttagtaaacttactgagctgtgcagttgtcaccacaatccagttatagaacatttccgtcattagtggggtcagctttagatgcaamagacaggagaattatttttgtttttatgggattagttctgtgctcccagcaggaagatctcattaattaattaattaattcaattagtatttactgagagcctggttgggggggggggcgcccacagcagggttgggtgcaaagggaaataaataaataaacaagtggtgggggctgcttcactgtggctgatgagcttccactgtcaagtgtagcctaacttgcctgctcaggtggggttcatggcagctgcagggcaggtttctgctttctaccctgtaactcttattggaaggcaaggcaaaggccttcttttgcaatacctggtattgcagtgaattattgactgagcagacagagagacgtgtcctcgccaacatctacaaatagctctgggctttggcaggcctggatgcaggatcttggaaaagaggagcgtgggtctgctgtttacagtgcaaagatttgacaggtgaaattggggcgagggtgcgctgagggaggaaaggagtgcaggcaacgtcagggccggtggccagggtgaatccagggaagcgggtgccygtgtgcacggtgggtgttgcttggaggctggggagtgagtgggagtatggccttgtatactagactgagaggcatttgcacttaatggagtaaacatggaagatgcaatttcagtgtctgaggaggagcttaatgattcagagctggacttcaggagattaatcttttgtgagaagataagcaagggatgggttgggagactgttgtgagggtcctagtattagatgatgtggacttgacttggacaggggcattgaggcaaggaaagaagaagtgcaggggagagaaagttctgccaggtgatggggagtgattcttctctgtccctgaggttcgtacctgcctggccatctgccttttgctgttcaaccagtctccctctgcctgtccacaactgaacttccccacagtgtgttcttccatggcctctttgtactctcccatccacttcttccctcttgttctacttctcttgcccaggaggaaggagaggatccagcgaaagagatggagagaaacagaacactgtacccatgaaaggcagtgccagggcaggcagtggagagagacttccagagagggtggctggctgtgccaaacgccacagaagtgagtgaggctggcactgaaggaggtctgggggactcacgattgggactagggtgagacctcccttacctcatcccaatcctggccctgggaggaactggggacctcggagaaagcattagtttacaacaaactggaccaagtgtgggactgtttcttctgaggacagcctcccagcctcccataggaaactgcctgcaactgctcgggacccactggtctccttcttccccaccccaagacagcccctcagggtctccacgggctcgctagagttcctgcacacagtttcaagaccacagatcaaactcacctccctgcatcctaccacagagaactctgagacccagcaaagtacctgacttgtccaaggtcatccagtgaggtgtgaccttgtgggtctttcctttgctttcctttgatttctcatcttcagttggtttacgctcyccttttattcacctcccccaaccttcccctcctccgtaagarttggaaacagagagttgatagttgaggtctgatttatagctgaggattgaggtcaaatttgtagctgaagattgaagtccatttactgagtgcctacttctaccaagcattgttttagaggtgtttacatacatcattttatttcattctttttttttttatttgagatagcgtcttgctctgttgcctaggctggaatgcagtggcactatctcggctcactgcaacctccatctcccgggttcaagcgcttctcctgcttcagcctcccaagtagctggaactacaggcatgtgcccccacacccggctattttttacatttttggtagagacagggtttcaccatgttagccaggctggcctcaaactcctgacctcaagtgatccacctagtttggcttcccaaagtgctgagattacaggcatgagccactgtgcccggccttaattcttataagaccctttcaaagtaggtgtcattaccctattttcctgatgaagaaatagaggctcctagagactgaatggcttgcttacctttgtatagttactaactggtgctgctggtttatattctctccccacgcatgtatttcttcagtcactcatatttacctagtgctttaatgccaggcactgttttaggtgctgataccatatgaataaaggacacaaaaatcctgccaagaccttctccatttgtggcttgcttgccagaggagatcggcttgttctttataaagtctcctgtgctagatgtctcagggctgggtatagcagctgctgtgtttattggctattgctgagatgaaattcatgacccgatttgctcctcagccagcaaggcatgtggacttctttctgtctgcttccgggggtctctgaagccttctgctgaaactgcccctaggcgagatagtttattctgtaaggagtgtgactgtggctccctcccccacggcttctcccccatttctttgcttttatcaccagcggtttcccttagccaccaccgctagcagaaccctgatttagttccacgatttagccctgataaaggcgagctattttggcttcctctgccctaagccccagggagaatttggactcagtgttttcacttgtcattttagactgttggccagagtttgcggaagaaggcctgtattattaatgcccttgccgggaacagctgcaccctgccaggttgtcatgtgagacctctgaaaagctcagagctacaaggcccacagctctcctgggcccactgggtcaggtgggaaatatgatcctacagaaactgcaggcagccaaggagggcggaaggcaacttggaaggaactgatcagtctcacgcaggagacacagccgtcctctgagcgcctcaggagggctaattccatcccgtgcctccaggggcctgctgtatttgaagatcttttagcctgagggattttatcacatcatataaaagacacataaaataaaaatgaagatattaataatcagtttaataatatttagagagccattattccttgtagtggtcactatcctcatcacttgaaatagttttaattttcagtacaagcctttgaagtgaatgggacttgttattgccatttaatagataagaaaacagtctcggccgggcgtggtggctcatgcctgtaatcccagcactttgggaggccaaggtgggaggatcacctgaggtcaggagttcgagaccagcctggccatggtgaaaccccatctttactaaaaatacaaaaattagccaggcgtggtggcgcacacctgtaatcccagctacttgggaggctgaggctagagaatcgcttgaacccaggaggcagaggttgcagtgagctgagatcatgccactgcactccagcctgggtgacagagcgagactccgtgtcaaaataaaaataaaagaaaaaagaaaaaacagtctcagagaggttaagggaattacccaaggttatgccaggtagtaaaggtagaggtggaatttgaacatagtctatctagctggaagctcctgcccctttcaggatgctgtgagccactagacacatcatatttctctgactcctcctcagtttatctgtgcagttggttcccactcctctctctccacgttactctgttaacagcttctggagcctggtgttccaggagggacttgaccagagttcactatctgctgagccaggggttagctgggtggatggtggggctgcaggccagaccaggagccagaaaagatggtctctggcaccctttcctttattcacggaaatggcccctcttcacctcttcgtgctccatcaaagctcctttttagtgctgggagcacaccacggagtttagagaaaacaatctaataatgttatttgcttgcttagaaaacctccaccagtcccagttgcttgcaggataaattgggactagaaatacctctgtctggagcagatgtcctgtcgaagaccatttctcatcactgcagcccttataccctgtcccacctcacagcttctccccatccctgaacacaatgggccactttcatgactgagcctttgcactgctattctctgttgggcatgccttgctctgcttggtgaactcctrttcaracttcaaaacccaggatgaactttaccttttctgacttctgacttcctctagtagagttggcaccacctcctcggcccttagtttttaatgctttacatgattttccacccactagtttatggtcttttctctaagacctcagcagcaggagctgggccctatttatttctgtatcatctgtatttggggcatatttgtgtgaacaaatgaatgagggctcattgtaaaacaaactgtatataaagtgtgagtcacaggtggccccactttaactgaaatgttaggttaggttgggggaattcagagaaaggagaggtgataccctgaggcctagcrttattgattagttgaccagtgagctatgcactctgcctggagcattactgcaaatgagcctaggacctattgagagaaggtcccaggggtgaagtaacagtgggaggccttacagttgggaagtgaagcttaggtcttccctgttctccaggccagactcaaactctgtgcctgatctgcttcccaagagaggaactccttgggcagacctggagaaaaagtggggattttggatggtccccaaaggagggtaggggtagaagaggagtcgaaacagagacaggaggaagtccaagacaaactttccttccttaatacatagtgctcgggggcatccttctggctgtagcatctgcgtaatagctgctcctaagaatgcaacgtgagctgaattcaaacatgaatttggagccagtacctgaatatgtgggttgttctatgccaccgggccccctgcctgtttaatttctccttcccctgctgccaaggcttccgagaagttgctgtgtaggtgcttaatgcttcggagatggtcaggtatgagtttaaatcctggtctcgggcactttaattgctaattgtgtagcactgagcaaaaataatagggatgcagcttttatagcaccaatcaggtcagtgatgttggtgatactgttgagagcttrctatgtgccaggcattatgctaagtggttgatgaccattatctcatttattcctccgtataccctacaggcagatgctgtcatcattctgaaattccagatacgtaactgaggttcagagaggttaagtaagttgcctgaagccataaaacaaacgatgatggaatcagatcatggatcctgatatgtcacaccttaaccattgtgccattggtctacaatttgcctgatcctaagaatcacctgagactcttgttaaaagagcaattcccaggccctgtctcagattcagattcagcccagctggggtggagcctggggagcagtggatgcagcgggcaccctggatgatactaggatctggcaagtttaagaaacgctatattgtgccttcctgcctgtaagttgtggctcatggttggccctcaagaaatgttagctgttagtattataatataaatgaattgaaaggacagcttattgtgaaagaatatacgtctttaaaaagcttattagtcctgacactagattttaaagatagaggtcggatgggcgcggtggctcacgcctgtaatcccaggacttttggaagccaaggcaggtggatcacgagatcaagagatcgagaccatcctggccaacatggtgaaacccattctctactaaaattacaaaaaaaaaaaaaaaaaaaaaattagccaggcaaggtggcaagtgcctgtagtcccagctattagggaggctgaggcaggaaaatcacttgaacctgggaggtggaggttgcagtgaggatcaccccactgcacaccagcctgggtgacagagactccatctcaaaaaaaaaaaaaaaagatagaagtcaaggggaaatagattctggatcaatgaatctatactctaatactctaaactcaaaactatctgcaagtgggatgtgtgcctttataggtccctgtcactagtggtcaagcaatcagtgccatcacgtgtygggtgtgatggctgagctgttcttcagggacccaktcctcagtcagtgtctgctgtatacatgcagctgcagaggacatttgtgcactgaggagggctttgggtgtgttaatattctagaagaggtggagtagagcagctatgcaaagcaaggaagaaggcaggaggtgttaaaagaaaaactttagagaaaataaatgtagcaaagttcatctgagcaaagaaccatgtgtgaattggrcagcactcagaaccagaagaggttcagagagctctgctgccrcagtgaggacagtgagcttttgtaggctgaacgtggaaagaagrctaagaaaatatattttattagagtgggaagaccctagttagaggttagttggtggtttctgattggtgaagcctctagttacattttactgtttacattgatttggattttggtttgcttatgtagaagctctggttatggagacaacctcaggctaacggcctccttcttatttgctttaacagagggatggcagaggtagaagacagcagatatttgagggccatcactactgccttgtaccgtgggtaacctgcatgaagtcttctctgtagcttcagagcatctagatccgctgtcatgccaccaatacactaaggcacttcattttcctcagggagactgatgatgtcttgttatctcttattagcattccaagtcttatcttatttttgaattctcaaggtccatttttgggcatataaattactgaaggcagtcaggaaatattgttccatcagagctgggagaaagactcaacccttatcctggtccattgacctatttccaacctcagctttgatgacaaaactcagcagaagctttcttacagactaagagcactttataaracactgcttaaagctgaaggaaaccctctgaatgaccacccttgaatacctcctttactaagacccatgattatctgggagttagaatccataataatagctgccactgtgcacagtgattgtgtgctgggtgctttacatctattttctcatttaattctcctaacaactctatgatagcagtcacgctatgatacaggtcacactggtattgtttcacaaatgaataaacgggcctagaaaattcaactagatttccctaggttagcagtggagttggacttcaaacctaggtctgtgtagctcacaaatgaacacttattatgcttataccattttgcctcattagaataataggaagtccttccttttttggtgaggaagaaatttagagattggttaccctgactggtgatacagagcaaagctatgtacaaattgcatcaaagggtggcagatccctacattcccatctaacatcacatcattcctaacctttttccatgtggataagcatgaccttagtcaagtcatttcttagtaagatagattgttggttgctcgtgactctcagtgaagacccagtaatgccaagaatcatggcagacagttagggggaatatgtatctkcaactatggggcagtatggcaaagatattgagggccaggaatttgactacttttgaggagcgatgacaactgagtacaggaagtgagaggaagggagcatgtaccgtgtatcatttaatcaaccttgagcttgagaccaaagggaacataccctaagtttaactaggatgggtttatccagatataatggcatcacatcgtaaattgaaaagtgtctgtgtgtaattctctctgtcttatttcttcgagaaggagtttcgctcttgttgcccaggctgcagtgcaatggtgtgatctcggctcactgcaatctccgctacccgggttcaagtgtttctcctgcttcagcctcccaagtagctgggattacagtcgcccgccaccatgcccagctaatttttatatttttagtagagacggggtttcaccattttggccaggctggtcttgaactcctgacctcaggtgatccagccacctcgtcctcccgaagtgctgggattacaggcatgagccaccgcgcccagccccaattctctctttttaatagtcatctaattacatttatttggctgctttgttttctgtctcaggtacgctaagtttgtctctcaaaactctttgtgggcaggaattgtagtttatatggtagtgatggttgtattttaatttcacagagtgtctagcaggtaataattagccaataaaatgtttccattcattcaccaaatatttactggatagttaccacggtttgggcactggacataaaggtgctagggatacagtgataattattacttggcagttgaaatgcttacggttttaagggaagacagacatgtaggcacattaaaatgacattttaatttgattagaatataattgagatttaagtaaaacttattgggaactcagatgggaaataatgagaaaacaaagagagggaggcagatttaagaaatattctgagagtagaaaatagaagcttgcgacctattcagttggaatcaacactgtttataggattgctctaggggcagtgaggcactggcgtggacagtgatccaggggcactcagggtgagggatgagttgaatatgaggtgagaaaaaagggaagttgaagataccaagcttagcaaggtagtaagaggtggagagaggaagggaggggattataatggttattatatagggagtgcttattactatgtgcaaggtaattaacacgaattgcctcattttttcctcataataaaagaagtaggcacttttggggatacagacactgagagcagttgagtagcctgtccaagatcagacctttgaggagtggaggagttaggtttacgcccaggaatccttgctccagagtaaacagtcatgcagctgggtggagaaaaattccactagctgatcaagaacatccgaaaagctctcatgctgataactcccaaatatggatctccagctcacaccttctccctgacctctagactttcctatcrggcttcctactttacgctctgtttgacagtctcatctcaaactcagaatatccaaagctgaactccagatttcctctgcccccaggtctgctcttcctttgtctcctctttttccattaaagtagcaccatccgtctagttgcttgggctccaacccttggaatcatccttgactcttctctctctcacactcacatctaaaatatcgggcatgattttcaaagcacgtctaaaatatacccacttctctgcctccactgcaaccagctggtctaagccatgagcatcgctcactgggactgctgctgtctccttactactatccctgccccctattcctgttcccacatggcagcctgagcaattctggcatattaagtcagatctggttgttcctctgctcagcctcctgcagcagctcctattttatttgctaaaagccagagttcttgccaagacctcaaaggccctgcccagactcctccacctccccgacatcgttgtttgttcctcccggaccccgtctccatgtaccctcttccttgatcctttccttccaaccagtgcacaccagtgcactcctgccttgagccttgccgcaaacacgcttccccagatattgtgggactcattcctccactatctgcaactctttgttcaaatgtccccttctcagtgagttctcctctgactgccctttggaaaatggaaacctacctcaacccagtacttccgatctcccctttctttccttcccttcctcccttccttccttccttccctccctccctccctccctccctccttccttccttccctccttccttccttccttccttccgtccttccttccatcctttctttctctctttctctgtctctctcttttctttctttctgagatagggtctcgctctgtcacccaggctgaagtgcagtggcacgttctcggctcactgcaacctccacctcctggattcaagtgattctcctgcctcagcctcctgagcagctgggattacaggtgcccaccatgacacatggctaatttttgtatttttagtagagatagggtttcaccttgttggtcaggctggtctcgaactcctgacctcaagtgatccgcccacctcagcctcccaaagtgttgggattgcagacgtgagccactgagcctggccctatcccccctttcttgtactctactttgttctctaagcacttagcatcttttaagataccaaataatttttttaatttgttatatttacggctcttagtgtctccctctgctagtatgtaaaactctaagggtgttgatcttcatctgggttattcactgtagtatcctatgcactaagaattatacttagcacttagcaaatgtttaatacattttttttttaaagtgagtaagcgtagaatataaagcttttgtgcaggtctctaaaagtttttgaaaggatatgatctgaggctaggcactcccagcactttgggaagtcaaggtgggtgcatcttgagctcagaagttcgagattagcctgggaaacatggcgaaaccccgtctcttcaaaaagtaaaaaaaaaaaaaaaaaattagctggtcctggtggagcatgcctatagtcccagctactcaggaagctgaggagggacgattgcttgagcctcagaggtggacgttgcagtgagccgagattgcgccactgcgctccagcctgggtggcagagtgagaccctgtctcaaaaaaaaaaaaaagaaaaaagaaaaagaaaaaaagacgaggtctggagtctgagggagatgtcactgggggctggtcatgtggaagcaggaatcttccccgtgtatgtgggcatttcaggactggcaggaagctggtcccaggggaggctaagctggggaggatgcctgaaaggcattagtgggagggagtttgaaaaagacccagagacgcctgtttgaaataagtattggaaaggactctttagattttgcaattagaaaggcagtttcagtggaatgatgtgaaccgacttcagttatttgaggaaccagtagaaagtggggaagtgtaagcaagtcaagagaccccgccataaggaagcagagattaggttgccgtttgaggaagtgatttgtttgaggtatttttttttagctccacaaaatatcatgtttcgggtgtgagtagggatggggtaaatgacacactaagctaataacatccaaaccagcttgtgaaacatcgtgcaagttatatctggttcataccaaagagtcgctactcagtccaggcctctatcatgcctggcacatagtgttgaatattgtattcaataaatattcaacagtaaatatttgttgaatacagtattaaatactatagaatttagacaggtccctgtatcaacaacagcaacaatgaccaccaccaccaccaccaccaccacaacaaaataacaagaatgtccaatgtagggggttgctttttgatccacttgcctttggctagtggtgtctttctctccttagcgccatattcttcagcacttttcggcagctgtatgtggttctattttggtctcctctttactgcacggcgattatgttttcaagaggcaaatcttcagggtgactagagtgacacgttatctgagttctggatggaggtaaaggaatatcacggtgagtctggggaagcaaggggacaagagagttggccaaatgaggcggaaagaccccagacttgcgatcagaagaacctgatgtcaaatcagatgcatcttatagcaagtcgagccacctctctgaaacttgaatttaaatgatctaaggtcatttcctttggattttatagaaagaatagtgtcaggagaaaaagaaaaacaaggaaccatgacttgctaaacatactcagaaccaaaggttttctttctttccttttaaaaaaaagtgatatacagtgaatacaggcttagttccctaatggtggcaaatgatgtaatgttcacagatgtcctgggggaaaacagaacaatcaacttctattttactcttaccatttctgagagaagtcaggcagactgcataggaaaggaaggaaagaaagaaggaagggagggagggaggaagaaagagaaagagagacagggagggagggagggagggaaggaaagaaaaggaaagaaagcaaggaaggaaggaagaaaggaaagaaaggaagaaagaaagaagaaagaaaagcccctaaggttagtaagtatcttatgtccctggaactacgctaggcacatacataccttaccaccttccttatccagtgaagggtattacatcagtgttttaggtaacctacccaaggtccacagctaacaatggggagagaggatacaacaagcctttgggggagaaaattgaagcccacggcccacaagaaataaagccaagaaatgtagttgcttaaagtcagccagattccccagcacccagcatagtgtcttattcttaggagaatttgagaaatatttatttatctaagggatggttggttggttgaacgaattacctgaggaaacctgaaaatgttttttgctgaagtgctgttgaaggtcctcaagatcttacggagatgggagaaacctagggggagagaaataaaatttaaattttcaaaaggaataattataaaccaactgtatcaggcagtaactgagttgacctatggaaaatgcatagcacatggtagtactcaacaagtgataactatgatatttaagggaattattattatcattaaataaatatgtttctgctgctgcttcttatgctagaacttgagacacagagttattggggctcgtatttaaaagcactttagtttttctgtatgcataatatcccatggtgtaaggtaacctcttttccagttggcagtcatgcctagcttctcatacctctgctttagttcctstttgtggtgtcggcacagtaaaatttatatatggccatatagcctatatgttaaagaccatcccaagtatctcctcagtggtcaggcatttttgtatgatacagaagcatacactttaattgacattggttgtggtggtaattaacttaaaactcttcgattagacagtgaacatctttgtatcctcagtaacaggatttctgttctcatagacgacatggtaaatgtggactggatgatggttcagttggtttacacgtagggcttctggaagtgtctctaacgggtgctaatttgtgttggtcatggggataatgcttcctcagctctaacctgtgatttagattaacacataaagggcttgttgatcacactgacggaaaatttgaagctgagaggggtagaagctattgtatatgccagaatcgagattccctataaatttaacagcttacaggaaggactgagtgaggaaagacaggctgcaccaatataaatgtaaagacctagctgtaggctccaaataccaatggttaagccaggctgtgtgtgtgttttggggtgggggggtggtggtgggggcgggtggtggtggggttaaggattaggacttgtaagaaaagttagtgaggttatcagttgctcacactctgtaatcccagcactttgggaggctgaggtggggggaatcacttgaggtcagaagttcgagaccagcctgggcaacatagtgaaatcccatctctacaaaaattacaaaaattagctggaggtggtggtgtgtgcctgtattcccagctactagggaggctaaggtggaaggatggcttgagtccgagaggtggaggttgcagtgagctgagatcacaccactgcacttcagcctgggcgacagagccagagccagaccctgtgtcaaaacaaaaaaccaaaccaaaccaaacmaaacaaaacaaaaaaaggctagtgcacctgatttcaactaagtgagaatcattaacatgaagctactaaaaactaaccagaaactttcagtatttgcatcgtagaggtgtagtcattcctcttgttttacagtaattgggtcacacctggaactgagcttaytgtcattcttttaagagtgaggggggcaaatggaaataggcccagaggacaataaacagaaaagttaggagattcagaaaccatattatctaaagaatgattcaaagactgagactatttagcttgaaaaagagaaggtttagaagagtgccatagtcttaaaaggttgttttttggaaaaaagaacagacgtttgttagaaccaggaaatggatacttaggggaatggggaagagttcagtccaacgtataaaaacatttcttaattaatattttgctctctgcagacaggctgtcttgaaagaagggttgtcattattacagatgtggaagtagatgctggctggccactttttgttgctactgagtgggggatttttattcatcagatagaggattgggctgatgtccactaagatcttttctagctgtgatggtgtgttgctagacctcacagagcatgaagccctatgcaccatgttcgagggaacctggataacattgttggcaggctagtgggagctggcagaaagcttgagctttggatgcaaagctaatgattaaaagctttgtgtatttgacttgctgtcagcatagagaacatatcaatttgagtttatgtaagataattagtattccaaggtgcccaccaggtarcatttactatttgaaaaatagcagaataactgagggcatttgattttgcatgtcttctcccaagggatctcagggaccctgtggacctcctggatgtccttccagcactgctccagcaaggtcccggtcaacactcttacttcacaggaacccttccttatccacccttatctgtaggggcagtctttcctctgggtgctgtagccacaagctttggagttagatgagttggtttgaatcctagctctgtaccagctccatgaccttgggcaagtggcttagttcttgactgcgtcttgctctgtcgccctggctggagtgcagtggtgygatcttagctcactgcaacctgtgcttcccaggttcaagcgattctcctgccttggcctccccagtggctgggattacaggcacattccaccatgcctggctaatttttgtattttcagtagagacagsgtttcaccatattggccaggctggtctcgaactcctgacctcaagtgatctgcccgccttggcctcccaaattgctgggattacaggtgtgagccaccaagcttggcctaaagcttctcatctctatctattgaatgcaggtgactcatttccacctgccagattcttaatgatcattagagcgagagaaactgcccagcagcacagcactagcatgtgttcatgttcagtccatggtgttaatatttgtgatgataggcatagactattgatagacttgatgactatattcagtcatctgtgggtagctacttggtgtgaagaattccttggctggggctgaggagagttctctacctcacctcaaccccagccgccttctcccatccctccctcttagaccaatcccttcctacaggatgttctttttttttttttttttgatttcctctaaaaaatttcaataaagaaaataaagcaggaggtagaaagcaggagaatcgcttgaacccgggaggcagaggttgcagtgagccgagatcgtaccattgcgctccggcctggtcaacaagagcaaaacttcatctcaaaaaagaaaaaaaaaaaggatataaaccagcttctggcattacccaggagcagctgacctagatgcttgttccagtaagttctcctcactccctctcatgcttgtccgcctccccacctcctccacccctgcttccaggctgtctgcagaccgctgggccgggtttcacagtattggcgtgaatcagcttgccaggcttctrccctttgtgcttggtggtagctaactgacttttttctttttctcatgtggtcaggatttttccactgaagcatttcttttatgatgtgggagagacagatagcacctggctagttgccttcttttggacttgctgtgatttgacttttcagccaggccaggtatttattttcccttgggtggagtgtggttctcccagagatgcctcattcatgattcatttgttcagggcatacaaaaggcatttcttaggacctaacctgggcctagcggtgtggtaggtgcctgggcttcagagaaggctaggatggttgctaattctctgaaaggtcatgccctaatagaggaaacggacatagaaactgtgaggggcgctgtcttggggtctgtacagggtgctgtgggagcacagggaagggttcctaactcacactggggatcagggaggctttggctcctgatactaaatkacctcttatttgatacactttttatgtcagacttgctggttctttccacacattgagtcaaagggtgtctctggttcctccctggatggactgatacaggccatttcactcactctcccaagggtttatctcctctggcctctccgagtctcacctggaggtgtgtgttcctgtggcgtgggttccttgggagcgtgggtgattcaccggctggcctcatcccatactgatcctctggggtgatccctattcaccttgtctcctttgctgtcataactccactgctgggggcagaggtggagatgttgagcttgtgggcaggaataagttccactgagccacagagcttgactctgctcaccttcccacaatagaactcagagttggaatcctttccccagccacctcccctcccatctgaggacagagggtaacctgcccgtcatctctggggttatctccaattttcagtctccctcatctccagctgacctcccatatggccaaatcgatcctgaggttgggaatccagttcttcaaactgagcccttcagactctgctgtggtacgtgaaaacagtttcrgtatcccgccataaataccttccaaaattctaaatgtagtacatgaccattgatatggtttggctgtgtcccacccagaatctcatcttgaattgtaatccccatatgtcaagggagagaccaggtggagggaattgaatcatgggggctgtttcccccatgctgttctcatgatagtgagtgagttctcacaagatctgatggtattttaagtgtttggtacttcctcctgctgccttgtgaggaaggtgccttgcttcccctttgccttgcaccatgattgtaagtttcctgaggcctcccaagccatgtggaactgcaagtcaattaaaactctttcctttataaattacccagtctccggcagttctcacacagaagtgtgagaatggactaatacaatcatgaccttaaaaaataaataaataaataaataaaacatggccgggcrcggtggctcccgcctgtaatcccagcactttgrgaggccaaggcgggtggatcatctgaggtcaggagttcaagaccagcctggccaacatggtgaaaccccgtctctactaaaaatacaaaaaaaattagctgcatgtggtggcgggcacccataatctcagctactcggaggctgaggcaggagaatcgcttgaacctgggaggcagaggttgcagtgagctgagatctcaccactgtacgctagcttgggcaacmgagtgagactctgtctcaaaaacaacaacaacaaatatttgaggcctacttttttgagaacagaaaagcamattagacgtggtccttgcccctaaggtgctcacagtccactatctatctaggycagatattttccactgctggtcagtgtttatgaggcaaactgtttactaacttgcctaacactgcctgtcccgtgcagttcttcctggattgacrgcagctagatcctgtgacagaggacagctgttccccgctccctcccatcactcccctcctctgtctcctggccatagctgtgggctgcaactctgacttgagtgtttgtgtccctagtgcgtttagcttcgggtgggggctgcctttgcaggtactcgataaacacctgcatggggagttgaaataacaagttcttaaaggaatctaattcgagggcacactgctggtgggccctgtttggtggcccttgggctgagcacatgctttgatagttcactctcagaaacatccagtctggttcttaagtggccagaatgacccgatggagttaagatttcccgtttttggcatagggtcacctgtacgtctttcattctaaacaaaaaagtcaagcatgtcttgtcctgttctctcaagcgtgttagcgagatggaagacataatggtggccagagaagctggaagcaaaactaaacagaggtgcagatttgcagaagctaccccttggcatcacggggtgcagtttttctctgcttctcagttagataacttgacagagttttatttatttatttatttatttatttatttatttatttatttatatgttttagaaaactaagaggcctaggtaaataactgtgccttaaagcccttctttccamccaggagtagcagcatgctagaaaagaaaagggtgggcctgggaaactagatttgaattttggttttgtcactttctagctgtgtggtctttcgaaaatcatttgattcctctgagcttcagcctcttcacctgtaaaataatcaacccacagcrttactcagaagatttacaataaaagagaaaacctagcacattacgttatgtaagcgatacttataacaatgatgataatgataataatcatcatcataataacaattgaatggtgggctctctgctgctgcatgtaggtagacatggctctacttcgtcatcagagagggtctctgtggcctgaagcactcggcaggctccttgccttccacatatttctatgtgttgggatgagattgtcttcaatccttaaatatcaactagtagaagcctagtacagcttcaccttggaggagaaaaatatgtcgattcagctctactcagcaacttttttaaagtggagagattgagagagaaagagagagtarttgaaataatgcccacagttctgacagcctcttgatcagctgaaagcccacaagtgcaggtggggagacatgaattcgagttctctcagtctctgtagggtgagcagcttgttggtccaggtgtgatcccagtatttaaatgtttgtctttttagtgtaacatggtagtaaactgaagacaattacttcttctggtgcacatcctgatccctttcagggctggagtctaacacagctgtgttagattcactgagtgaattttatatgagtgttcagggctgtataaacagaccatatattctgtatttcataggtgattcaaagtggggggactttttgtttgtttaactttcatttactgcacatgaatagtcatacaaaataagatgttattttaactgacttcaaattcagctgtttattttttcatttttgctgtagatatttcagtatgtatatttaaaagatagagaccctttaaaaataggccggggcgcagtgactcacacctgtaatctcagcactttgggtggccaaggcggccaaggagtttgagaccagcctggccaacatgatgaaactccgtttctactaaaaacacaaaatttagccaggcatggtgggcgcctgtaatctcagctacttaggaagctgaggcaggggaatcgcttgaacccaggaggcggaggttgtagtgagccaagatcacgccactgcacactccagcytgagcarcagagtgagactccctctcaaaaacaaaaaaaaaagakaccctttaaaaataaaaactacaagatactattatcacattcaaataagtaagtaagtaagtattccttaataccagatatggagtcaatattcaattttcctcaattattatatatatatgtgtgtatgtgtatatattagtgtttgagtgtatgtatatagatatgggtgtgtatagttttaaaatagtttgtgtattcaaattaggatccrgataaaatccaagtgcaatagattgataagacctttaagattgttaaaatgggccaggcatggtggctcacgcctgtaatcccagcactttgggaggcctaggaaggcggatcatgaggtcaggagattgagaccatcctggccaacatggtgaagccccgactctactaaaaatcaaaaattagctgggtgtggtggcatgtacctgtggtcccagctacttgggaggctgaggcaggagaattgcttggacccgggaggtggagcttgcagtgagccaagattgcgccactgcactccagcctgggtgacagagtgagacaccrtctcaaaaaaaaaataataawaaaataaaaaaaaaataaagaaattgttaaaatgcaggctgtgcatggtggcggctcactcctgtaatcctagcactttgggaggctgaggtgggtggatcacctgaggtcaggagttcgagaccaacctggccaacatggcgagaccccatctctactaaacatacaaaaattagccgggtatggtggcttatgcctgtaatcccagctactggggaggctgaggcaggagaatagcttgagccygggaggcagaggctgcagtgagccgagattgtgccactgtgctccagcttgggtgacagattgagactctgtcttgagaaaaaaaaaagattgtttaataaatgcttttaatcaataacttcccacgggmggggacactgatttgaaatataatctttgggtgaggtgtgtggctgccctgtctctgtataggtagacacaggcccacaggtgcagtggccatattatcggtgcgtgtttactcccatcgcatgtaccattcctctcacaaacacctgcttcctgatcatttgtctttttaaataaaaatatgatatttgagattcttttattctctttaaatatttgaatacagagtctatttgaasgaccagtatattgaatagcagtaatatttgaaggactagtcagctgtagaagccttgacttcagatcttcacccaagaaactctgtgtatttgcttttcctgggccactcagatagacaattgtgtttttgatacagtaagagtttgcagcttagcttaactagaaataatccggatcttattttggaattaggaagaaacatgttatgatgtagaaaagcctgctctgttacctacatgatggcatagctttgtgcttttcatgctttgtggccttggaagggggtagatagagtgtaggtggttaggagttgtttcctggctaaaaataggaacagcatactgtgagacaggagcttcttctctcacaagcctctgtgcaaatagcggagggttacgcatttgctgcaggtggtacttaagctccaagaacttacggcacacctgcttgagtggatcatgggtgagctggagaacctgaagtagcaaaggcaagaaggcaacgacgttccatctgtggaaggacctaccaaccaggtatctctggtgacagggctcatctcataggtggcccactgtacatcataccctgatgttttctttgcatgacgtgctatagaattccaggctcatgcacacctttctgctctcctgttttgcaaatgtctgcactctagagtccttcctgttggccactacatacgtgtcccccgcttcttgcccctctctgcttgggtccctgctacactggtatcctgcactttccaccttgtattgccagtttgtttccaaggccatctccactttgagcttgttcatgaccacctcacacagcacacttggtctgtgtggtggtttgaggggttctgtctgtacactgtgctttggctgtgttggaggcgggcaggtgggaaggaagaaatgtattcttggggagatttgtttttagagacatgagacatggaaaatagttaagtaataatataatatgggaggcatggactatcagaggaggcaggcaggactgcccaacctcctcactgggcacgttacgctacttcctcctgacctctatagtcctttgcatttatcaagcactgtcatacgtgttatctcatgcaatgaccagggtgtcaccccctgttttgtaagtgacaaaactgtcactcagagggatgaaatgacatgctaaaggtcatctagttagtaatggtggaatcagggctggagcccagtcttctaagcctagttcctattctgctcttcatcatctgtctcaggatggtaaactgaggcctggaaaggagaaggaactcacccagcctaaagattaagggttttatgctggccacggtggctcatgcctcccaacattttgagaggctgaggtgggargattgcttgagtccaggagtttgagcccagcctgggcaacatagtaagaccctgtctttacaaaaaataaaaaaaaatagccaggtgtggtagcacacaccagtagtcacggctactcaggaggctgaggcgagaggatcacttgagcctgcgagatcgaggctgcagtgagccgcaacggaatcattgcgctccagcctaggacagagtgagactctgtctcaaaaagaaaaaaaaaaaaagattttagacagtgctgaccatattgagacaatgctgactggtgagtggggacggagaaataaagaactaacattgtgcagaactgtgttctcagccagtgctatctaatggaaatagaaagcaagccacaagtgtgggctgcatacgtagttttcagatttgtaatagacacattaaaaaagcaaaaagaggccgggcatggtggctcgtgcctataattccagcactttgggaagctgaggcaggaggatcacttgagcccaggagttagagaccagcctgggcaacaccctgtctctattgttatttttataaaatttaattktttaaaaaatacgggaagtaaaaagaaacagatgaaattaatttaaacaacatagaactacacaggggttaagggcactagctccctgtgcagttgaaagtccatgtatattttctgaaagtagactctgaaaaataagaaaaagaaagaaaatccacgtataacttttgacggtccctaaacttaatacgaatatcctgttaaccagaagccttactgataacataaaaaactgatgaacacatattttatatgttatgtgttttatatactgtattcttgtaataaagtaagctagggaaaagaatgttaggaaaatcataagaaagagaaaatgtatttattatttagtaagtggaagtggatcctcataaaggtcttcatcctcatcatcttcacattgagcaggctgaggaggaggaagaggagggattgggtttgtttcaggaatggcagaggtagaaggagggcgagggggaggcaggagagacaggcacacttagtgtaacttttattgaaaaaatctgcatataaatggaactgtgctgtttaaggatcaactgtattttatttaactcaatatattcaaaatactcttactttctcatgtaatcaatataaaattacgaatcatactttctacattcctttttccataagaaatcttcagtgtgtatttttacacttacagcacgtctcatctggcctagccacatctggctagtggctgttgcattgtggagcccagttctaagcattttacgtatattatttcatatagttcaataatcacgtgaaaagtttattacagaactatctaatggttgaggaaatgaagcccagagaggttaggtaacttgcctggggggcacgaagctggaaagcaacagaactggatcctggcctctccctcctcttcccactgtggccaactgccagccgaccaggaagggggcccgggggcaatgcaggggtatcttatttccaaaccattgttaaacttgctcttgtggaggcagctggccctggggaagtaaagggaatcctcctttttaaatgcatatgcgaaagttaagggaatcctttcactaggcggtaagcctctgtctagggccgtgggaccattaacaccactcgcctcgtagaaggtgtgtgtcattcaaggtgataatgcataggaacagctcagctatgtcagggccaggccattatgggtgctgaataaatgtgtttctgtcccctatgctaaggcaagacatccggggaagaagtaggcccggatttgtcgccttgaaggaagactactataatctctttttttttttttttttgagacggagtctcactccgtagcccagactggagtgcagtggcacgatctcggctcactgcaagctccgcctccctggttcaggccattctcctgcctcagcctcccgagtagctgggactacaggagtgcaccactgcgcctggctaattttgtatttttagtagagatggggtttcaccgtgttagccaggatggtctcgatctcctgacctcatgatcctcccgtcttggcctcctaaagcactgggattacagkcatgagccaccgtgtccagccaagactactatattctaatggagggtaagtggagtaggagggccatgtgcgtgctctgggggcaacaaacttggtgctaaacttgtttttcttgttttactcacaaacattatgacagcagtaaagatacacttttatttatttatatwttttttagagacagagtcctcctctgttgcccaggctggagtggctattgtagttcactgcagccttgaacttgtgggcttgggatcctcctgtctcagcctcctgagtagctgggactataggcgtgcactatcacactgagctattttaagaacatttttgtagagtatgttggccagacggatcttgaacctctggcctccagcattcttcctgccttggcctctcaaagtgatgggattcataagcatgagtcatggtgcccagccaagatacatttttaaaatgtatcctgcctcctgacacattactgttcacttgtaacaatggtcacttgtaatcatagtctgtttgcaaagcaagcttttaatagaattacaattttagtgttgaccaaaagtttattttgggccggatgtggtggctcacgtctgtaatctcagcactttgggaggctgaggtgggtggatcacctgaggttaggagttcgagaccagcctggccaacatggtgaaaccccatctctactaaaaatacaaaaaaaaaaaaaaaaaattagctaggcttggtggaggtgcccgtaatcccagctactcgggaggctgaggcaggagaatcgcttgaacccgggaggccgaggtggcagtgagccaagattttgccattgcactccagcctgggtgacaagatcgagactctggctcaaaaaaaagtttattttgtttctataaacattgtttttcatctttatagtgcatgtcttttgttaatggcttcataggcaatcgatggacttctggatcacaattttgcttrttcctatggctagatatttaggttgttccaaattttctcagcattacatttgatgctacagtaggcacccacacatttatgtttcttttctgtttttcaactattgttggttgttctgaggtattttcgtaaggtttcacttctgttttcccagccatgagtgatacatgagcacaactgttttgctattaatcaccagcattgggtgtgaaaatttactcaaagttttgctaaatttaactggagtagaaatgggccaygcatttgtgcgtacttccccagatgctttttagaacagtgcttgtgtaactgaccagagtgtcaggtgaggccatygttggcagaaaggtgccttcctcgggagaaggtgggttacacagcttttctttgcagatgaatggtgagagccaaacccgaagacccacaggtttcaagctggccatgtggcttcactaagtttggcctcaacttcccacagtggcacagaagcgaggtagaactcagtgttcctacccgaaccctggacattctgaaatgtccacagcccgaggaaagggatgacctgcatgtcactttccataccctccactgcacatagatctgtctcaggcattgaatcagagggatgtgtgactttggacaaattattttacctttctctgcctcatttcttcatctaaaatcaggtgacagcaatgtctccctgtaatattgcagtggggattaaatctgttaatacttgaaaagtgctgagatcagtgcctggcacataagtagtgctcaataactgttgtaaacctgggtttggatctcacttccattgctttctggaggcccactttggtcaaatggctgacctttctggacttcagcttcatctgtaaaatgggattatggcatctacttcagcakcatgttaggggtttaagtgagaaaatgcatttcacacagtgtcctgcacataaagggcccaccatatatgtaatgaaaaacaaacaaacggccgggctcagtggctcactcctgtaatctcagcactttgggaggcccaggcgggcagatcacgaggtcaggagtttgagaccagcctggtcaacatggtgaaaccccgtctctactaaaaatacaaaaattagccgggtgtggtggcgcgcgcctgtaatcccagctactcaggaggctgaggcaggagaattgcttgaacccgggaggcggaggttgcagtgagccgagatcacgccactgcactccagcctggacaacagagtgagactttgtctcaaaaaaaaaaaaaaaaacccaaaaacaaaacaaacaaacaatgtttttagctttattttctactctaccaaagagagagctttgttgccttatattggtgttgtaattagctgttagatctgaccatattttctgttatggtgtatttttaagtccacattctaggtttaaggccatcttgaaacaaatgggaggcaaatcaacattttcgtgtgtctgaagcttttaatgtaattttgttttggagatgaatgagctcataattccacaaagaagggatgatatttcatatacttattagtttagtgatttccctcccacacttagtgtcaaactgtcaggtttatggaagctatcaaatgtttctttatgctcagcagcacagatcaaagttgtctacatgataaggtaaaaaacatattctttaggaaatgcaaagaaatgacccaaaagacccttgagcacagctcattcctctccctggtctgtccaactttccctcaggaaaagtcaatgtagtcattatgtctggaaaatgccaaggacttctttccctcattttttacrtggccttgcactctgtgaggcattgsctgggaggttcattgtggctttcttgccgctaagcatctcctctctgccaacatctcatcaattcctgtctgtgccaattacctttgcttaggatttggggtgaggaaagttctgtgatttgtctgtttctgtttctgggtaaaatctcaactctgggcgtatcagcagaaagggttctgaaatgtcccttgattcagatgattctgaatcaatagcatgtatgtgtgtgtgcataattacccttacccagaaaattctccattataattctttaaaagcacaggttcacaaattattagaaagtatattttgtatactatttacggtagcaaaatatcaaatgcaagaagcaagtttaattaaagataggcaagacattttactgaagaatataaaacattagtaagagaaataaaacaatggcttatgcaattatggaaactgacaattaccaagatctgcgactggcaaggtggaggcccaggagcagcaatggtgcagttccagtctgagtccaaaggcctgagaaccagggaaagccaatggcgtagttctagtgcaaatgccagttggcctaagkcctttcagtttgagtccaaaggcagggggaaaaaaaccccaaaaccaaaccaaacmaaaacaacaacagcaaaaacaatgccccagctcaaggcagtcagacaggaggagctccctcttacctgtgggaaggtcagcctgttttactgtattcaggcctttaaccgattggataaggcccaccgttagagagggggcaatctgctgtactcagcctgctgattccagtgctaattttatccaaaacaacctcattgaaacacccagaatatttgaytaaatatctgggtactctgtggcgcagtccagttgacacataaaatcagccatcaccatcaatttgggggaaaattgacattttaacaaaattgaatctttcagttgatcagcatggtatatatcctccatttatttagatcttttattgctctcactagtgttttgtagttttcagtaaaaagtcttgcctatctttaattaaatttgcttcttggcattggatactttgctactgtaaacagtatataagatatattttccaatgatttgtgaaattttgcttttgaagaattataatggagaatttttaggagaaggataattgaaaatccgtcagacagcagtgaagtttaggaactaccattctggacataaccatacatcattaataaaatattccttacatccctatgctactttattattgccaaaacatttttttttcctttggtcctcgtaagggttcttagaaagagacagaagagctattatttctactttcatacaaggaaatgtggcctcagggattgatgtggtttgaatatatgtccccaccaaatctcatgttgaaatgtaacccccagtgctggaggtggggcctgctgggaggtgtttgggtcatgggkgtggatctttcatggcttggagctgtcctcacaacagtgagttctcrtgagatctggttgtttcaaagtgtgtagcaccttccccaccactgcctcttgcttttgctttcgccatgtgatgtgcctgcttctgcttcaccttccaccataactaaaagctccctgaggcctccccagcaagtgagcagatgctggcaccatgcttgtgcagcctgcagagctgtgagccaattaaatctcctttctctgtaaattacccaatctcaggtatttatagcaatggaagaacagactaacacagggagactatctgaaagtcctatgactagcaagtggcagagccagccccagagcccaggacttttcctaagagagaggtcctgcttctgataccaaagtttttctatagaaagatggccttttataagcattactgagaagatacctccaggtgcccaggaagaatctcctgcttgtagcctccataggcagtgtaggaggaagggaagaaaacagcagagtggaccaaggtagcaatatgyaatacactagagtcgggagcgagaatgatgtcctgttagcttatacggcactttcgtgctattaagaaaggatgccctttcagccagkaccagatgccattatgcagtgaacaacttgtacagtcatatgtgacatcccagagagaaaacaacaaatacagaaaccttacttattcaggaattaattattgatgaggaagctaaattggtgtttctttcctttagagaaattgattgaaaatacttcaagatgattcaaagctaaaagagaagaaatcatctttctttcttctcccttttacaacctttctatcttctatcctttctctttctcctcttcttcctttcattactcagcacttattgagtgccagggcatgaaaatgcagagataaatgaggtggcatctctccctaggagcttctaagtcttacaaacgtttttgactgccaccatcaataagaagtacattttatggtattgcagttttttttttaggtctttcttttttaaggtttttatatattgaaacatttattaatgaaatgatgagttcaggatttgtttcaaaatctagggatataggcgtaagtggggtatacacaaaacaggactgaccatgagttgataatactgaaactggtcatgggtctgtggggttcattatctgtcatccatgtttctttttctttttctttttttttttttttttttttgagacggagtcttcgctgtttcgcccaggctggagtgcagtggcgcgatctcggctcagtgcaagctccrcctcccgggttcatgccattctcttgcctcagcctccccggtagctgggactacaggtgcccgccaccatgcccggctaacttttgtattttttagtagagatggggtttcaccgtgttagccaggatggtctcgatctcctgacctcgtgatctgcccgcctcggcctcccaaagtgctgggattacaggcatgagccacggcgcccggcatctgtcatccatctttctaatgatctatttgagacaaaagtttcatgaagctctactttctcttattacatgcagtggattctgatattttaaaatcttgtttattctctttttaaaaacctggtccttgtgcccaaattgcttttgagatccactgatgtaaaataatacgtattttgaaaaacactggtgtatcgagggagagagggacctataaaataattgattactgtcaaccagaaagtgctactagaatatggtcagagggctgtgggagcacacagaagggaaggaccgaccaacagggtcctggggagtctgggaaagcccttcagtaacttgcatggaagaggagacataggcatctttgacaagatggtggggggatatctgaccttgaggatgagggaagtggtgcaagtggggtgagccaacctgagttcagtatggctgcaatgtgagggctgttggggagtggcaggaaatgaggttacagatagcagcagcagcaaaagtcactagtcttctgggacagcctaaggaatttatattttatctgtgtttcagggaaccattggaggataaactgagaaatggcccagttccatttgcmtcttacagagatcattccgtcggctccttgtagatagaccagtctacctctgtggtctgatttagaacataaaacctagacccaaaggagagccagtctggaagccagatctaacctacctcatgtaatcatgtccccactctgccacatgacttctcagatctacacagaacacaaattgggctttttcaagtatttatcaaaacaaaaattatggtcactttcaggacataggaagaggtgraaatagagccaattccctgtgtgctcctttccccttttccctgcatagggttctctcatctgtagagttacggcaacctgtgagagattcatagtaatcacctacagtgtggcatttttctaggtgctttacaactattaactcacttaatcttcataataattctatgtggtaagtattattattattaatttcatagatgaggaaactgaggtaaaaagaagtaagtgatttgtctaaggtcacacatctagcaattagcagagctggaattttggcaatctggccccaaagtccacttttaaccaccattgtgcttcttgattaagtttgrtttcattccagtcatctccttagactcagatgtttgaacaaagagaatcgtgaaaaaaatttggctttaagttttattctcaagattgccaaatccctttcttccctaatgagaggaagaggaaagttttctagctgggagaaaaaggatggcttcttagaaggaagtggtattttagtggagttttgaaacatggatgagaagtaaattgctgagaaggatgagttgctagtacagccaagatgaaataatccaaccacaatctctaccaatgtttacaacagaaagctgaataggatgcaaaaaaccacatgaaaactctgaaaagtaatagcaggcaggcagagtactgggttcaaaacttgaacaatgactcacgatgaacatggatttgcagaacagtgtggaaagctaagagtccgagataactccatctttctaactagaggaagcaggggggaaaagccactggaagccagagagtgtgaggaaatccctgagaggagagaggtggaaaaagggatccacaaattggactgacaaaagtcctgggcacactacaaggtgtgcatgcatggaacagacccaggaggcacagaagaggttttgagaatctaactatgatattaacaaccacccaagtcccagacaaactcttgaatggagcatgtgacagattgactcaaatggcataccaaaagctttgaaaactgatctgacactggagctaacactcataaaaagtgagacagtactttcagtctgaacctaagtggattaatttcctggtaaaacaaacaaacaaacaaacatttttcagatgatttttaacaggattcagagtctcacarcatattaaaaaatccaggatacaattcaaatttactcaatatcaaaacaacctggaaaatctaaacagtactcaaaggaaaagacarttcaataggcagtaacactgaaatgacttagatcgtgaaattattagacaaataaagtaggtatgaccattctccactcttgaaattagaaagttcttgaaattaggaaagatagaagttctcagcagagaactagaaactgcagaataatcagatagaaattttagacctgaaaagatgatatgggcccagtagcggaataaatataacagagaaaagagtcagtgaacctgaaggtagatcaatagaaagtatacacaatgaaatatacattatgaaacaaaaaaaattggagaaaaatgaaaagcctttcatggtactgtgggacaatgtcaaaaggctgaaacttcttggtattggcattccatctcagaaggtaaaaagaaaaatactgrtgcagaaaaaaatatttggagaaagagtggctgaaatagtttcaaatttaaagaaaaacgtatcttcacaaattgaagaatctcagtaatttcaaacaggatacatttaataacaactcctcagccacctcataagaaaacttctaaaaaccaaggattaaaaaacattaagagcattaaaatatgacacattatacgtaagaaaagggaaggaagaaaagagaagaaaggaaggactcaagaaagagagaaagaaagaaaaaagagaaaaggaaaggaaggaaggaaggaaggaagaaacctattcgaatgactgtccatttctcatccaaaaccatggtggccaaagacgaagacagtgaaaccccgtctttagaatgctggaagaamaaaaaaactatccacccagaattttatatccagaaaaaatattctttgggagtgaaagcaaaatagagatattttcaggtgatggaaaaccaagaggcttcatttccaggagctctcctcttaaagaaatactaatggaagtttttcaacctgaagggaagctgtactagaggaaaagttaaaacttgaggaacaaaagaagagcaggagaaataataaatatctaatacattccccttgataaaaatacacacaaacataaatctcatgacatgggtaactacaaactactggcgatattttagatttatttcctttaagtcttttttttctgtgaatatgcgtttctctttttcttttttggtttttctctctctgtctcttcctttcatgtggacatttcataacatatttaaatattcctttttgttgggatttgaggttgtttcaggttatgcatggactgaagtcaaactacagtctttggcagcatttctgataattcttttttggagatagaattactgaattaaaagaagatggacatttttaatgctttgattctatttgtgaaattgcccaccctccctcccttcttttcttctttgcttccttacctcccctctttcttcctccctttttctttcaactaagattatgtagtatatagttttataatattctttatttattcaatctatattgtgagcattttcctgttttgttaaaaagtcaataattaaaaaaacttytaagtttttaaattatttttaatggtactatggtcgtatttttttaaaggtacrtaattacatgtttatggatggaatgatatgtctgggatttacttaaaatacttagggataggtggctatgaataaaacattattgamcctgaattgataattgttgatgctaggtaacggatacatggtggttcattattgctactttctatagttttctatgagtgcaattttttattttaaaactttatctgagtgtggtggtgtgtgcctgtagtcctagctacttgggaggctgaggagggaggatggcctgagcccaggagctcaaggctgcagtgagctatcactgtgccactgtcctccagcctgggtgacagagtgagacccggtctctaaaaataagtaagtgaataaatgttttaaaagtaaaaactgtaagaaatgtttatgaatttatttttaattgttcaatcgtgacccattgtggctgggcatggtgactcacggctataatcccagcactttggtaggctgaggcgggtggatcatgaggtcaggagttcaagaccaccctggccaagatgctgaaaccccgtctctactaaaaaatacaataattagccaggcgtggtggtgggcacctgtaatcccagctactcaggaggccgaggcaggagaatcgcttgaacccgggagtcggaggttgcggtgagccgagatcacgccactgcactccagcctgggcaacagagcgagactccatctaaaaaaagaaaaaattataaccctttgtgtggacatttcataacatatttaacttgtcctctttaaaggaagaggacaagttaaattgtcctcttgggaattgaggttatttcaggttattcatgggctgacataaaactgcagtctttgcttctctgaatacttctttttttgagatggaattactgggttaaaagagaatggtcatttttaatgctttgatatatttaatcaaattgtccttcagagaagacgttccatgttatttttccatgagttacttaaaagtgaccttgtcagctctattgtaattttttagtctattaatttggtgggggaaagtgtatgttattattttaattgaatttcttttatttccagtgacattgaatccccagcctgtcactgaattggttcccacccgtttagggaggaggcagagacaagagtagaagaaaaatgakttatttattttttgagatggagttgtccaggctggagtgcagtggtggtgtaatgcccaacctkgtttttactaaccctgtttttagactctcccttttcctttaatcacctagccttgtttccacctgaattgactctcccttagctaagagagccagacagactccatcttggctctttcactggcagccccttcctcagggacttaacttgtgcaagctgactcccagcacatccaagaatgcagttaactgataagatactgtggcgagcaatatctgcaattcccaggaattagtctgattgataacgcccaaagccccgcgtctatcaccttgtaatagtcttaaagcccctgcacctggaactgtttactttcctgtaaccattyatccttttaacttttttacctattttatttctgtaaaattgttttaactagacccccctcccctttctaaaccaaagtataaaagaaaatctagccccttcttcggggccgagagaactttgagcgttagctgtctcttggccgccggctaaataaacagactcttaattcgtctcaaagtgtggcgttttctctaacttggtcaagtacaacagtgtgacctctgcttcccaggttcaagtgattcgcttgcctcagcctcctgagtagctgggattacaggcatatgccaccatgcccggcaaatttttgtatttttagtagggatagggtttcaccatgttggccaggcyggtctcgaactmctgacctcaagtgatccgcccacttcggcctcccaaagtgctgggattacaggcgtgagccaccgtgcccggagaaaaaggatttattttctcttcctcgttcttcactttgaagatgagaggcaaacacagacagatcccrgattcaaatcctggctctacaacttactagttactgattttgtacctttatttttctgaccctyagattttttactgaagaaatcagtgcaatcatgaactgtgaagtaatagacatttatagagaaaatgcctggggtgcaatggtcattctgaaaatggtagcttttgttgtccttgggaagctgaggctcaggatgtgaaacaacctcctgctctttttcagaggcggcaaggagctcagagctgggttccttcacacagggaaggccccttgcaggaactgctgctggtatctgcgtcattaattctttaccttttattcttccaggctcctgtaaccatttatccttttaacttttttacctattttatttctgtaaaattttatttctgtatcttccatgccctgctgggcatgaaggcagctatcacaggccaggaaattcatgttagggaattgggtcatcttagggaactaattcaaattgctaatggtatttatttgattcagtggaaatgcaccttgcagtacttgattcggaggactgggttgaatttcgggagggtttgtttgacattgtctcatcttactctctggagcaggattcagacctggaacgctctctttccagggcaacctagccaagctatggtctctgcctcaatttattgccctttccccaggactcacatcttcctccccactcactgtttgcccaggctccggtcatctatgttagtcgtgctcttgctacacatctgccacctctttcagaaggttgagagcagccaaaacagaaacgggaactgtggctctcaataaactgtctgctcgcagaccaagagagaagcgggagtgctttgtctgtatttactgcattttttttcattttttttttctttttttgagacagggtcctgctctgtctcccaggctggagtgcagtggcacgatctcggctcactgcaagctccgccccccaggttcaagtgattctcctgcctcagcctcctgagtagctgggataacaggcgtgcgccaccatacccagctcatttttatatttccagtacagacggggtttcaatattggtcaggctggtcttgaactcctgaccttgtgatccatccacctcagcctcccaaagtgctgggattacaggcaagagccacctcgcccagcygcactttttaaggttatttgaacaccragcaattagtgcttctgggcccaggctmacagatgaggccagaaaaccccaccacactctctcagtcctgagcaagggtgctgctgatcgggcacagagccatttctcctgaaatcaagactgggtgccaggccgtagggctgccagcctgccygtgatttctctctgggaccatctcagtgatttcctgttttcttcccctgagcacattcagtgcaagaggtctaagcatgagggtgggaggtgcggtgagtttggcctgttttccaaatggaggggaaatccagggaagtcagcaggcttcactgtgagtcgtcgggtctaccagcgtttcctatgtcaggccgtgagcacctgctctgtggaaatgaaagcaaatcttctccaccaggcaggggctgcagagggctggcaggggtgaggtggaagggctcagggagaatttaacaatgttgtgttttcatcttgatgatcacacaaaaatgattctgtaccagtcacgaagacttcaattcataatggaggagacctttagcgtcttaagtgtttcttgaacactgtttctttttcctctttaaaatgggagctgacttaatctgtaagccttatttcttatggctctatagaagtgatgaaataacagcactgtctggagagacttaaaataacaaacatttcctctgcacagtttaaagccttctcccatctattacttcccctgtgctttcccataactctgtgaaatagggactattaagcccttttttcacatgaggaaacagagactcwgagaagataagtgacttttctgaggacacacagtgatttggttggagagctggaggacctcacatctgtgccctggtttcaggctttttctattagttcagtcttcacagtgacacacccttgaccctgcctcccacgagggtcccacgttcctattctctttgctgtggagcagtgtttgaaatagctaacactaaaagtggcaactattgttttgttttgtttttgtttttgagacagggtcaccctctgtcacccaggctggagtgcagtgatgcaatctcagctcactgcgacttccacctcctgggttcaagctattctcgtgcctcagcctcctgagtagctgggattacagatgtgcgccaccacgcctgactaatttttgtatttttagtagagacggggtttgaccatgttggccaggctggtctctgactcccgacctcaggtgatcctcccaccttggcctcccaacgtgctgggattacaggcatgagccaccgcacccggccgcaaatactggttttgttgagatgaacatcaaggtctcgtgtttagccaaagataaatactgattcatgacactccggaaaatttcatctcatccttgaaaatgaagacttttcacacccaacagcggtcaagccgggcctcagccttctgaccctcctcccctgcttcctggcaggtacaggtttgccagctctcatttattaagcacctggcatgtgccaggcactgcacaatccttacttctaaccctcactgcagtcctgtgaagtaggtgcttttgcacacattttacagatgaggaaactgagaccccgactgtcatgtaatttgcctaaaattgcatgctgattaataataaagccgggatccaaatctagatttgtctgactccaagtcttggtgcaaatgaaattcagcaccattcctccaaactgagccttgtctgagggtcttttgccttctcagtcttggtctttggtcccctttagttttttctgggcccaccgttttgagctcccagttaccagcctcttgattgaattgattgacctggatggatgtggtcaaaacaggcaacttcacagctctgcctttcccaggccagcactggggtgaggtgtggggagggcaggcagcccaggggcagctctgttccttctttgggcctgcttcttacatctccatcctcctaagtccacattctgtgcttggtcagcatgcaggagttgggactgttttgaggacttgcttatgggttgtggggagggaagggcactggcatgattgcaatacattcctgggcaagacatctggcctctcccatttgcggttccttcatctataaaatgttaacacagtgtgtcaaaatgttgatgttctcgagtgacttttcctgagatctttgccaattctcaaatcaacatccttatggtcattgttgccaggatctcatttattgtgtacagtagcctaagaggaggcattttgttcttgcttgacacatgamaaaatcacacacatgccaccagagcacataattcccccttacaccrtaaatacaatcaagcacacctgaaaatctaagtgatttcttccttattgattccacgaataaaaggcagtagggatttctaaatttgttaaaggaaattcatcactgagtgtaaattctccctaacatggactagcaattttgtttctctgggagccataattcacaagccaacaggtatttctgtcacttcctaatacatggagggtacagcatcccctgcacactgggttccagcctgagtgtgaactctcttgcgtacgaagggactggcccctgtgtgcttcttactgcacgcacttcataattactccttagcagacttaggctgtttcatgtctaggaccttcggagttattctcaaaagtaaaaatcccaaatgttgattctgtaaataccaagggtcaactataatattagcaatgatccagggctgctggaggattcaatgagataaaatgctaagtgtccagcatcctaagtgtgctctgggcttgggaccttgcacattcactgaaaatcactgaaattccagggttaggtgggcatggctttggctgaaagagtcacaggtcaaacaagatgatcatcttagtacaggcattaagagtgcagtctttcctgggtgcagcagctcacgcctgtaatcccagcactttgggaggccgaggtgggtggactggttgagcccagggggttcaagaccagcctgggcaatgtgatgaaacctgtttctacaaaaaattacaaaaattagatgggtgtcgtggtgtgtgcctggagtcccagctacttgggaggctgaggtgggaggattggtggaggctgggaggtcgaggctgcagtgagctgtgattgagccactgcattccagcctgggtgacacagtgacaacttgtctcaggaaaaaaaaataaaaataaataaaagagtacagtcttggattcagacagttctgggttcaaaccttggccctgccatttactagcagaagtcctttaacttctttgagattcaggtttcttatctgtgagatggaaaggataacacggtaccggctttggaggactgtggtgagattgaatgagctgtcggatgtccagacctggcacagtgcctggcacgtgggaaccccctaggaggcaatcacagtcacttttcatccttcctttctttctgtacagagccgcagacccagcaggtgcttcatgcttgttgatgatttcagttcctgtctaaaaccattttcttgtttacaaaataaccatcttccaccccaacacacaccacaagcccccgcggtggatgccagccagacattctattcatcaagcgccacttgcctatcctgtgcttggcagtgctaaaaaggagacagagaagggatataatcttatttttctgactggaaaaataagtttcccacacgcagcacctggagaagagtgcgggagtgcaggagartgtgtgtgcatgtcaggagtgtgagtggaagtcgacactggtggaggactcctcactgcaggatctgagaagcttcctccagggacatgggctggatctggggctgcctttggggacctaaagtgaagggaaagagtaatgcgggaggcagttcgaggttgagatgaaccattgagtgatgacttctgtggatctgtcccccaaagaaaaatgtccaaacgttggtcaacatgctccattaagcacccagaaagtgcagatataaaatgttcttcagrtgtggtaaggaggaagcaaatgtgaaaacccccagagaaccagcccctgcctcccaggaggcaatgatgtgggccaagagcagaagttgagttctggccttggcctgggattgctcagagggtagcagcccctttgcccaagagattgagctgcagccgtgttgctgcctcttcatttggtgaccaaagacaagacaagatcaccacgtggggaggagacagaagtgaaaggcccacctcaatgcaagggtgattagctctttctccagcagtactgactcactttggcctactaatcaatgtgaattcttcataacaggcgatcccctttgagtccaggaggacagagttgatgacagtgtagcctgaaattcctggggccctggattgaagctgtggccctgccatttcctcagtaactctgagctgttattgggcaacagacttcctaggttgtggaggaggctgggttaactggggactttaaatgcttgagccrtgtgttgactcattaactatgtctaccctaggctgaactggtgttgcccttcccttcccaggaaaggcctggcctctcccattctgcccaaggaaaccctctgtgaacttttacattcttccaaactattytgatgtttattggtctggatccattacatcagaagctactgagggtaatatcaggcatctatattttaaaaatgcttcctaggtgatattaatgcccaggtaagatagagcaacaatgttctaagtggttcccttcacctacaccactcaccttcatggctgtgagattaggggtgggagggcaggggagggttacaccaagggccttgaagctctcaggacagacttgaacaacctttttctcctccatgttcccttcccctttttctttgtagggggtccatttggccttggacgggttctagcaatgacgtcagtttgttaagacgagcgaggtaaacagttgttgccttggtgactttaaggagaggtagttgcacttcagtgattctggcaattagaaaatgtcaaggaacactggctcagacttcctcctgcccagattgataacacgaaaaccacgacggacatggttggaaagaacggccgcctggcgcgatccccagccctggaattcctggaggacatgatatttaagaagacattagtagacattgtcctcactaaagacagagttaaagtggagtttgaatmatcagacccacgttagtaggatttcagaggaaatccttatcttcggtatttcagtagaaatcgttcctgttttgttgccatttggttctcctttgcaacttagcatgtgagaattccgggcagcctgattccttgcccatctttgacagctctgctgctgtgtcccgggggaggcaggtttccaacataactgctactctgcctttgcctggtgagtgctgagatggagaggcaggctggtatctgtttgatctgatactccagaaaaatcgtaattttacattgtttttttcctgatttctaaacacatgaaaccagattcttctggagaaacatagagtgccttaattttgcctagttaggggctgttgggggtggtttttctaagcacccttctgtgtctagccaaccagtagaacctgatttttgggaggtgaattagccagggttctctagagggacaaaactaataggatagatgtatttataaaggggagtttattaaggagtattgactcacacggtcatggaactatgtgaggtcccacatagtccatctgcaggttgaggagcaggaaagccagtccgagtcccacagctgaagaacttggagtctgatgttcgagggcaggaagcatccagcacaggagaaagatgtaggctggaaggctaaggaagtctagtctattcacattcttctgcctgctttttattctggctacaatggcagcagattagatggtgcccacccagattaagggtgggtctgccttccccagcccactgactcaaatgttaatctcctttggcaacaccctcacagacacgcccaggatcaatactttgcatccttcaatccaatcaagttgacactccgtattagccatcacaggggcatgctaagcaagaattgtgtctatggctgtaatcacaaagttacgattattggagtaagctccacaaaccagagtcccttgtccagggcctccagagatccaccagacacttgagtatctcgaaaagccagatgggagaagcacgttcaccacggcaaacctgcgcagccaagaaaatcaagtttctttgttttatgctaaacttttatcaactgactgtggtagtcgtggcaatctcatgccattcagaacctctgattggcaacagtatctttgttcatttgataacaaataactcaaattttaaattaaagwtagtcgacaacatctttcaaaatcttggaatcgtgtcgggggaaacaaaatacaagagatatgatttgatgtgaaagaatttaggacctcttggctttgattaaattagggtgtgcttctgttgtttcactgggattgtgaaatgttgggatgaggagatatgaaaaatctatagctgaatattctgttgatggttttaaaccatagaaataaatattcaggaagtctctattgagtagctctatagggtaatgctagctgctagagcaaataaactcacgtcttaaccatcttggcccagaagtgatgtatgttatttttgctcacatttctttgccaataactagtaaaatgatcccatctatatgctgtgtgtgtttgtgtgtgtgtaaaatgcaatccctctctggacagtaatttacagcaataactatatggcagaaggagcaaacttcttgtggggcagccagctatccctgatatgaggaaagagaaagaagggtcagcattaagtggcagctcaggtggcacacattaagaatccaagctcttagagaaatgggagtccttcatgggagagggtttctggcagccaggacacatggascccctctcggaggcactatgccaccctctgggggcaacagggtgtcaagcactctaagtctaagaacagaaagtttgggttctaaggtccagatgagggtgaggtttgtgcactaaagattaaggagatgaagatcagggcagagtaaataggtgtcaccagaaggtcaatacagtgattagcaactgtagttggtgtgataaagcagagaggctcgcagtagcccttggaagggcctgagtagagggacataggatgaagagcactaccagtttgttggttagaataatctggtcagccgggcatggtggcttatgcctgtaatcccagcactttgacaggctgaggcgggtggatcacgaggtcaggaattcaagaccagcctggccaagatggtgaaaccacgtctctactaaaaatacaaaaattagccgggcgtggtggcgggtgcctgtaatcccagctactcgggaggctgaggcagagaattgcttgaacctgggaggtggaggttgcagtgagccgagattgcactgcttcactccagcctggtaacagagcgagactctgtctcaaaaacaaacaaacaaacaaaaaacaaaacacaccctggtttcaccatttacagtgacatcttgagcaaatgacttaaactctctgagtttcaatttctttatttaaaaaagaggattgttaataccccaccccacagggtggtggtaagaattaaatttggtaacatctataagacctgctgttcattacagttgattcttaaggcagcatccggtgatgcctttgaaacatacatcggcaaagtcttaatcagatgaaagccaaaacccctacacctgtgtaaggcgccacattatctggctgcccctgtgtaggtattttgctgttccctctactygcaaccctcttttctcagaaatctgcatggtagcctccttcatctctgttaacagaaaaaccaaattctgtaaaatattttcaagaagtttatcctgaggcaatatgagttactgtagcttagagaaaacacaaacccaagaagccttgagtgagtggccctgaggcagttgggccatagtctggttttatacattttagggagacaggcattacaggcaaggatatctggaaatcagtacatggaaggtaactggtagttctgtccaaaaaatgtgagacatctcaaagtgggggagggtgcggtgttaggatatatgtattggtggtttttttttttgtttttttttgagatggagtctcgctctgtcacccaggctggagtgcaatggcgtgatctctgcccactgagcctctgcctcctgggttcaagtgattctcctgcctcagcctcctgagtagctgggattacaggagcatgccaccacgcccggctaatttttgtatttttagtagagatgggatttcaccatgttggccaggatggtctcgatctcctgacctcgtgatccacctgccttggcctcccaaagtgctgggaatacaggcgtgagccatcatgcctggactatgtgttggtttccatgcatgtttcctggcgcatagccccatagcccttgctacagtcttgctagaatgctgggctttttagacttcagggacaggccctaagaaacagtctctctcctgccgtcctttcacctgccccaaggcaaggtttttatgttttctggcctgactgtgggccttacaaccctcccatgaggccaggcatagtggttcatgcctgtaatcccagcactttgggaggccgaggtgggtggatcacctgaagtcaggagttcgagaccagcctgaccaacatggtgaaaccccgtctctactaaaaatagaaaaattagccgggtgtgatggtgggcgcctgtaatcccagctactcgggaggctgaggcaggaagaattgcttgaacccgggaggcagaggttgcagtgaatcaagatcatgctactgcactccaacctgggcgacagagcgagactctgtctcaaaaaaaaaaaaaaaaaaaaaaccttcccatgagaggttcctaccctatgccctgggggaagaaatgctgacgtcaaggaagcttctataaaaacccaagaggacagggttgggtgaactttctgatagcttaataggaggaggttcctgtagggcggcacaaccagggagggcgtggaagctctgcatcccttctcccataccttgctctacacatctcttcatctgtatcctctgcagcatccttgatgataaaccagtaaatgtaagtagggtgtttccctgagttctgtgagccgctccagcaaattaattgaacccacggagaggggaaccccaatggaagctggttggtcagaaagaagttctggaggcctggacttgtgactggtggaggggggatgtcttggacactaagccctcaatctgtaggatctgacactatttccaggtagatagtgttggaactgaattagaggacaccaagctggtgtcgctgcttggtgttggggtgggacccccacacatatggtcacataagtcatcttctgtgttgattgttgtggtgtgagagcagaggaaagatggctacagagagttttccctacacagggacttggggggtagagggttaggggagggctgaggggccttacaagtcttaagtgcgttttagggattctttagctaacagtagctgagagagtcaagttattgtctagtgacttgaagtcagtaggaaggaatgcctgagtaagataaggaggttgtgggggcctaggtccttggagcctcatagatagcagccctctgggtgaatagatagtgattgtctcttctcagacctttgggtgtctgactctcagttagaatctctcctagatctgggaaaggcctagcaagggaagagacattaatatcgattctctggagatgcacgtttcccccaccaaagatggctttgcagtccaaaggctgtctggcagccttttccaaatatgtcaaagaaatgtattttggggcaaaatattttaatttccttcagagtctgctgtctgtcatgtgatactataccagagtcaggttggagagtaagccacattttactgggttaattaaaaaacccatttaatgagactgtattgtttctagggtatgacttaatctttgccttttatggccttaggtattgtgtatagtttggtatcttattgtcataaagggtctgtttggtcagtcttataatctctattttaccttaatgctggtcacttgtacctaaaccccaaaagggaggggtatgatgagggtgtaacctcctttctgtcatggctgggaattcagtttttcaggtttctctggggtgcccatggccaaaaaggagtccattcagttggttagtggggggcttaggattttatttttggtttacacctccttccaacccttgctcaaatgtcttcttctcagtgaggctttctctgatcatctgatttaaatctccacctcacccactccaagctgtccctatttctcttccctactctaattgtctgcatatcagttatctccttgcaaagcaccacggatttatgttgtttgantctttatttatcctcactataaggtgagtgctggaggggttagggatttctggctggcttctctactgctgtgtctgcagtctggttcanagtaggcaatcagcatttgctgaaagaatgaacctatagcttggaaccaacccaaatgtccaacaatgatagactggattaggaaaatgtgcacatatacaccatggaatactatgcagccatgaaaaatgatgagttcacgtcctttgtagggacatggatgaagctggaaactatcattctcagcaaactatggcaaggacaaaaagccaaacaccacatgttctcactcataggtgggaattgaacagtgagaacacatggacacaggaaggggaacatcacacaccgggactgttgtggggtggggggaacggggagggatagcattaggagatatacctaatgctaaatgatgagttaatgggtgcagcacaccaacatggcacatgtatacatatgtaacaaacctgcacgttgtgcacatgtaccctaaaacttaaagtataataataattaaaaaaaaaaaaaagaatgaacctatcgcatgagtattggtgtaagttttcttacaggccccggggccaccacaaagtagaagaactcaaccttccctattcatttcctcacctccaactcccttagactaccaggacttagatccttttgggtatatatatacatatatatgttttatatatatacatatatacatgttttgcttgtttgtttgttttttgagacaaagtctcgctgtgtcacccaggatggagtacagtggcatgatctctgctcactgcaatctccgcctccaggttcaagtgattctcctgcctcagcctcctgagtagctgggactacaggtgcatgcctccacgcctggctaattttttgtatttttagtagagacgggggtttcaccatgttagccagatggtcttgatctcctgacctcgtgatctgcccgcctcggcctcccaaagtgctgggattacaggcatgagccaccgcgcccagcctaaatgttttatatatatatatacacacacacatatactctatatatatatacacacacacatatatacacatatatatgtgtatatatatatatatatakakagagagagagagagagagagagagagagtatatgtgtatatattttaacaaaaaaagcctgggagaaccattgaatttgaaaccaccaaatctcaacaagccttgaaatctaacactcagtttaaggaaacacagagcagagaggagaacattaaacaacaccctgaggaagccgtgagccaggctcagaacataagccactccacaggagaaatgacttcattttttcaacaaatatatgccgtggaaaagaagaagtaagggagcgaggaactcttctagataagagagaattgaaaatggcacatcatccagtcatccaaacaaaatgtcctgtccttgtttggatccccttttgagcaggttagtgtaaaagacattattgagagaattggtaaacatttaaaggtgggttggatattgggtgatattggcattgtgatcatattgaattattatttatattcatatattctctggcagaacctggtgcgtgtgtgtgtgtgtgtgtgtgtgtgtgtgtgtctgtgtgtgtgtgtctcacagtgtagagaatctgagggtctacgttctcaattctcccaggggtggtacgattctgccaggggtggtacgtaggtaattctcgatgccatgggagttagttgatgcgttgcatacaatggaggtcttaggacattaaggcttaattttttgttggatccgcagttgggaagagctggtagcaggaaactgatacaaagtctggcgtttgctttaaattactccargaaaaatcgaagcagtgtagtaaagattaggaggtgagacagttcctctttctgaggagatggcgggcccgttttcttctttgtctggctctctgtagcataggggtgtggtgtagtgtagggatgtggaggaaagagtgggtagctgtgttgctggggaggggtgaagtgttttttccactctctatataggcccttcctgcgctctcctctgcttaatgctgatttaccaagcggagtgcaaattgtgtggtgagcatgtgggagatgcctcctggggctggggtgtgtagtggggagtgggcattatacagaaagggaattcatggggcacgaaaggcctactttttgccaggcacctgtcaaataggaaggcagatatttctatgaatacaagtctgtctgtctgtgcatggggtgcaagggtgaagacagtagcaaatggctcatgatttccctttgccatggctgtgtcaatctggagttcagagctctcctaatcagttccgagtggttggctctggtcagggaccgcagcctgacctcatggtggggacacaacaccccccaacaaagttctgttctccagactcttagaaaacctctggggaaatgtactcagggaaatgttctgaggacttcattatcagtgctgcctggctgggaaaagatgtaatctctggtaagagacccttggcaggagtgaaagccctttatcttcagggctttgctctgggcaggatctccccctccccaccatgagccatgcaggtgggcctgtcctcaggtaaacacttgccaacagtcacagcctctcaggcactgcgcgcccctcatggcttcctttctttcactgtcttctcagattcaccagctacaagtcggtttcttgttgcatatcatgcttctgacctttgctgcgcttttgagcaaaacggtgacttgtcagaaatgttttgacaaatgattaatgttttgacccatgttggttcccgcttgatagagctcggtgggtaggagctggggtggtagagccagacagcctgggcaggctcctctggggactctgtgaagcacatggtgataacagtgctcgccttgggcactgttgttgctgcaggaattaaatgagcttcaccaaattacaggacctttactgcctgtaaattacttagcacatagtaaaagctcattaattattagctaaaataaagtgataaaaatctatcattaaattgtcagcacagccctgcagaggcaaccttttaagtattgttatccttcgcagatgaagacacaaggttcacagaaactgactaattggcctaagataacttacagtacaaaagccaggatttcaatctagctttttgagactagagcctgagtgaactgtttctccaaagccaaggcttctcaaactattggtggtgaagaaccaaattttttttcccaattcctctcacatcagtagttacgtaaaatacaataaaaatggggccaggtgcggtggctcacgcctgtaatcccagcactttgggaggccgaggcgggtggatcatgaggtcaggagatcgagaccatcctggctaacacggtgaaaccccatctctactaaaaacacaaaaacaaaattagccaggcatggtggcgggcacctgtagtcccagctactggggaggctgaggcgggagaatggagtgaaccctggaggcagagcttgcagtgagccgagatctcaccactgcactccagcctgggcgacagagggagactctgtctccaaaaaaataaataaataaataaaaaataaaaaataaaataaacaaataaataaaaaagcatggattccagaatcatgaaatgagaaaaaggacatttgaaatacaagccccattttaaaaagtattgatctaacaggcataaaattactctttaaaattactgtaaaagtcacttacactccatttctgtacttttctcatcttgcatcttgaaaagctttctcagcctagcacttctctgcagatctcactttcagtagcactgttctcagcgacctgtttctcaccacttgcctgagaattaattacctggggtgcttattaaatgcagatttccaacttccccccaatattctcccaacctcccagactacttgaatcagaatgattgagacagaattcaggaacccgcattttaacaagtgattttaataatttgggtgtgctctaagtctgagaatcactgtgctcctcagtgttgcctcctctctacagataacagataagagggtaaatagtgaagtgagtgcagtgttttattccggccccccttcttgccccgtcttcttttctcaaaaaaaattttcaaaggcttcctttctgtagaagctcactgacagaaccgactttccggactcagtgcacttcaacaaacaggtattgagctcaaactgcagggggctgggtaggtggagagctgaccgcaagatgctcacaagcagtagagggtgagtataggtagagaaagggcaggtctagggcatttctgtgcataaagtggggcagaagagaaggagccagcaacgagaccagtaaggcattaccggtaaggcagagaaaagccaggagaagtataggttttggaagctaggtgaagaatatgcatcaaggaagaggaagttatggactgctgatgagctgaataagatgaagactgaacattgaccatttggttagcaatgtggagatcgtggaggtccttgtgactctgacaagatcaggttcatggagatggggaggcctggttggagtgggttcaagtgagagtgggaagatagctattgcaaacaagactatggactgtctttcaaggagttttactgtaaaggaaagagaaataaggcattttaaagaagagaaatgaggtcaagaggtttagggtcagggcagggaagtggagtttatttagaactcatgcaataagtggctcaatatatgacttctctaaagtcatatatcttttagttaattccttgagtaaaacagaaacaattgtctatcgtgacttttttcttcaarctctttaaaactctccccactcccaaactatatcactgtctaagaagaaaggagtttgaaaatcagtcttgttacatagcttaatttgaatacatccaaaaaatgacattgcattattttcatatttgctgaatctattttttggctggagtattttaaagtagatttttaaagtagatttcatctcttactacttcacatgcataggactttttctttatataaccacaatacttttatacacctaacaaaattaacaataatttcttaataccatataataaccaatctatgttccaatatccccatttgtccccaaggtgaatcaaaccaagattcagacaaggtgtacgtattacatattattatatctgygaagccatttgttttttattcccatttacttgttgatgaaaccagttcagttgtcccataggaagtcctaccttctggatttgtctgataattttcctttggcgctatttgacttgttcttctttcttctgtatttcctaaaaactggaattgtgtatgacagcttgataatatacagattaaacattttgggcaagaatttttcataggtggttagcagggcgtggtggtgcacgcctgtgatcccagctactcgggaggctgaggcaggagaatcgcttgaacctgggaggtggaggttgcggtgaacagagattgtgccactgtgtactccagcctgggtgacaaagcaagaccttgtctctaaaaaaaaaaagaatttttcataggtgcttcatgtcacgtcacatcagaaggcacacactatctagatgtctcactgttaatgatgctaaaagactgatcagggtcaggtcacggctgcttgactcacgagaggtgttttgattttgctttttaagagcagcagcgtgtctatatgttgatgggagtaatctttgagagagggatacttatcaattaaacaaaggggtgaggttttctagaacaactttcttaagtaaacaataatgtgtaggatctagtggacaagtgttggttattgcaagtgttggacatagccagttcatctatagtaatgaggcatatggacataaatgcagataaagggggctctgttagggggtttgaggaagttctaatctggcagcttttgttttctccatgaacaagtagcaaattcatcacaggagagggagattgaaaggaggaagtcaagtagtgggcgagtgccagatgaatagactggacaagtagcatgtgatttctgaaaagcattaaggacctcctggcagttagggatcgcgaacttgaagtgaaatcagtaagcattgttgtacaattttctctagccatgctcagttgcatgtttgctggtgtggagcagaacagagggttggatttaaccaggattgagttttagccaatcatgtgtgatcaaagagggcaaaggactcattttaatgattttgaccatggaatttaagctgtgtaggaagggaagtaagaatatgaggaaagtgaggaacagtgacaggtggaaggattaaccacagaagcttgttggagttggggtactagttggaataggctgcatatagacaggagtggtaattggagatgggatgcctgaactcaagattatggaaggtattgttgggaaataacaagatcagagatacaactctgggagtgagtggccgtggtcacaatcactggggtagaggagatcaaaggactgtgaggccagaggactagaatatcctaaaagtggatattaatatcacaaggagttatgatagaaacagtgttggagctaaaatattcaggcaacgaagcacggtattttgggtgggggagaagatggctgcagccaggtaagtggggtcataggtagcgctgtctgcacagggtctctgtgaggatgacatgcattgatgcatgtgatgctcttcactttgagcctgacaaatagcatgtgttagaggttcagtctaacacttgctagaggcaacaagtgttagaggttcaccatctgagtctatgtggctccagtgagtagagcttaaaacactgggtttatagttattcattttttattttattttttagacagagtcttgctctgttgtccaggctggagtgcagtggtgcaatctcagctcacttcaacctccgcctcccggattcaagcgatcctcctgcctcagcctctcaagtagctgggattacaggcgcccgccaccacacccagctaatttttgtatttttaggaaagatgaggtttcaccgtgttggctaggctggtctcgaactcctaacctcaagtgatctgcccgccttggcctcccaaagtgctgggattacaggtgtgagccaccgtgcccagctgcaacactggatttatttttacagggaagttgattttcattaactttaatatatttctaagaggcagagctactcacacagttgtgtgtggtctggggcggtagtaaattccctgtcattcagtgtatccaacaggcaaaatgaacatttgcaatgatggtgccgtcaaggtgattctggcaactgaaggtgatgggtgggtaggtgggagggagtggctgtagcaattgaaggcagtgggcagtggggagggatggtgtcaggagctagcttcattcttgcattcagacatgactgaacatttcctagttgtggcccaggagctctcaatctggttgggacagatctgcaaacagataaatgtcwcatagtttgatgaggggaagaataggcaccatggagttatgctgatcatctctgtgaggccaaggaagcttgagagtcaaggagcacttgagctggtgttggaagctgagtgggcatggccccatgggaacagcacaggaaaccacactttgctgaagaacttcttgtgcagagctgcaaaggcatgaaagagtcttcgacatttagagtgccattctacttaatctgggcaaattatttatcttccctgtctcagtttccctgtttgtaaaaatgggggtagtaatggtatccacagaggaagggatggtgactgttgtaatccctttgagtggattatctttttttttttttgagatggagtctcgctctgttgcccaggctgcagtgcagtggtgtgatctcggctcactgcaacctccacctcccgggttcaagtgattctcctacatcagcctcccgagtaactaagattacagacacacgtcaccacgccccgctagttttgtatttttagtagagacgggttttcaccatgttggtcaggctggtcacgrgcttctgacttcaagtcatccacctgcctcagcctcccaaggtgctgggattacaggcatgagccacagtacctggccgagtggattattttacttgattctgtaaatcacactatgaggtaggacttgttattattactatttctattttatagataaagatgtcttaaatcttgggtcttaaggggttgagtaacttgctcaaagtcaggtasctggtgaaaggcagtttgggctcttgtcttgataaatctgattccaaagcttgtattgttcatccctaagctatagtcagtgcttggcacatagctagtgctaaataaatggtagctattattgccaggattgctaaagtttctcacccagagagttgagggttctgttatcacttctacagctggttgaagatcagtagtgctgctatctcatcagcagcagggactatttttggaaagccctcatcacctatgataaatctagatagttgcaccacttttgtttcaattggttgatttttgaaaatcaaaaatggagagtgatttttatcttcttagagggcaaggttttttgagcagatgcagttgatgtaagggaggaagagctgggattgatgtacttttctgttgtctgtgggctgtatcaaacaaaaagtttcatgttctggctgccagctggaggatggcagcaaaccagcattcacaggcaagaggtatcatccaaaagtctggtgactgcccacagtgttttctacagggggctaagaaagagcctcttccatgagtgatgccaggagtaagagctgtgaacccgtcacccatttattcattcaacaaatgcatactgagagcttattaagtsctagacattcatctagtgtctagagatactccctggaaataatagagaagaaggttgacaagattcctatttatgaagcttatatttttagtggaaggagacagactaatcaaatactaaatgaatgcctgcataattacaaacactcatgccacaagggaaattcatgctgtgaaaatgtcagagggataactatcagagaaattttctgactcttccaaggatgctgcccagaaaaccgtccttctttgagctgatgaggagagccccaaatgttttgacacagggcagagtggcacctctcactttttccctggtagtcatacctagggtttgcctgcctgccttcctcctggtcatgaagagctggggttctcccaacctgaattcctagccttcaacagaggattttctcttggttcatggggtgaagtcaagtatgtccatatggcttcctcttagttctgttaatgctagatctcctaggacaggccttgcagccaggttaatattgtgcaccaagttgatacacaaggttgaagtgtattttttagtattgcccccaagagttttgccttaattattcaagtaacataataaaaataataaaggaagttggctaggcgtgggggctcacgcctgtaatcctagcactttgggaggccgaagtgggtagatcacctgaggtcaggagttgaagaccagcctggccaacatggtgaaaccccatctctactaaaaacaagtattagctgggcgtggtggccggtgcctatattacccagctactggggaggctgaggcaggagaatctcatgaacctcgggggtggagcttgcagtgagccaagattgcaccacttctgcctgggccgacagagagagacaccatctcaaaaacaaagaataaaataataaaggaattcaaactgataagaattaatctttcatcagtttatccgtcaatggtattcaagtctcaaccatttacattttttctagacagttggatatacatatcttttaagtcaccatctgagtatacaggtaacattttctgttttgcttttttcattwtaagattttaagtattttctcccctattactatataaattcatacacaattatataaattatttcaggtggctataccatgcttttcttatttccttattgctggatgcttagttgttaacagattttcaccttgataaataagctcgacattaaaaatttttatttttggcagtgttattaggaaagtttgtagtgcttaacatctacttcaaaaagttagaaagatctcaaattaacaacctaatattgcacccagaggaactagaaaaaaaatttaccccaaagctggcagaaaaagaaaaaaataactaaaatccagagcaaaactgaacaaaattgagactcaaaaatccatacaaagaatcaacagaaccaaaagttggttctttgaaaggataaacaagtttggtaaaccattagctagattaacaaagaagaaaagagagaagatacaaataatcacaaccagaaatgacaaatatgacattacaactaatcccacagaaatatgaaagatctttggagactattaatacctctgttcacacaaagtagaaaatctagaagaaatggacaaattcctggaaactcacaatctttcaagattgaatcaggaagaaattgaaacctgaacagaccaatatcaagttctgaaattgagtcagtaataaaaaacttaccaccaaaaaaagccctggaccagataaattcacagccaaattctatcagacatacaaaaaagagctggtaccagtcctactgaaattattccaaaaaagtgaggcagacagatccctctctaactcattctatgaagccagcattaccctgataccaaaacctggcaaagacacagtaaaaaaagaaaaccgcaggccaatatccctgatgaaaataaatgcaaaaatcctcaacaaaacactagcawaccgaatccagcagcacatcaaaaattatttcactgtgatcaagtaggcttcattcctgggatggaaggttggttctacacagacacattaataaatgtgattcacctcataaacagaattaaaaacaaaagccatatgatcatctcaatagatgcagaaaaagattttgataaaatccaaaatcctttcatcaaaaaagccttcaagaaactaggcrtcaaaggcacatacctcaaaataataagaatcatctataacaaayccacagccaatatcatactgaatgggtaaaaactggaagcattctccttgagaactgaaacaagacaaggatgcccactctcaccacttctattcaacatagtattggaagtgctgtccagagcaatcaaacaagaaaaagaaataaaaggcatccaaataggaaaagaagtcaaactgtctctctttgctgacaatatgattctatacctagaaaactataaagacactgccaaaaggcttctggaactaataaacaacttcagcaaagtttcaggatacaaaaccagtgtataaaaattcatggcatttccataaccagtaattttcaagctgagagtcaaatcaacaacacaatctcatttataatagtcgcaacaaaattttaaatacctaggaatacatctaatcaaataagtgaaatatctctccaaggagaactacaaaactttgctgaaagaagtcatggatgacacaaactaatggaaaaacatttcgtgttcatggattaaaagaatcaatatcattaaaacagccacactgcccaaagcaatctgtagattcaacactgttcctatcaaactaccaatgtcatttttcacagaactagaaaaaacctatcctaaaattcatgtgtaaccaaaaaagagtacaaataactaaagcaatcctaagcaaaaagaacaaactcagaggcattccagtacctgacttagaactgcactgtaaggctacagtaaccaaaacagcatggtactggtaccaaaacagacacatagactaatggagcagaatagtgaacccagaaataaagccacatacctataatcatctgatctttaacacagtcaacaaaaataagcaacgggggaaagaactccctattcaataaatgatgctggaataactggctagccatatgcagaagaatgaaactagatcccttccttataccatatacaaaaattaactcaagatcaattaaagatttaaatgtgagacctcaaactatmagaatcctggaagaaaacctaggaaacaccattctggacatcaaccttgggaaaggatttatgacaaagtacttaaaagcaactgcaacagaaacaaaaattgacaagtgggatctaattaaactaaagagcttttgtgcagcaaaagaaactatcaacagaataaacagacaacctacagaatggaagaaaatatttgcaagctatgcatctgacaaagatctaatatccagaatctataagaaacttaaacaattgaacaagcaaaaaacaaataacaacattaaaatgtgagcaaaagatatgaacagacaattctcaaaagatgcatataagctgccaacaaacatgaaaaatgctcagtatcactaattattagagaaaagcaaacaaaagcacagtgagataccccctcacgtcagtcagaatggctattattaagtcaaaaaacaccagatgctagggaggctgcagggaaaagggaacacctacacactgttgttgagaatgttaattagttcagccaccatgaaaagcaatttggagatttctcagaaaacttgaaaacagaactactattcaactcagcaatcacattactgggtatatatccaaaaggaaataaatgtttctaccaaaaagagacatgcacttgtgtgtttattgcagcactattcacaatagcaaagaatggaatcagcctaggtgcccatcagtggtggactggataaagaaaatatggtacatatacactgtggaatagtacacagccatgaaaaagaacaaagccatgccctttgcagcaacatggatgcagctggaagccattatcctaagcaaattaataatgcaggaacrgaaaaccamatgccatatgttgtcacttataagtgggaactaaacaatgaatgctgatagacataaagatggcaataataaacactggggactacaagacggggaaggctggggaaagagctaaaaaatgaattattcagtacctgcatggcaggatcaatcataccccaagcctcagcattgtgcaatataccaggtaacaagcctgcatacataccccctgaatctaacatataaattaaaattattttttaaaaaaacccttttcttctttgtgtgcgtattgctttatagaactcatattctttatctcattaatcctctttcatttgtcatcagaactatgtaatgtagagaatcattttacatgtggggaaactggagtatgtaatcttttgaattatttatgaattatttatttattcactcttatttcctagaagtacagtagcctggtccatggtcagaagctcttaattctatggcctgaatacattctagaaaggttacattaayttatatgatcctttgaatatatatcgatttaattataatctgtccagcaatgagtattatcatgtagaaaactgcggacgaatgtaaattctataaactagtttctcagtattctagttgcccctcttgggtttctctcatgattaaccataactttatatgcttgttaattgtgctttttattttgtgattagtctgttcatgttgattacctctttattttgggagacttttattatattaaccctttttatattttgacttttcctttttattgtagttacagtatttttcattgtatagatgttgaaattttcttgcaactgaatgtattaaacttttcctttgctattttcctacatcgcatcaaaagaagaaagagctgacaggtatatatttatatttttagctgttttttgttggtttgtttagagacaggttcactctgtcacctaggctggagtgcagtggcgctcatagctcactgcagcctctaactcctgggctcaaatgatcctccctcctcaacctcctgagtaactgggactacaggcatgcacgcctggcttatttttagctttttaaaattacatttttatacttttgtacattttttcaaagtcaaagaataatggatgtacattttagaaattttggaatatatgtaaaattataaaagatgaaaacatctattattaccattctgggtgtacttttttctagtactttttcctagtactttttcacgtttttttaaatgtattttttttctgaatttggatagtgtttaccgttttataacgtattttttcagttacaattatactgattgaactttcacatattattaaatattctttgaaaataaataattttttgaaaatctgtatgaagtttatttcaggatggacctaattactccctgtttacctccaagccagcaattaaacaacctgttcttcccaggttggtccatggtggccgctttagctttctagcccattcttatctggtgtcaagtctatttctttttttttttttttttttttcttttgagacagagtctctctctgttgcccaggctggagtgcagtggcgtgatctcggctcactgcaacctccgcctcccgggttcaagcaattctcctgcctcagcctcccttgtagctgggactaccggtgtgcgccatcatgcctggctaattttttttttgtattttagtagagatggagtttcaccgtgttagccaagatggtcttgatctcctgtcctcatgatcctgatccgcctgcctcggcctcccaaagtgctgggattacaggtgtgagccaccacacccggctagtgtcaagtctatttctaggctatctgtgctgttcacagatccagagcattgcacctttaataggcttttctctctctctttttcctgagccctggaggcttcctggattgagacctagcctaggtctgcataagcacctttccatcttgttaatgtttaacactgcctctgctggaaaacagctctcacctcctctctttctgtctcttaytttttgcctttgcagatgagttttgatcatcctgagaaaaatgggccttggcctgcagacccaataaaccttccctcccatggataatagtgctaattcctgaggacctgaagggcctgccgcccctgggggattagccagaagcaggtaaggaacacacagaggcatgggctagcaaaggggtacattcctgagtaaaagctggtgtggcagatgtcctggcagggaatctcaggatctcagtatctggctccagctttgctgttttctttttgtatgtattttttagtcctctttaactgctgattcaatgtgggtttcattggggggtgtagagaaatggcttgtccatttctattaactayataagatttaagttattctgtatttcagkcaaccattctgagtacctactacctgccacgaatgcaactggtactgagtatgtcatgacgggtgggtcgggacaggatttccttgctttgagcattgatttctgccggttcagtgttggccagttctttgaaggtgatgatgcaagtcgctgtgttcttcctctagaagcctcrtgatgattgtaaagattctctgatacaattgcatcagttcaataatctttcattgagtatccgctctggtccaggcactgtgctgggtactagggtttcagaaaggataccaggaggagttttccttgagcagcaaagtcaggcatgaaaagcaagcattacaaagcactggctggcagcaaaggggagcagggatagtgcggaaggggaggtggcctccactgaccttcagaagcagaaaggtgatgctgtcagagctggcaggcacatggacaaggagaaagagtgcagcagtgcagacacctggaggcttaacacagtctggtgtaattggaaaattcaaagcttagtgtgtttttccaaaacatytgtagagaaaagtttgctactcttttccctcggttgcgccatttagagaaagtttcttcagcctctgccttcttcagacaatttgagagatgagaaagggtcttgcagttataagtgcctgtgaccagaaactccagccacctggtggacttggagcctcaaccaagggtggtgtcaagggaccacatgagcccttatgtgagatttcagatgagtgccctgaggccatgacagagcacaggctgtgaaggctgaggctgtctgatggttgcaagactgtcgctagacccagctgtttggaggaactcttctttcctgggaaaccacaccttggagagtaggtactgggcagctgctscctgagcctccactcctgtgacagtgaatcaggcccttcctgccatcttgtttcattcagacatgtgaaagtcaggttctaagtccactatttccaaatcactcatgcaactttgaaaattatttgtatttccaaacctcactatactcagctataaatggagctcataaaatctgctgtgcttwtctcacgggagtataataggtctgtaaaaccttaccaatacggaaagtacctgagtgttaccactcagtgcacagcagggatggcaggtgcagcactgatggtgaaggtggcttgtctgcgactgtctgacagacgaagttgcctctctagtgaccttgagtccgacttgatcacactgacttctcactgtcccttatcacagatgcatgtccttgggtggaaagatgatgaacttttagagtcagacagacctgggctggaattctggttctagaactgacttgctgttgacattggagaaaccctataaccttgctaagtctcagttttttccatttcctaaaataggattgtcaatatctctatcatagtgttgtagtaaaggttcaatgagatattgcaaggaaagtgactaccacgtagtaggccctccttaaatgctactttccttcttttctctagttcttcttcagttgtcatatggtcatgtgattacctgtgttgggtgtctgcggaaattgaattccttagtttctggtaatacaacaagcttccacccttcacttcatgatcttctatctgaattmttcttccactgtgtacatttaatcatttccacaacttcagcagcccaagataggagcccatcgttcccagagtcactggttcctgaggtctgggatggtggaagcactgctttggttggtactgccaatggattccaggaatgagctggatgtcagttcatggagaattcccagggaagagcctggagctcagggctgctgagtcatggctgtggcttcacactgctgtcttcactacccgtatcacctccacatggcccccaggctgagctgctgctctcctgtctctgttcagaataccttctgtgcctttttgcttatctagttcaaatccaatgaataccatgctcttgttttgccctcccaacactctgcaaatcacatagggcagagataattattctgaaaaactcaggggcagaaatattaagtgacctgcccaaggtcaccaagaatggggataagaacccaggttttgtgaacacccagtccagtactcctactaccttttcctgatatccttaggagcgggatccatgggaagggacctcagacccctagtgggttagcaaaaccccggaggtgattgctttgatttattattgtaaataaacccagtgattggggaaagaatgtaatgttttccaaaagatacagacattatttgagttcaaagtgcttccagtttccattcagttacacaataaattctgagaaaacaaagtaggtgtttactcagaaataaagagactattcagtctctrtttgctcagtgaaatctattttccagagcttcttgcagttctgtgcatgttgtactggaaaggacatgggttatggaatcaaatccacttcgatttgaacctcagtgcaaccatttcctcagctctgtgagcttgggcacttcccttgacttcttagagcctcaggttgctaatccataaaatggagattataacacctttgaagtgaaccctgtacaggttaggagatgcccttcgtattagactatgctatgcgtggtgcccccagagttgtgtctcatggtggccctggttatggtgaagttaagtgaaataacatctagcgtgcttaatgaatttttgtttccatttccttagttggctacatgtctgctatcttacccagaattcctagcctctatcatgaggtgagtcagcttcctgtctcagcagtgctcttcttgcagggcactgcacaaaacwgtggtggagataaccctcgatcttctcatgcaggagtccarcatcgcagcccttagagagatacatcagaaatctatggcatcatctataacgagaagtctttttctggccattttgaaggggtgttgggccacttactattttaggaagtttaggtctggtgatgtaaaacagtcagcctgcttttttttattctatttttttttcaagcatgcatggcttcatttaacaaatgttacaaggccctaggaactgagtgatttgcaagatgtggtttctgacttcaagaaactcagagtgcagtcagagaggtagaccaaggcaaccagaaactaatattcagcatagaaaaagtaatgatgggaggacatataaagtgttcatggctcaagaggaagaagggagtggaagagtggaagaggaagagggactgctgtccacgttcaaagcccaaattgagtctgacttttgtcgagaattgcttaacaggctgcagaggtggccaggaggtagaccagggctggaattcaagtcacctcatttcaaatctattgctcagtccatcgctccgcctcatgccacattgggtttttctttacatcatttgtttttccttgtctcactttttttaggcttgttttcctgctcagaacaaagtgacttccctgaacacatcttcattatgattcacaccaacctgaagaaaaagttcagctgctgcgtcctggtctttcttctgtttgcagtcatctgtgtgtggaaggaaaagaagaaagggagttactatgattcctttaaattgcaaaccaaggaattccaggtgttaaagagtctggggaaattggccatggggtctgattcccagtctgtatcctcaagcagcacccaggacccccacaggggccgccagaccctcggcagtctcagaggcctagccaaggccaaaccagaggcctccttccaggtgtggaacaaggacagctcttccaaaaaccttatccctaggctgcaaaagatctggaagaattacctaagcatgaacaagtacaaagtgtcctacaaggggccaggaccaggcatcaagttcagtgcagaggccctgcgctgccacctccgggaccatgtgaatgtatccatggtagaggtcacagattttcccttcaatacctctgaatgggagggttatctgcccaaggagagcattaggaccaaggctgggccttggggcaggtgtgctgttgtgtcgtcagcgggatctctgaagtcctcccaactaggcagagaaatcggtatgttctggggttgttctgtgaatggcagtgcttattgggactggctgggcatattgatggtatgggagacaagtggcccaagtgtggctcagcggaccagtggagtgggcccagggcagtgtttttttcagagtcacaagtgacacagagggagttgaacagatggcgctctaggcccccgcatcttttatcaattagaagagcttcattattgtttcctaatatttttagttgatatataataattagatatatttatggggatattttgatacgtgtattcaatgtgtaatgatccaatcagggtaattagaatatctatcaccttgaacatttattgtttctttgtgttgggaacagaatagttttattttcatctgttttaaatattggaattgtgtagaagatttcatttgaaaaagagagttccgctgctaccaataatcaaaagcctacaattgacctttgaaaagacttgaagcatagatctgcacatcatttccaggttctgaaattctgttgtttttcctgattagtggaggactctattggcctcaacaacctgggtaattttcagcttttctctttgaaaagatttaattgggtcagtaattcttaactgggggctatggaccaacttcagagggtcatgaatccctgcaattgcgtgcaaaactgtctgtggattaggtgtgtakaatgtatgtgtatgcgtataagtgtgtccgtgcatttttccaggaagggagtttgtagactgcagtttattctctaagggatctgtgacccaaaaaagtttcagagtcactggtcacaacatattaatttgcttttcttgaaaccctttgtagtgaatcaagatagaaagtctgtctatatttgtaaacctgtgtaacagagagccttatttctcttatgctgaatgtgttttccattatttgaaatgaatcagctaaagaaagcaaagcacaggaagctttgctcctctgtcagcctggaggtactggagcaggtgaggtcatacgtctccttttttatttccttcatttgactgccaggaaaaatggtctgaaacccagcacaggctctcaaagaaaagtaggcccaaactggattctctagagcagaaagaaatggtgagatcacagtttctacctccccaaataggcagctgccccgctggccggccccacctcaacttctgcttttgtatttttggtttttcttggactttgttttcaagaaactaaatgtgattggtttttgttcatccataatggagctaagtttctttcttctccatttttgctgcttatgtagcaaatgtttgggatatcctaggtattagctgatccttcttcttcatgtcaagttaatattgcgtgcctggctgaaattgtactgaagtttgagacagggcctgatagctctgttaattagaactacagctttaattttatgcactccttaaagatttggggtgatttaagtaaacattaatacaaataatatttttctatagattgcagtttcaacttcaaaataaggatttccacagaaggactttgatcctgagatgtaatcaaaattgcatgttagacttcgaatgttctgctgttatggggtatatatcctcttggcattttgtctaacaaatattttaagacattcatatattcttttatttattcatggattcatcaacaatacaaaggggaaagggaagggaaaggccctttgttgaagcccgagttgcaggcagcgtgccaggcccatacacttcctcctgcatctggaatttgttgagtctcttcccaactactggatggatcagattatttcaaatggttttcttttacaaataacattgctgacaaggtttttgtgcagataacttaggtaaccactattgacattcaacagggaaatatcctcagaagtgaggctagaagacacgagtaagagacattttatgacttttttttttttgtccatagcaagattttctatcagagagagtgtaataacatactctgcctccagcagtctcacaaaccagccaatggtgggctcagtcattttcaattatttttgatagtttactcatacatgttaagtatcctagatttgctggaattttcatgtcaaacagtagcataattttaaaacactatcatcaatacaagtgatgcttattatgcatctgctgagttcctaacatgccttgctcttttcatcctcccagaagtcctgtgaggttgataagattattggtctcattttgctggagagctaaatgyggaggctcaagtggtcacacaactggctaatagcagactgaggtttgaaagcagagtgcttgcttcaaagaccccactcttggcacctctgctgttgtgcctcataataattgtagcttcataataaaattcggtgtgattattcttttattatgttaaaaattttcttctattcttgtctattagctgtcctagagagaaagagaagggtattctgagttaaggcaaaggcaagaagcaaaggctgcacggggaaaagtgtgtttgggcatcacaaataatcctgtttggacggcatgtgggtccttgtgggtgaagatgggtgaggaacgaggccagaaaggtagctaggcattagctcttagagaacgttgatagtcacaataaggactttaggtttcattctttaagccatggagagccctaggaggtttttgaacaagggagacttctcacttctctatgagtccctgttttgtactctataatgtctccattattagggactattgccacaaccaggtcagaagtgccaggcctgcccaggctgtggtagcagtgatgaagagaaaggaccttacctgagagggctcatgaagtaagaggcagaacttactatctagctggaaatgatcttgagtgagaggcaggagccaggatgtctagcctgggagcaggctgtatcttaccaaggggagcatgcttccagaggaacgcagattccactttggatgttctgagactgaagtgtgtgtggatttccctgggtagatatctatgctgttgagtacttaattctagagaaggatcagatatcgagatagatttacaagtcatttgtatcaaggtgagataatggttataatccagggaagaagaccaattagaaaatctagaaaaagatttacatttaaaggacaaagaaaagaacagggaaaagtcagaagggtcagagaccggctagaggagaactaggtgtgcaccatacaatggaaggcaaagggggatggagtttgagggatgttggctgttggtatcaaagtctgcagaggtgggacatattcttgggcagaataaggactgagaagacacctgtgaactgagtagcttggagaacatgatcagttatatcaggggtcagcaagcttttcttaaaaggcyggatagtaaatagttttggctttgagggccatgatgtctgtcacaactactcaactctgctgttgtactgcagaagtaacaatagatagtagtaaatgaacaggcctggctatgttccaacaaaactttatttacaaaatgagggatgcaccagatttgtccttcaagtcatagtgttttgttttgtttttgacggagtcttgctctgttgcccaggctggagtgcagtggcatgatctcggctcactgcaagctccgcctcccaggttcatgccattctcctgcctcagcctcccgagtagctgggactacaggtgcctgccaccacgcctggctaattttttgtatttttagtagagacagggtttcaccgtgttagccaggatggtctcgatctcctgatctcatgatccgcccacctcggcctcccaaagtgctgggattacaggtgtgagccaccgcgcccggccaagtcatagttttttttttttttaactctgatctatagtatgtctgttttcttcaaccggactcagaatgtaattttccataaatggttgtaggatgtattargctaacttgaaaatataaaagcgtttggtgataaattgtgataaaatttctttcataataatttctagctatttagagttaactacacctagaggcagtggattttgatgtatttatgaatttactaacttgagctgattctgttgaattttctaagcgtgtgattgtataatctgaatacagtgatgcatttattttttcttctcctaatttgcctctttttctgagctctaattctaagttacagagaggtggtagtttcttttttctgcagcctttccccctcgctaggcttgtttgctgggatctcagtagttgtggatttctcttggtgatttcttagaggcctatttgagtttgaaagttcaactttcaattagcagggaggtttgacaaacaggatttttttctctttaagtacccaagtcagtttaaagttttctttttaaaaatttgatatataataattgtacatatttatggggtacatgtgatattttggtacatgcatacaatgcgcaatgatcagattgggtaattagaatatccatctcctcaaaaaagttttctcctttgattggcttttttcttttcctttcttttttttttttttgagacagagtcttgctctgttgcccaggctggagtgcagtggcgtgatcttggctcactgcaagctccacctcctgggttcacaccattctcctacctcagcctcccgagtagctgggattacaggcgcctgccaccatactcggctaatttttttgtatttttagtagagacgaggtttcactgtgttagccaggatggtctcgatctcctgacctcgtgatctgcccaccttggcctcccaaagtgctgggattacaggtgtgagccaccgtgcccagcctgattggcttttttcttagaatcacgtccaaacttcatacctgggcccccatgtccgtgtatgatctggttcctgccaacctctgtaactgtatctttgatttttcttcccctcactccttgtctacagtcaagtccctgccctcattgtggtcctgacacttgctgcatcctctgactggtggacttctctgaacccttcccaaggctggccatcctttgggtctcagctccaaggcattccctgaatcatcactctatgaaggaaattccctcagtgtctctggcacacagctcagcttgttagtgtcacagtgtttgtcacaatccgaaattatcttatatgtaggttgttgtccgtctttactgtctatgtccgtgcagtagaatgtaatatctctgagggcatggaccttgtctttgttgctcacaggcgtcgtctcccgtgtctaaaactgtgcctggcatagagtaggtgctcaatcagtatttgttgactgaacaaaacaattctctttttatggcaacataaagcattgttctaacctaagccttctgtgctggatgttctccagtggcacctccatatcccactctcacccttttccatctggctctgtccctgagaaatggaagtttgtttttttttttttttttttttttttcgagaatgagtcttgttctgttgcccaggctggagtgcagtggcacaatctcggctcacgctaacccccgcctcctgggttcaagcgattctcctgcctcagcctccagagtagctaggattacaggtgcgtgccaccacgcccagctaatttttgtatatttagtagagatggggtttcaccatgttggtcaggctgatgtcgaactcctgacttcaggtgatccacccgcctcggcctcccaaagtactgggattacaggcgtgagctactgcgcccagctgagaaattaaaattttgaactgcgttaattggcatttctcactctctggattttctctgggactggccaggagaagcagtggcattaaagctgagaagaagactaaggtcagggcacctattccgccatgtttcgccttgcagagtaaactcaagctgtatctttctcttgactgaaggtctcagatcctgccaggaggccgtcccagtcttggtcctgctctgtcccttttcccttcagttctatgagatccaagggaaggggcagaaccaggttgggatattgactccctcaggctccttcttgcccggaggttggcaatagctgtgttcctctcctaaaggcaacagctcccgacaggtgtccctcctcagctcagggtctccgctcatcaggccacagtagacctggggtggtaatgacaccctgcagtcatcaaccctggggctttagcctattccrtgttgatttctttaaactctaccccaacttggtaagtagtccttttatgaatctctcaattactccattggagcttctcatctcttttctactgggattctcaccaataatttattcatctgtgaaatggaaaagttgactaactgaagtttctgatggatctgtgtttctcatgcaattactactaatccctttcgaaccagtgactgattctgacaaaatgtgttgtaattctgagttgtgtaaagatatacctcctgccctatgtgcacttcagtgtacctgccctgtaagatgataacagtttggactgtgcccttctcagataattttcaaaccattttgatgaaattttgccctaggattgaggatagggttgtgttgttttcatgaatgatgtttctgtgttcctgaggtttagtacatacattggaactgaaataaagagagaggctttcatccttaattctgtggatatcctctttctaaatcatcttgtgttcagtcaaatgccctcacttccccaaatcctgtgtggataaagaatgatccaaaacaaacctgaataggacaatagaggattcagctgacccccagatcccgtgtagatttcagtggtgagccccaaacttgcttgaccgagtaagattgaaagaagttctcataggatcacaggatttggatggctccttaaagtcttcagttccctccttcatcagataggtcaacgtggggtagagaaacttttccaagtcttccaaacactgcttaaacagttgcaaagacaaggagctagcccaggaagcttttaggtttttcaagatggcctgtttgattttgactggatttagtacattgtttctgacaatggcttacaaagaaagagagagagagagagagagagagagagggagggagggaaggaaggagggagggaaggaaggaaggaaaagaaggaaggaaggaaggaaaagagagagaggaaggaagttagtttagctctctgacctcctcttccatttctgccacaccagttctgtgactcttccctgggcctcaggttcctaaatggaacgcctgggggttgtcttggatgccatagttaaatcctgtccatttgctgagcactgcatgcttttcaaagtgcaatggggtcctttgcacttgtgggatacactgaacatatggtagtgttttcatttttctgacagagatagaaatataatctactggtgataccaagagaatatctggtttgctgctttgataactggagtagctactccactgtaagtagcacactggctttgttcacttttctgtgtgcccaggcacaagcgaatgtctttgaatgggtttcaggaatgccacagtatggcccccttcagcccttacagtggctggcagacaggtggtcatctctgcctaggagctttacctgagcaccacacaaatactgccatttcgccctgtggatcatgatggggtaaagatggggaagcattattcccttgccccctcccccgcctctcgtctttctctttttctgcatattgccagtgctcatcacctcttttctgtttctttgtggtttatagatgatcatgacgcagtcctgaggtttaatggggcacccacagccaacttccaacaagatgtgggcacaaaaactaccattcgcctgatgaactctcaggtaaaatttcttctgtgcagctatggagtaagagaaggaccacagtgtgggctctaatgtggaatgtatctactgggagcatatctaggctgccaattaagtctcttgatcttcctgagttcctgattcctcactggagaagaagacaatgattccatgacccawcctgatgatgtgtttatttaaagaaaaaccctttagtattagtgtctgctaatggaggtgtctggtacccaggaaagtagagttgagctgtccttgctgctgcaaggtcatacctggaggtttacatgagggacagcagagcgcagaacatccaggggagagtggggagtgttgtgaaaagtgaatgaaacaatacacaggagagcactttatgaaccgtaaaatgctatacaactactataagacagtgtcaccatgtaattatgtgtaatatggcactagaattcatgtactatttcataaattcccctggataattaggttcccggagtattttcaggtagcacatgccgatttctcaatactaagggagacttgagaaatattcttgccacagggttctgttagtatattttattagtgggaaaaactgtattacacatatatatgaaaatatcaaaaattgcacaatagggctgcaacctgcccatctcacaaccaccaacatttgcctttttctgaataaacatatgtgctctgggggtttttatgtcagtatttagtctgcatacttccctaggagtcctgggcatggggtggatcctggaacagatcagaaatgccttttcagcagtgtctgtggaatgtgtgtttctttccttctctactagggctccacttccctatatctgtctcttcacttccttactttcaggaactcaccagctaggcagaagctgcttcctgcatagcccactttctatttgaagcccacaaccttaagaaacttttttttaaaattatactttaagttctagggtacatgtgcacaatgtgcagatttgttacatagatatacatgtgccatgttggtttgctgcacccatcaactcgtcatttacattaggtatttctcctaatgctatccctccccttgcccccaaccccacaacaggccccagggtgtgatgttccctgccctgtatccaagtgttctcattgttcaactcccacctgtgagtgagaacatgcggtgtttggttttctgtccttgtgatagtttgctcagcatgatggtttccagcttcatccatgtccccacaaaggacatgaactcatccttttttatggctgcatagtattccatggtgtatacatgccacattttcttaatccagtctatcattgatggacctttgggttggttccaagtctttgctattgtgaatactgccacaataagcatacgtgtgcatgtgtctttatagcagcatgatttataatcctttgggtatatacccagtaatgggatggctgagtcaaatggtatttctagttctagatccttgaggaattgccatactgtcttccacaatggttgaactagtttacactcccacccacagtgtaaaagcattcctgtttctccacatcctctccagcatctgttgtttcctgactttttaatgatcgccattctaactggtgtgagatggtatctcattatggttttgatttgcatttctctgatgaccagtgatgatgagcattttttcatgtgcctgttggctgcataaatgtcttcttttgagaagtgtttgtttatatcttttgcccactttttgatggggttgtttgtttttttcttgtaaatttgtttacattctttgtggattctggatattagccctttgtcagatggataggttacaaaaattttctcccattctttaggttggctgttcactctgatggtcgtttcttttgctgtgcagaagctctttagtttaattagatcccatttgtctattttggcttttgttgccattgcttttggtgttttagtcatgaagtccttgcccatgcctatgtcctgaatggtattgtttaggttttcttccagggtttttatggttttaggtctaacatttaagtctttaatccaccttgaattaatttttgtgtaaggtgtaaggaagggatccagtttcagctttctacatatggctagccagttttcccagcaccatttattaaatagggaatcctttccccatttcttgtttttgtcaggtttgtcaaagatcagatggttgtagatgtgtggtattatttctgaggcctctgttctgttctattcgtctatatatctgttttggtaccagtaccatgctgtttcggttactgtagccttatagtatagtttgaagtcaagtagcatgatgcctccagctttgttcttttggattaggattgtcttggcaatgcaggctcttttttggttgcatatgaactttaaagtagttttttccaattctgtgaagaatgtcattggtagcttgatggggatggcattgaatctataaattaccttgggcagtatggccctttccacagtattgattcttcctaaccatgagcatggaatgttcttccatttgtttgtgtcctcttttattttgttgagcagtggtttgtagttcttgttgaagaggaccttcacatcccttgtaagttggatgcctaggtattttattctctttgtagcaattgtgaatgagagttcactcatgatttggctctctgtttgtctgttattggtgtataggaatgcttgtgatgtttgcacattgattttgtatcctgagactttgctgaagttgcttatcagcttgaggagattttgagctgagatgatgggtttttctaaatatacaatcatgtcatctgcaaacagggacagttcgacttcctcttttcctaattgaataccctttatttctttctcttgcctgattgccctggccagaacttccaacactatgttgaataggagtggtaagagagggcatccctgtcttgtgctagttttcaaagggaatgcttcagtttttgcccattcagtatgatattggctgtgggtttgtcataaatagcttttattattttgagatacattccatcaatacctagttcattgagagtttttagcatgaagggctgttgtattttgttgaaggtcttttctgcatctattgagataatcatgtggtttttgtcattgttctgtttatgtgatggattatgtttactgatttgcatatgttgaaccagccttgcattccagggatgaagctgacttaatcgtggtggataagctttttgatgcactgctggatttggtttgccagtattttattgaggatttttgcatcgatgttcatcagggatattggcctaaaattctctttttttgttttgtctctgctagactttggtatcaggatgatacttgcctcataaaatgaattagggaggataccctctttttgtattgattggaatagtttcagaaggattgatacaaagaggtttgtacctctgctagaatttggctgtgaatccgtctggtcctggactttttttggttggttaggctattagttattgcctcaatttcagagcctgttattggtctattcagagattcaacttcttcctggtttagtcttgggagggtgtatgtgtccaggaatttatccatttcttctagattttctagtttatttgcatagaggtgtttatagtattctctgatggtagtttgtatttctgtgggatcagtggtgatatcccaatttatcgttttttattgcgtctatttgattcttctctcttttcttctttattagtcttgctagcggtttatcaattttgttgatcttttcaaaaaaaaaaacagctcctggattcattgatttttttgaagagttttttgtgtctctatctccttcagttctgctctgatcttagttatttcttgccttctgctagcttttgaatttgtttactcttgcttctctagttcttttaattgtgatgttagggtgttgattttagatcttttctgctttctcttgtgggcatttagtgctataaatttccctctacacatggctttaaatgtgtcccagacattctggtatgttgtgtctttgttctcgttggtttcaaagaacatctttatttctgccttcatttcgttatgtccccagtagtcattcaggagcaggttgttcagtttccatgtagttgtgcagttttgagtgagtttcttaatcccgagttctaatttgattgcactgtggtctgagagacagtttgttatgatttctcttcttttatgtttgctgaggagtgctttacttccaactatgtggtcagttttacaataagtgcgatgtggtgctgagacaaatgtatattctgttgatttggggtggagagttctgtagatgtctattaggtctgcttggtgcagagctgagttcaagtcctggatatccttgttaagtttctgtctcgttgatccgtctaatattgacagtggggtgttgaagtctcctattattattgtgtgggagtctaagtctctttgtaggtctctgaggacttgctttatgaatctggatgctcctgtattgggtgcatatttatttaggatagttagctcttcttgttcaatcgatccctttaccattatgtaatggccttctttatctcttttgatctttgttggtttaaagtctgttttatcagagactaggattgcaacccctgcttttttttgctttccatttgcttggtagatcttcctccatccctttattttgagcctatgtgtgtctctgcatgtgagatgggtctcctgaatacagcacactgatgggtcttgactctatccaatttgccagcctgtatctttcaactggggcatttagcccatttacatttaaggttaatattatgtgtgcatttgatcctgtcattatgatgttagctggytattttgcccattagctgatgtagtttattcctagcatygatggtttttacaatgtagcatgtttttgcagtggctggtaccagttrttcctttccatgtttagtgcttccttcaggagctcttgtaaggcaggcctggtggtgacaaaatctctcagcatttgcttgtctgtaaaggattttatttctccttcacatatgaaggttagtttggctggayatgaaattctgggttgaaaattcttttctttaagaaagttgaatcttggcccctactctcttctggcttgtagagtttctgctgagagatctgctgttagtctgatgggcttccctttgtgggtaacctgatgtttctctctggctgcccttaatattttttccttcatttcaaccttggtgaatctsacaattatgtgtcttggggttgctcttctcgaggagtatctttgtggtgttctctgtatttcctgaatttgaatgttggcctgccttactaggttggggaagttctcctgggtaatatcctgaagagtgttttccaacttggatccattttccctgtcactttcaggtacaccartgaaacgtagatttggtcttttcacatagtcccatatttcttggaggctttgtttgtttctttttactcttttttctctaaacttctctttttgttttatttcattgatttgatcttcaatcactgataccctttcttccacttgatcgcattggctattgaagcttgtgcatgcatctcgtagttcttaagccatggttttcagctccatcaggtcatttaaggtcttctctatactgtttattctagttagccattcatctaatcttttttcaaggtatttagcttccttgccatgggtttgaacatcctcctttagcttggagaagtttgttattactgaccttctgaagcctacttctgtcagctcgtgaaagtcattctccgtccagctttgttctgttgctggcgaggagctgcgatcctttggaggcaaagaggcactctggtttttagaattttcagcttttctgctctggtttctccccatctttgtagttttatctacctttggtttttgatgatggttttggtgtggatgtcctttctggtgatgttgatgctattcctttctgtttgttagttttccttctaacagtcaggtccctcagctgcaggtctgttggagtttgctggaggtccactccagaccctgtttgcctgggtatcaccagcagaggctgcagaacagcaaatattgctgcctcattcttcctctggaagctttgtcccagtggggcaactgcctgtatgaggtgtcagtcggcccctactgggaggtgcctcccagttaggctacacggggctcagggacccacttgaagaggcaatctgtccgttctccgagttcaaacaccgtgctgggagaaccactgctctcttcagagctgtcagacagggacgtttaagtctgcagaagtttctgctgccttttattcagctatgccytgcccccagaggtggagtctacagaggcagcaggcctggctsacctgcagtgggctccacctacttcgagcttccagggctgctttgtttacctactcaagcctcagcaatggcagacgcccctcccccrccaggctgctgtcttgcaggtcgatctcagactgctgcactagcagtgagcaaggctccgtggtcctgggaccygctgagccaggcacaggatataatctcctggtgtgccattttttaagacagttggaaaagcgcagtrtttgggcgggagtgtcccattttttcaggtaccgtctgtcacgacttcccttggctaggaaagggaagtcccctgaccccttgcgcttcctgggtgaggtgatgccccaccctgctttggctcgtcctccatgggttgcacccactgtccaaccagtcccaatgatatgaaccaggtacgtcagttggaaaagcagaaatcacccgtcttgtttgtcgatcgcgctgggagctgcagaccagagctgttcctatttgaccatcataagaatatttttataacgggatagaaattgaggaacttaacttatttgtaagtggtcaccatcttgtttttttgttcttcctctaataccttttaatttttttttaagaaaatcactttctatcaccgtcacatcttctagtcacctctaggtgcttccaatgcctgtttgttgttcaaatttatattttggcttttggtattacttttattattattattattattattatttgagatggagtttcgctctgtcacccaggctggagtgcagtggtgtgatcttggcttactgcaacctccttttcctgggttcaagygatcctcttgcctcagcctcctgagtagctgggattacaggcatgcaccaccatacccagctaatttttgtatctttagtagagatggggtttcaccatgttggcccaactggtcttgaactcctgacctcaagtaaccacccaccttggcctcctgaagtgttagtattacaggcgtgagccatcgtgcctggcctacttttattgttactagaagagataggattgaaaggaatggactggctagcaagaagctctctggggcaaatgacagttgagctagactttgaaagatgggcaggacttggggaaatagcaatagccgggcactccagaaagtggaattggcaagacagaggagaacaggaaatgagggaggcgttacaccactccaagagtagtgtaatgatcactcccctattagtgatcaggctggagtgcagtggcgtgatcataggaaatgagggagacattcagatacccctggctaagttggaggtggaggtgtagaagaattggctggccttgccccgtagagagagatgaggctggaccttcatggctgcttgtgctctggcaagtgtggaaattcagacagagggttaggaccagctttgtccctttcccttctcatgcctagtcaggaaccctggagctggagagcactttagggagcactaaaacctcatctccacttctatataagatgctacctaaatatccaggagagatgttcatttactcttaattaattcattcattcaacaaatgtattcagtattgagtagactgtggcagtcagtacataaactctatagttagcctgcttggggttgaaatccagctctgtctcttactagctgaaggatcatcaagttacttctctctaaaaaagggagaataattcccttacagggttgttgtgaggtgtaaataagaaaaatctgtgcaaagcacttagaacaatacctggcacatgtatcaataaacgttaactgcacttactattgatatttgcagacattggtaggggagggtacaattgtgagcaaaacaggctcagcctctgttcttatgatgcaatcaaatagttttacaaataaataaatttgcaaaaaagaactagagaagagagtggtcaaggtactaggagagccctgaaaggggagatttgagctattcaaggaggtcagaatccctaagtaggtggtacttggctgtgtagaaggaatgtgtggatgttgaaaagggtgggawaagagcttttcaggaagaggcaacagcatgggtacagttttgtgtggaaggaaatgggggactggaaggactcaggaagaggtgagtatatgtgggactatgtggtgagagacaaggctgaaagcaagaaggagtcaagccatggtgctgcaccgaggcatcttcttttttcagtgggggtaggggggttggcctgtcacccgggctggagtgcagtggcgcgatctcagctcactgcaaacaccacctcctgggttcaagcgattcccctgcctcagcctcccgagtagctgggattacaggcgcccacaaccatgcccgactaatttttgtatttttagcagagacgaggtttcactgtgttggccaggttagtctcaaactcctgacctcaggtgatccacctgcctcagcctcccaaagtgctgggattacaggcgtgagccacctcacccagcagggtgagacatcttctttatggcatgatcagatttgcattttgtaaccatcactggctttcatctgagcagaggggctgcagtagatgaagacacatagttaggaaggtcttacaagtagtctgggttagataygctgatagcttgcacaagagtaggggtgaaggtgaatgtgagaaaagaatgtatttaagggctgcttgcgatttgcagtcaacaggttttaatgtcgcattagatgtgagaagtaaagggagaggggccaaaggtgcagctcagtttctttcttgtgtaacttggcagctagaagttgaaattagaagtcagccccttatccatggtttcactctctgcagtttcatttatttgtggtcagctgcaggctggaaatactaaatgaaaaattccagaaataagcaattcagaagttttaaatgacacgttgttctgartagtgggatgaaatcttacacatcttactttgtcccttcctcatcacaggaagaaggatgggtacagtacaataaaatattgaataaataagcaaattcaataaagtagcaggatccgaagtcaacacmcaaaaaatattcattttttctattatgtgcaataacaatgaatgatctagaaaggaaatttaaaaaacaattccatttacaatagaatagcataaaaaagcataaaatacttaggaatgaatttaaccaaggagttgaaagacttatacaatgaaaactacaaaatagttctgaaagaaattaaaggagacacaaaaacctggaagacatcccatgttcacagattgaaaaaagtattgttaagatgtcaataataccgaatatgatatgcagatttaatgcaatcgttgtgaaaatccaaaagatatttctttttttgcagaaatagaaaaagctatcctaaaatttatatgaaacctcaagggaccccgattaaccaaacaatcctgaaaaataagaataaagctggagttctctcacttcttgatttcaaaaaatacatatgttacaataatcgagagagtgaggtacaaagacaaacatataaaccattggaatagaataaaagtccagaaataaagtcttgtatatatgtgtaaatgatttttgatgagtgtgtcaggatcgttcaatgaggaaaagacagtctttttaagaaatgatactgggaaaactggctatccacatgcaaaagaataaagttggacccttacctaacaccaaaaataaaaattaactcaaaatggatctatgacctaaatgtagaccaaaaactataaaactcttagaagacaacatagggcaaaaactttatgacatcagatttggcaatgatttcrtcattattacaccaaaggcatacatacgtaacaaaggaaaaaatatacaagttggactttatgaaaattaaaaataattgtatatcaaaagatactctcaacagagtaaaaagacaccacacataataggagaaaatatttgcaagtcatctatctgataagggattaatgtacagaatatatagaacactcttcaaacaacaataaaaaaaatcaaattacccaatttaaaaataggcaaaggacttgaatggacrtttctccaagatatacaaatggttagtaagcacatgaaaagagactcaactcttttttgctagggaaatgcaacccaagaatacaacacagcaccacctcacccccattagggtggcttctatgatcagaaatcggaatccgtgggcactgttgatgggaatggaaaatggtcagccactgtggaaaacagtacggcagtgcctcaaaaacttaaaaatggaattaccgtgtaatctaataatcttatttattggcgtatatgtacagaaattgaaagaagggtcttgaagagatattcatacccccatattcagactactcttattcacaatagctggactgcagaaggaacccaagtgtctgttgatgttgaatggatacacaaaagctggtttatacatacaataaaatattattctaaaaaaggaagaaaataccgagattggctacaacatggatgaaccctgaagacattatgccaagtgaaataagccagtcacacacacacacacacacacacacacacacacacacacacacacaatactatatgaatgtggttgccagggaatgtgaggtgggagggggaatggggagttactgtttaatgagtatagagtttcaattttgcaagactgaaaaagttttggagatggtttgtggtgatagttgcacaacaatacaaatgtacttaatatcactgaactgtacacttaaaaatggttaagatagtcaatgttatgttatatgtattttaatacaatttttaaattggaaaaaatgtcagtaggggagacagtcacagaagtacaaacactgtatgattccactttatatggaacacctggagtagaaacaaagtagaatgatgtttgccaagggctaggaggagaaaggaatgtggaattgttgtttaatgaatactgtgattcattttgggaagctgaaaaagttctggagatggtggtgatagttacacaacaataggaatgtactaagctgaatacttaaagttgctaaaatggtcaattttatgttatgtatattttaaaagctttcttttaaatcaacagggagaaaccagttgatagagggagaaagtgaatatactaaaaagaggagaaaatgattagttacccacaacatgatggtggtggagccaaagcgtagtggaggatgaaccccagcaggcgggagtcagagggaagaaggtgcgagtggtgtagctggaggcagtcagtattagaaggatgagagggcttctattttctctgcaaagtggcatgcaaggccaagtcagaaggaggctgagggggaaagaggttttagtagagaaggtttgaacaaagagatttataattgtcattgaggtgagtgggaccgtcagtaaacctgatgaatggagtaggatttccaggccatgctgggctactttgaggttgaagagaatgaatttagagagaaaccaatctctgtttgatacatggatggtaggatctggaggtgagcaggcagcagcaaagaggagaggggagaggggaggagccctccctgagcactctcttggactgcggaggctacctactctctgagcacttcttcgtgatgattcagtcttcctcactgtgaagaacgaaaccccagtcctgcaaagatttgaaactgtatttaaggccaaagtaaggttgcctgggaattaagagtactggagtcaggcaggctttgatcagatccctcccccaacacttcctgtgtgagtgacttcagcaagttgctttactttacctttctgagcctcatttcccttacttgtaacacagaaatatgaatagttactatccagggtttttttttaggatcaaaggagttactatgtgtggagcatgtcacccagaggctggtatgcagcaagtgctttgtaaatagtagcgatgggcactactgaaacctgaatgtctgcctctgcctgtttgcgaatgactccaccttcccaaatcccaacagggaaggtgagtcagcttgagaccacttgagaggcatctagcagaagggaggcaaaacttctgttaaaggataatttttagggaaaaaaaggtaagatgatgactctcatacagatattaaaaatgaattcatcatgaagattttattttactcgtatgatggaaccaggcagatattacaactggttcaaaggaaaagtcaaagcaacacaaatttggagtaaaggagttgaactagtttttctgtgagataaggcagggggaggggagaaatcaattgaaactctcctgggcagcatcctgcccagtaggcacatgtattagttgcctacaattcacaaagggttgcgaaatagctcccgtggaatcagaatctgacagggaggaagagtgtgctcagaaaatgcatggctttctactgaagcagatttttttcccattacacttctagatctctgtgcaccattgtgccagggctgcgaggaaggtggcccacttcccgggatacactacccaccctcaagagagcctttcctgctgcttcttaggcaagtcagctctcttttctcacctcctgtaagcaacactaagtatctggctgttcctttcgtactcgagtcctggccgctccatgacagcacttgtggtggtactgaactgtgatggacactttctatcattgccctttcttaccttgatatcctaaaaagctggtggtctgtcttctctatcttttgtcctggtcagttatcctaactattttgtgtctgtttctgtggattagtaaacggggtccccacccccactccacaaggagaacatctggcacccagaagtcactgagagaatagctgttgctttggtagaattctgcctctgagtggcttgttcttttcccagacggagaggtctcctgacagcagctctcttctttttcttttttttttttttgagacagagttttgctcttgcgctcaggctggagtgcagtggtgcactctcggctccctgctctgcctcctgggttcaagtgattcccctgcctcggtctcccaagtagctgagattacaggcatgcaccaccatgcccagctaattttttgtatttttagtagagacagggttttgccatgtttgccaggctagtctcaaactcctgacctcaggtgatccatctgcctcagcctcccaaagtgctgggattacaggcatgagccactgcgcctggctttagcagctctcttctaaagccatctggacccacatttgttcagctcccctcccttggccatgatgaaggcatgcaaaacaaaaaaggcacttttcttattgagaaggtggctttttatagagaatggtgtcatactgttaggtttcaggccagcagmcctagtcaggcatgtgacacttctgtgccaggtgtggctatgagagtcaacaggaaaaatgatatatgtaaatggacaggtctttaaataaatgcagttttgactataagagtaagaaggtttctgtgagactcaactcagtacctcctgtaccctgtgggcctgagagaggagacaatgggacaagaagacccagtggcttccttggaagcttttgtgctagctggagagagaagacctacttcctatatgcctagcaacagtccacactgactggactgcaaccaggacatttccagattactcagtggggcttatcttgaaataatagttgatgccatttgttaaatatattatatataccatctaagggtcttacatgccttctctcatttgatcttcatggcaaaccctgtgaggtatgaccaccaaccaccattttacctcagaactcaggctcccagagtttaagttgctcacaggagcccagaaagtaagcgacagaggtgggatttggttctaggtgtttgccaccagcactttaaatcaccaaagctttctggaagctccaacttttcttctcaagatactgaaagacaggtatctggatgggttggcagggcgggtgggaggtgggcgagatttccatcaacaacgggtctaaaaccagcgatggtgagctgggtgattttgatggaacccctgccatacagtctattaatatcataattggagctaaaatttaatcatgatggcaatcatgagttctggggcttcttgatttgggccagcagacacagtctcagtcactagttctccgaatcagagaaaggatgccttcaggctgtgtcttcacatggcttttcctctgtgcgtggtggaaagagagagctctgcgggtctcttcttgttgtaaggacactggccccattggattagggccccaccacatgacacatttaatcctaattacctccctcacagccctatttccaaacagggtattagtcacattagggattagggcttcaacataggaattctgggggcacacaattcagtctataacagagggaaaacagatttgagaagaaaaaagtccaaaatatgcacagtggtaatatctgaagatgtgcgtgcgtgcgtgtgtgtgtgtgtgtgtgtgtgtgtgtgtttctattcttgcattttctaactgtccccagtgagtatttkttactttctaactgagaaggttactttaaacagtgtcttgagcagcagcactccatgccctggtgtagccttttcctggcagatgttccccagggctctgctgctctgccaatgacttattctcagcatgaactcctcccctgccccctaagaggatctccaaacccaggtcacactmcccctgcaggtaagtacaggcgtttgagaacagctttattcttccaggaacagctggtcccctcagcagggccttacaaggtggttatgtctaaataaggcacctgaggccaggagatgtgacatggtccatctaataccatggagtgagytagacacagagcaggactggaacccatgcttccaattccccatccagttttaaggcaatcttcttttctttctttctttctttttttttttttttttttttttttttgagacagagtctctgtcacccaggctggagtgcagtggtgcgatcttggctcactgcaacctctgcctccggggttcaagcgattctcctgcctcagccttctgagtagctgagatttcaggtgcccgccaccacgcctggctaatttttgtatttttagtagagacgaggttttactatgttggccagggtgatctcgaactcctgacctcaagtgatctgcccacctcagcttcccaaagtgctgggattacaggtgtgagccactgcacctggcaaggcaacctttttttttttttttttttttggtagaaaatctttgaacttcatatagatggtgttaatgtgggtgagttcagagccatgtgtaaagttccaggaggggagtgcttgctggcttctcccttatccctcaaccagatcccagccccagccactttctgtttctcttctctggataaaactatcattcatcttcacctgtttctattttcatggattactgtctcattcatctcaagtagctcaagtgaatggctgtttttccattggatacaggaagactgagggtgacctgaccctcatggtgtgcttgcttatttgaatgtctgatggttttatgggtgtagtcctgctggagcagaaagaatatctgttaggagcctgcctctgggctctggttctaactgtgccacaaactcatcgtagccttagacaattctcttgtctctctgggcctcagtttacccatctggaaaatgatgggtctgaatttaataccttgagtatcatccagctgtgacatactacaactcaggcaagaagcaaattctcctgacactccatactcctatccagtgttctctgacgtccttccccaagagctgtggtaccctaccctgcccacattatgtgaggcattatagcacataggttagaagtgtggtctctgggccgggtgtggtggctcatgcctgtaatcccaacactttgggaggccgaggcaggtggatcacgaggtcaggagatcaagaccatcctggctaacacagtgaaaccccatctctactaaaaatacaaaaaattagctgggtgtggtggcacatgtctgtcgtaccagctacttgggaggctgaggcaggagaatcacttgaacctgggtggcggaggttgcagtgagccaagatcgtgccactgcactccagcctgggcaacagagcgagactccatctcaaaaaaaaaaaaaaaaaagaagtgtggtctctggagctagacctaagaatccaattcagactctcttacttactgactgtgtaatttggacaagttacttagcatttagcatctctatttctttaatcataaaatgaacatattaacacttacttcctagggctgttgtgaagataaactgagttgaggtatgacagtacctagcatgtagtaagcatcattaaatggtgtctgttgttttcacatattgtaaagaagaaagcttcgtgcatctcttggaatttctgaggacggtgaagccacagctgggaaagtctcagggagccaggagttgctggcctcctgctttgcatactcaaaattgctggaaaggggctatagcagggggagacattttttaaaaatcccagttattgctattcctcatgagtatgtatatatcacctggcatcagtactctgcatagaaagaagcatagctaaagaaaagacactttgcttttaatataacagctgttttcaggggaatagggtggatgaggatagggagtactggccctctgtcctcaggcctccctgtcaccagctcagtcacgtctatcttacaaatccccatctagcaggaagcctgctctgcccttggactatagacctgaagggctgttgttaagttacaacgttcccagtggaaggaggacagtacttaaaagttacaagatgtgggttctgttcttagttcttatggcctgtcagccagggaactcctggccagtagtctcatccttgaacttcttctttttttttttttttctcaagacggagtctcgctctgtcgccaggctagagtgcagtggcacgatcttggctcactgcaacctctgcctcctgagttcaagctattcgcctgcctcagccttccaagtagctgggattacaggtgcttgccaccacgcctggctaatttttgtatttttggtagagacagggtttcgccatgttggccaggctggtcttgaactcctgacctcaagtgagcccagccctcatccttgaacttcaaatttccaccccaccttactcccacaggcatataccagttgttcctttttctctgttcttatgcaggaaatggcctgaggtccaggagtccccttggtcccctttttccctcactctcaacattcaattagtcttcacatctacagccgacaattgtaacttcttttctttactccattatttcttaggtgacaacaggagcttctttgtggtcttcttttttctaaaaacactaattcagaactctagcrtgtttagatcttccttacttaaaaccctttcctggtccccataacctactgaagaaatcctaagctccctggcttggcctctgtctacatttctctgatctcttccagctctttctctgtatcctagccatactgaactacttgcaattcccaaacagggtacacactgtactagttgttcctgcaagagacaggaacacacatccccccacactagcttaacaaaacaaaaaatgcatttctctctcatgcaaaagaagtccaaaagtagacattccaaacttaatatggtgttccagtgtcagaatccaagttctttctactttgtggktttgccgttctcagcatatgacttccactttatggtccaaaatgactgctcaagctccagccatcacatccacatttcagccaggaggaagaaggaacaaggaaaggcataaccttgcctctaaggatagttcctggaagccacacttgcttacattccattggccagaattagtcacccagccatatttatctataagagaggctatgaaatttttttatttcagggagtctattttaggttgccatgtgcaaaagtaaaaaccagaggtgttggtggtcaaggaagaaatagcgaatggatgctgggtaacatctggcagtctctgccacacactcacacattcaggggtttgcacgtggttccccgtgtctcagacaccccctctctcatgcttacagtctctgcttggcatcttcttttttgccccctaacacttgctcttttttttttttttttttttcgagatggagtctcactgttgccaggctggagtgcagtggtgcaatcttggctcacggcaacctccgcctcctgggttcaagtgattctcctgcctcagcctcccgagtagctgggactacaggcacccgccaccatgcccggctaatgtttgtattttcagtagagacggggtttcaccatgttggccaggatggtctcaatctcttgaccttgtgatccacccgcctcggcctcccaaagtgctgggattacaggtgtgagccacygcacccggcccaacactcgctcactttatggccatcctcatactacctctgttgttgcaccatcacagcgtgttaaccattgttcaattgtccacctttcccactaccctgtgacctcctggagggcagggactgtgtctttcctttggctccttagcacccagtatagctgcacaatctccagccaaggtagaccgaccaccaatatttcttgtctcaaagatatattgaggaaatgagagtatattcttcaggcttccaggaacttccttacatctgtaggaaggtatgggcatggggatagctcagtgattgtagaggctcgtggcagattgcttgctattctttgggttgcacacaggccgtctctcttgccatagttttttccagatactgcagtgacattgattaggtctcagccttggcgatgtagactgaggtggagagggattattgtcatgattcttgctttcgtttcagtcagttcttgatttgatttctgccatttattcctctcaatttttacctgggcaacatcatctcccgcctgctttttaaggtgaatgttgacagctgatttcatatattaattctggctttcttaagagggacatggctcccttcattcttaagcctttggggctacttttctttctcattcactcatgatctccatttgatccgcaagacagctcatatttgagagagcagagcaaatgtgttattcccatttcaccgatcagaaaatgagggccggccgggcgcggtggctcatgcctgtaatcccagcactttgggaggctgaggtgggcggatcacgaggtcaggagatcgagaccatcctggctaacaaggtgaaaccccgtctctactaaaaatacaaaaaaacccccaaaaaattagccgggcgtggtggcgggcgtctgtagtcccaactgcttggaggctgaggcaggagaatggcgtgaacccgggaggcggagcctgcagtgagccgagatcacgccactgcactccagcctgggcgacacaggctgtgtcgcctttttttgagactccgcctcaaaaaaaaaaaaaaaaaaagaaaaagaaaatgagggcctagtaagattactcttatttgctcaagatcataggaaagttagtggcaaagccaagagttgatcctggatccttttgtatccaagaccagtatcttttgcaaatacttttctttattttgataaataattaacatttacatgcattattttcccccagaatttgaattttttcttaggatagattcctaaacatggaagtattgagtcaaagagtataaatgtgctttaaaaaaaatgctcttaatacattttgcagaattcttcaagcaaggttgtcacactcatgtttaaggcaggtataactacccatgtgcaggccagcccaggagccagtgtggtggggagaggccataaccagccattgctggttccctcagccagcagaggcacacatgagcttctcaccagcccggtgagggtctcctgttgggaggtgtgcatttttgcatgcactctggcctctgcacacaaactgaatatttcatctggtgctcaaccacaagcacagccatctgttccgtgttggaacagatgtgttggactgtgttggctgtgttggactgtgttggctgtgttggacttcgtgagagagcctatgtcagtctccatcaggatgtgtatgtagtgtactggactctctaggtgattgaaaggattccagagataattttgattatatgagtccctgacttcagactccactcttgtgaccaccacacaagctgtgactccaggaggctgggatgccgtgctattttcactgtacccttgcccccgtaatctcaaagcctgactggatggaaccctttctattctatggctagtggcttgtgataaatgtcctttcaggtcaacacagtgcaggctggtatctttacctttctttcaccgaagttaagtgctgcaccagaacttagaagcctcatggggctctggggcctcaggctgtaccttgtgctatgtcagctattacttcatgtcaaacatttgcatatgaatgttcaagcgacagcttatctctttcttcctgcagttggttaccacagagaagcgcttcctcaaagacagtttgtacaatgaaggaatcctaattgtatgggacccatctgtataccactcagatatcccaaaggtaagtgggtgtccgtgggaaataggggttgagtttcctgtctgtctacagattttcctgatttcctaggtttttaaagtcatggctgacattggctattcctaaaggctgggtatttgagttttagggtaccccatttcatctggactagcagattcagaagtattcctgtcctataccagctactctctttgccgtgccagcactgccaggtattgtctcccagttatagtatttactgggatagtggctggagttcccagcatctggggtagattgttcattaatgcaattattcgtgatgagcatcagcagaactcgagagtagttgccgttactcctgtaaataatattagcacacttttatttcacacttccaatatccagaattcttcccatttcactctcataacaatttaaggagatagatggaagtgtggttgttcccattttacagatggggaaattgaaatgtggagaatgaaagtcccccattccaggacttgatttactaagcagaasgcgcagatctgcaacagcagctctttccggggaaggagacatgagtggcaggcctgctggattctaacctctctggaatagtcctctcactgttaatgcatgtcagttgacctctccctgatgcaggctgctstggcctcaggagcatggcctgagaagggcagagagcactaatcttgggacacttaactcttaagttggatctaccaatgcctgacaggctctggcgacccctggcaccctcactatctgactttcaacagttttgcactgatctcacttagaactcaaatttgcctaggtcaggacaaggactctgaacccatagatgtcctatgctctagttttctcccctttaaaaatgagagatggggccagatggtacgtggggctcttttcagctctgagagtgttcccggactctgatcctgaagcctgaagctgatcttgggtcgccaagctcaactctcccccaaagcacaggctataggctaggccccaccctgctatccagtgaaacctgcggctggaagagaarcctgtagtctgctgcaagaaamgggctgtgcctcaggagcaacacttgttgatcctttcccctccccatgtccactgatgaagatgactcctggggggagcagctcactggcccatttctcccttgagaggaccacttctttctttttcagtggtaccagaatccggattataatttctttaayaactacaagacttatcgtaagctgcaccccaatcagcccttttacatcctcaagccccagatgccttgggagctatgggacattcttcaagaaatctccccagaagagattcagccaaaccccccatcctctgggatgcttggtgagttcatgtcggggaaaagaccttgcatgtttgtttctagaagagatgagctttttttctggggtctcattcagtcattcgtttgttcatttgttcactaaacaattgctaggattytgctctgcttgtagaccatgccaagttctatctaaaatacagagggaaatmagatagaatcctttttcctgagggcatctattggggaggtcaatcagatgtctgaggcaatattcaatttgtgccagaagggagagacaacctggtgtcataggagagaggmcaccttctagctggacagttgcttatagcctcatggaggaagtagtgttcrgtaggctttggagaggggagaatttggcagaggaagatggagggaagggaagctatgaacaggggagggaggtgggaaaatgaggagcggggctgcacctcagacgaggggagcaaggcacttttctcaggtgtacaatttaagggcgtaccccttaaaaactcagtcatcaagataaataatrtttcactacagtatcttcagaaaacacaattaatgtaaaaattatgatgagtgaaatatcaagtatttaaataaagataggatcagtaacagtgctgtgcagagtttattggaacaatgctggccaggggcccccttcttggattttctctacatctcatcattcagactgtggagtgctcctgttccagctgtccctttgcccagctaagggaagaaaagtcttccctccccaacactgtttcatgcaaatgctataaggaaaaatctgctcccaaatagcaccatccaagaggttctgcaggatgtcacagtgctagaaagtgctaactacacatgatgccactgtctcctcaatcagctcagtaatcttgtcctctttctccaaataaattattccatggatacattcattggctgattgatggagtcatttaatctactagcatttagggaggatctattattcaccaggccctggcctaggtgctggggattcaaaggtgtataaccctcacacagccctgcatcctaaggaacactgctgggcttggcttgctgaaacttakattgggaatcacagtcataaatagaaactccagarggaaagctctccaaatttggggtcatgagctgctgaacccactgggcagagctctggggtgctggggtgggttgtcaggcatgactcacctctgctcccctctccaggtatcatcatcatgatgacgctgtgtgaccaggtggatatttatgagttcctcccatccaagcgcaagactgacgtgtgctactactaccagaagttcttcgatagtgcctgcacgatgggtgcctaccacccgctgctctatgagaagaatttggtgaagcatctcaaccagggcacagatgaggacatctacctgcttggaaaagccacactgcctggcttccggaccattcactgctaagcacaggctcctcactcttctccatcaggcattaaatgaatggtctcttggccaccccagcctgggaagaacattttcctgaacaattccagcctgctccttttactctargggcctctgtcagcaagaccatggggrcttcaagagcctgtggtcaggaaatcaggtccagccttccctgtagccagacagtttatgagcccagagcctcctgccacacacatgcacacatatctagcattctttccagacagcatcctccccgccttccaccttggtagatgcaaggtctatctctcccatcagggctgccaaagctgggctttgtttttcccagcagaatgatgccattctcacaaaccaatgctctatattgcttgaagtctgcatctaaatattgatttcacgttttaaagaaattctcttaaattacaattgtgcccaatgcagggtggctctggggggcaagtaggtggtacaggggattggaaacatgctcygcgcctccagaraaaagttgctcccgaggtccatgcccctggaacgtgttcctatcactctggctggttgggctggtccttagactgggtgcttatgattaaagggtcttggttagcccactttccctctccatgtggagatggaaggtagagaaggatacagtgtctatcctcaagttgctacggttcagtgagagaggcagacatctgaacaggcaggtaggattcagtgtgctcagtgcactggggatttggagagagatgggcttgctctctctgtgcacccaggagggccacgcacttaaaactgwgtttgtggatcagagaaggctttatagcacagggggcattcagatgagtcttagaggaagagaagaaacatggcaagcagattacatctgagccgtttgaattgtgtttttctttcttcccatgtttattttctaagatctacctgaacttagagactcaagatatttttttaggaaacctcctacccatgtctgaggtagcaagtgcagcctcacgacagataccaggcaatccagagccacaaaacgtgattcctccaggctctgcctggcctgaccctgtcctgtcagctgggtttacataccagtcccattcttccttttcaatammtacccccaaatcttctcctaaccaccatctgttttttttttttaaagcattttttgctttaaaagcatcctgaccccaatttctttgagctcacgggccttttgctgaaggtctctcagggtgtagtggtgtggctctctggacttaacgtcactctcagaggtcagaaccttggagatcagaactgattctcaccaggtgtgagaggtgtggtagcagattgcaatgctctgcacctcttccttgcaagtgagcaacttcaggctctctgggcagaggctggcccactgtagtttgcagacatgctctccagatggttttactaagtcccctctccctgatagggaatcctgctggaccagcgcagccctggtgtggagaggttaaaagacttgcacaggatcaccaagtcatgctgtagagccaggattcctagacccagggctctgcactctcaaggctggccccatgtgctcaaggggrtctaatgtttgggctccaaactaaccatctcrgagctgggctcctcatttactgccaaaccctcagcttatgtagctagaaagggccctggagtgagaaagcctggattttcaaattgatgctcccctactgactagctgtgccactctgggcaaatgctcttccttgagcctgtttccacacctgtaaagtggggatgatgatcctatctcactgcttttgtgaggattacaggaaagcacctgtcctggctctgtacctggcacgtagtaggtgctcagttcatgctggtttccttcctgcctttagtagggacctgctctgtgctcacacctcggctgcatgcaccctgctgtgacggaggctagtgtggaagaggtcctgtcctcagggaattaactgtcttattgggagacaacaactrtcctccttggaacacccaagaaaccatgcaaagcagtggacaacacagaacacgccctcctcctcgctgcctgcagctccaatctgattctgcttgggaatgggcggagcacgtgggctgcttaactgctgtataggacaagccccttacccctctctgggcccatgaattcctggcttggtttatgttctgatttgacacactgattttaatcttcgaatcatgacactgagtgcagaggaggtggcattccgacagcaggacatacatgttggtgtgaagactgggacgacactgggtagaatctagtttttaattattattaatataaaggatcaaattaatttaaatatgattctgaagtctacagaacttttagttctgtgctgtctatgtggacactttggtaaaaygcaaattatgatatggacgttatcattggtctggtgagatgtttcatatttgtgacagttaatttaaaaattatgasttaatgctgcctgtgtctatggggttctgtcttctttgatagccatctattcatctggatcatgggaccctctctaatccttccmccaatcaaataagctattgctattggtttggagttgagatatcagtctcggaaacttctgaaaaatgctaataattacccaaggattatgtcaaattttaaaataaatgtgtgtgtgtttctttaagctgcttctctcttcttatttgctaaatgaacaactgctgattgccaacttttatctccaaagaggacacaactgagatcctgaaccccccagtccttacccactggctcctctagccttagacttactcctcagtactccaggaaaagaaatgtgaactttactggaaggatcacctctttgaaatattcactggtttactgatttttttatttttattttttgttcttgcctggattcacataactaacctgttgcatcaaagaagagatggagtcgggcagaaagcagaacataaggaagatccttccctcggtttccaaaactctaaaatccttaaatgaatgatgtcttaaaaggatttaaaatgtttggacacaaatcttgagaaggagcatgagttaggggagagaggataattcctttctcctgtgaactgcccacccccttgttacaggttgaattgtgtccccccaagatttggatgtctgaagtcctaacccccagtacctcagattatgaccttatttggaaatagggtcattgcagatgtaattagtgacgatgatgaggtcatattggaataggttgggcccctactccaatatgacttgtgtccttttgaaatgtggaaatttggagacaggcatgcacacagggagaataccatgaaggctgagcccacagagataccaagcacctgcaacctccactcccacccgactagtagggttctcactgacaaagcccgactttcagtgtcttagatactgttcttagaaagtgcttcatggcctggcagtgtgctgaacccataccagtgcctggcctctagagccatgagcaagatggggagaaaggacacacaggactcagagactgccacctcctttctagtcccaggtccttgtcctctggatgtccttggtttccacttccttcatgacccccggcgcagccctctgggatgtgttgtaatgtgacagaaagtggctctaacaccgctttccactctcacttaggccaggaacactcgctcaggaatctcatgctatgggatgggataatggcatcagctcaggagagaggaaaaggccttctcagtacccctgaaatcccaccacccaaagcattgatgtccccatccaggtgttctcaggattaatcagaaaacaagtttataatgggaagaggaattctctttgacccagtgaatacacattaaacagccatcatgtgcctggcactgggaacaggatgaaaacccacagcayctgcctcccaaggaaatggagggccacaggaatgggcctgccctgcctgtggataggtattatcatactaatgtgagattagtggtgttattttctggaaagctaaacctggataacactgctattgttaggcacacatccataactacttagaagaaaaatagtatgcaaatgccaaatatgaagacgtgataatacaaggtaaagtaaaataatggtgttatagaggagatagtcattttaacggggagatttggggagtcttgaggatgggcaagattcttttttctttaagtaaaatgcaacttctgattatgaaagtaatacatattcagtgtcaaaagaacagaaaattttaaaaagagaaaaagaatcatcttccacatccatgatccaaaggtaacctctaccagcagtttccaatcctactttaaaaacaatatttttatacaaataaaaacccatctttttatttaaaaaatacattataaaaatgcctgtggatcattaaggactttttgaaaacaggctttgtaatggttgaatgatattctatcataaggatgggttacagtttacacacaacttgttcctagagttgagcatgcagtttatttacatttgttttctccaaaataccaaatatataagcacatgttctcatctctgattgtatcctgaggtgaaaagtgggttcatggggtgggctgggtactattttcccctcaggaattgtggctgggagactccgaatcatattgggggaacttctggaacagtcttacagaattagaaacagacagaccaggggtgaaaccgaaggcagcattataggattgctgggaactctgttactttctctggttaattattttgctattttttggtgttgtttctccatacaaattagtcataaggacctccaatatgaagatctgtattcgttatatatggctaacaaatgacttcaaaatttagtagcttaaaacaaaagtatattagtttgctaaagctgccattacaaaatgccaccgaccgtgtggcttaagcaacagaaatttgttttctcgcagatctggaggctggaagtccaaagtcaaatcgtcatcaggattggtttctcccgaggcctctcttgttggtttgcagatggccacccgcttcctgtgtcctcatacggcttctcctctgtacacatgatccctggttgtctctgtgtccaaacctcctcttagaaggagaccagtcaaattgcgttaggacccaccctaacgacctcattttaaattaatcacctctttaaaggccatccctccaaatacagtcacatgctgaggattgcggattaggacttcagcatatgaattctgacgggacacaattgagctcataacaagcaataaacattattttctcacacagttactatgagtcagaaatttacgagtcatttagctagctacttctggcttggggtctcaaagattgcagccaagatggcagctagggcttcattatcatcagaacttagtatagtatatatcctatatttcattcttttcttttttcttttttttcttttttttttttttttttgagacagtctcgctctgtcaccaggctggagtgcgtccttgtcgcgatctgtgttcactgcaacctccgactccctggttcaagcgattctcctgcctcgcctcctgagtagctgggattacaggcacgcaccaccatgcccagctaagttttgtatttttagtagagacggagtttcaccatgttggccaggatggtcttgatctcctgacattgtgatccgcctgccttggccttccaaagtgctgggattgcatgcatgagacaccgcacccagcctataccctatatttcattctgcctttcaaactaccaagttttctgttgccttatgttttacaatatactttaacctatatttcctctcttatcagagtcaggaatgaaacagtatcttgtatttttataagataagaagtttgacacacttttattttttaatcacccatccttagtttttattaacattagaattttggattcagaatatcattgttctttggaaaataatttttggtaatatcattcggctttataatcaaaattacaatgtatttttaaggcacatttctattttaaattggttaattactcagcatttacccttttatacatgacagctccattctttttgagacagggtcttgctctgtggcccaagctggagtgcagtggtgttatctttgctcactgcaacctccacctcccagatttaagtgattcttctatctcagcctcccaagtagctgggattaccaagctccgttctttttctttctttctttttgagacagagtctcactctgtcacccaggctggagtgcagtggcgtgatatcagctcactgcagctcccgcctcccggggtcaagcgattctcctgcctcagcctcctgagtagctgggactacaggtgcacgccaccatacccggctaattttttgtatttttagtagagatggggtttcatcatgtaggccaggctggtctcgaactcctgacctcacgatcaacctgccttggcctcccaaagtgctgggattataggcatgagccaccacgcctgactgacagctccattcttaatgccctttatttgcttcatttatcgctctgttgtagtacatcttcaaataattttttcaaggatacatgaatccttgcatatctgagaatgtctctttttaatacatgaatgttgaattgcctgggtgtaaaattctagaggtaacatttttttcttttaaaacactgtacagtggaatcattctgattcagttgcaaggttaaaaaattagcatagaaggcaaaaatcatgcatagaagttaaaatcactctgaatttaattccttaaaatgtccatcataccagggctgggcccttggaaactcaaaagcctaggatgatcttctatttttgcctttgactgaagttcccctttctctgaagcagagaaggccaaacatctgctagcaaagcaaaagtttgaaattggattcttgttaggcaaaacataaattattctatgtagttatgtagattggtcccaaaggcccaggccttggaagaagtctgtctgcttgaaaggaccaccaagcaaagtcaactaagattgagcaccatgtgttctgagaagctttccctgattctgcagcccctccccgctaataaagctttggtaggtgcccctgtgcttcccttttccattctgtggttgtctccgcatacgttgcattacagtaaagtaatgtgttgagcctccttgggacagggctttggtctgatttgtctttagtgtctttggaagatgaagatgggccgggtgcggtgactcatgcctgtaatgccaaggagggaggatggcttgaggccgggagttcaagactagcctgggcaacattgggaaaccctgtctctacaaaaaataaaaaaagggttgggtgtggtgatgccctcctgtggtcccgatacttaggaggctgaggtgggaggattacttgagcctgagatgtcgaggctgcagtgagctatgatggcaccactcactgcagcctgggtgatatagcaagactctgtctaaaaaaaaaaaaaaaaaaagatgttgatgattgaytggttgaaagtttgttaaactaacaggaagatacagtattctagaaacacaatactaaccaatttccttgggttctgttattgtcagataaacttcttaattgtgccaacgttgtgacttcaaaaactgtacatttcacattgaaaagaaaaaatcaacagagaacatttcatccctaggtgtttcatgtcctgtgctaagcgggccggtgagaagcccaaggtaatatgcatcaataaacccactttgtttctaaagcaaatgctcttgctttctcagaacacatcacctcagccttccagaggaataaaataatggtaagtttaataaaataattaaataaccaaatccttactgatggggtcttagtggtcagagagtattccacatttctgttataatatcatagcttcacagaccctttgtagattcttgtgtcacagacaatagtcatttactctaggaagcttatcctgtgaaattctattttctcttatttatttccttttttttttgtatttttttgtttttttgttttttttttgagacagggtttcactctgtcacccaggctgcaatgcagtggtgcaaactcggttcactgcaacctccacctcctgggctcaagccatcctcccacctcagcctctcaagtagctgatattacagatatgcaccaccatgcccggctacttttttgtatttttgatagagaaaatacatttttgctatgtttcccaggctggtcttgaattcctgagctcagatgatccacccgcttcagcttcctaaagtgctgggattacaggcttgaggcaccacacccagcatatttctttaaacgtataaaagggactttcagtgagaaagaaaaatacatccggaggatgtgccatattttccttttattttaattacaaaattacttcatgtttattgtgggaaaacatagtagtatagataaaaggaaaataaaaacacactttgttacatttctttctagaccaaaatttgctatg

SEQ ID NO: 94680 - DNA, 58254 bp, Homo sapiens
acccccagcccaggtcccagttctagagaagagacgtggggacatttgaacgtaagcctaagaggctgaggccgggtcccaaagcctgttttctccagctttcagttctctggactgaaaaaggcatcttggcacttcagagcgagacaataagaaccagctgacactgagttccccccacccctgggcaattcccagcagcctgtgtggggggcaggggaaaaagagcgctgaacaggggaatggctgagcaggggggaggcccgactccctgagcccagcccagcccgggctcctagcagaggagcagagctggagagcaagtgacagggcctatcacagaagctggcctggcccacaggcagccaaccccagcttccagctgcagctcccgcaacagcacccccatgcctgccacacctggacactagctctcacaggagccgttctgggcatgcgagggttggatctgccaagactgaccagggcctcctcccacacctttggccacagaaaacagagtatgttaggcacctcctggctggggtggaacaagacttatggcctcagagagagtaagagcctcactctgtggctgtgatcttaacctccaactaacttagagacaaacgggtgctatgactggcccaggttccctctcctcaaaaatcagctgtggaacctaagagggagaagcaccagggtgacgagtgggccaaagaggcgccaggaggggagggaaagaaggatggaaaccaagctcatggtggggtggggagcagagccctggccacagccaggatcctgggcctgagacacagaatgcgggagcagggagcgggaggtggtccctgggcgggagggggagcagccgcagatccaggccagaggccaaggcagctgccatggtgcttatgtcatcccagaagtggtcataagagcccccccaccccccaagggccctggaattccagaaggggtcaaaggtcaacctccctctagctcccatagaagaagttgcaaggcgagaaggggtggaggcaggggttcttcccattctgcccacaggaccccagagccagccccctcagagccacaggagctgggccaaggaagcctaaggctccagggcaggaggagcctccagcccagcctttctcccagcaaggccctcccatgtacctgggcggagcagcggcttcagactgccccctgaccttccagccagaggtgattcaagctggggaagggactccctgggtcctgacaaggtccttctgaaggcagcacccacacagccatggcccagaggaaagacagaccctcccccctgccgccccgcaaccacacaaggcccccgagagcacttggttcttcggtcagaaaggctgggacagagcagagttagacccaaatcctgaggccacctactgccaggctggtcagacttctgtggcagcccaggaggctgactcccctcaatcaaccagttctgactggagacccagccttcctacccacccctggactgcaagactggcaggccttggagggcctccttaggggctaagaactggcctgagaaaacaagccctctccttggacctctgtgtaggcaacatgccagcccatgggcccttcgggaccaaggactaagggctagttgctagtaagttgtcaatgagtgttgaacactgcaaagacttggtgatctttttttttttttttcctgagatggagtctcgctgttgcccaggctggagtgcagtggcatgatctcggctcactgcaacctccacctcccaaattcaagtgactgtcctgcctcagcctcctgagtagctggaattacaggtgcgcaccacgatgccaggctaatttttgtatttttagtagacacagtgtttcaccgtgttggccaggctggtcatgaactcctgacctcaggtgatctacctgccttggcctcccaaagtgctgggattataggcatgagccaccgcacccaaccagtgatttttttctttgagacggagtctcacactgttgcccaggctggagtgcagtggtgtgatctcaattcactgcaacctccgcctaccaggttcaagcgattctcccgtctcagcctcccaagtagctgggaccacaggcatgagccaccacacccagctaatttttatatttttagtagagacggggtttcctcatgttgcccaggttggtctcgaactcctggcctcaagtgatccacccacctcagcctcccaaattgctgggattacaggcaaagacttggtgatcttttttttttttttttttgagagagtctcgctctgtcgcccaggctggagtgcagtggcaccatctcagctcactgcaagctccaccgcccggactcacgccattctcctgcctctgcctcccgagtagctgggactacaggcacccgccaccacgcccggctaatttttttatatttttagtagagacggggtttcactgtgttagccaggatggtctcgatctcctgacctcgtgatccgcccacctcggcctcccaaagtgctgggattacaggcgtgagccaccacgcccggcctgacttggtgatcttaaagtcagggagttccagcgtcaccctatacaggagcctgtccccttccccacacagcgccggcctcaactagggctagaatctccctttttcagattactagagagctcccccatcctgagttggtcattttcagtgtcctctttgtgtttgccaccctgtgctcagcccccacggagaccccgacagcctgtgcagagtggacagtccctgtgttcctgccacaccatcaccattttcaatccgaatatgctcctccctcatcctctggcagcctggagttcttttgtctctggaagggcaggtgagagaaggggacagggtctcttgccctatcctttgggccttagagcctgagtcgagagaagtttagagtcacttgaattaagaggcttgtagagaagacagtacttcaggtaccaagcagagaaggcagccagagtcctctctttggcacacaagggttggggttgggaggtggctggtgggcgatgtgcacctctcacatgctcagacaccctggaggcggggcacagcagagtgagagttccccagcagcccccactgtgggacaggcgggggtggggtcaggaacatcaggacaccagagggcagtgacccagggcagagtcggagtggagagccgggggtggccagctgcagccggaaggaacctaggcagctccagccaacgggctctcaggcctctcagattagagaggtatgtgggctggaacctaaacacaggatgtgaggtccagaggaaggggaccaaagggggagggggcggaagggagtgagggcccggtctgttcagttcaagcctcattaaccccttcaggaccaagtgcagggagccaagccaactggaagcatctgtgctcccccaccccgctggcctctggcgcccttccccgttgtcccgcctctgctgatgggatccaggaagctctgggtccaatgaagacctggagcagccccttcccagaagagaaggccggccaggagtcaagagatggtgcccacagtacagtgtctgaggccatgaactagtcacaagggccagcctgagaacagaaagaagggactttaaggacccatcactccaggtgtggaacttcacatccagcccttccctggccaaggtcaagcagttctagaattagtcttcccaggaagtgggaggagctagcagaagggacagagtagaaataaaatgtctcctccccacttggaagagagaaaaggccacctccttggctgggagaacagtgccaagagggcaggagacaccctcggctgcctgccagcagggggagctccaggaagcctcagctctcctctcctcagcatctgatttgagagcagggaaaaccatttgcatcaaaatccctgaagcggtccataaaaatgccaattctcggcctaccctcagacctcccaccactcagtgatcatacacactaacatttgaaggcagcactttggagatgcctccaaagggtaagacccttcccaggtatgccatgggagagccagactccgactgcccgagctttgaggagcctttggccacttgataaaggagaagggaggcccccatcgcccccactccccatgcagcaggtccttgcctcagcctccaagctcatcaggacagagctggactgcagcttttcggggctggggtggctggtgcttctctgactgcccatgccccagatgggagattccgaggccccaagtgtcagaggggctggcctaagattcagagcaaaacagtggggtaggaggaagcaggagccccaggttccacatcttttgctttgtccccagcccaggaccaagtgcggcagcagggacgggcacactggccagcccccactcacctcggccttatacatgcggatgagaccctggttcactttggaccaggaagggacggcgctgatgttccacagctggttggagtgctctgcaaatgggccagtcttcatctgaaaaagagaagccacaagctgaagagacaggttctggctgggagctcatccctcctcccctgcagcaaagtcacacccatgcatgcacacacacacacacacaaacgcacacacacacaatgcacgcacagacacttggggaccaagctatagcatctgcctgaggggcaaacatacaaacaggcacatgcaagtgccagagacaaggttcccctttggccctcaaggcctgctaggaaaatataacattccttgcccacctacccgcagtcacccctctttctcccacagccaaaaaaagggggcctgattcctatcgcccaccaaatccagcagcctcaggaagataagatctccacctgagcttctggtgtcgttcccaccgactccccaggagcctcagagcgcctctccagcacagggattcacttgggttcagataaatagcagcagcagctaggccccacccctccaggcccaccccctctcccccaggcccccccacaggacacgtggtctgcacctgccaccagcagagctagaagagatgaggaaagggtcaatttgcaagaggaccaaggtgggtatgaccaaacccaggtatccgacagccctctgcctgccatgcaggcagggaagagagggccgatgggaggcaggggtgcctgaagcagcagccagcctggcctggccaggaggtggggaaggggtggccgccacagcagctgaaagaggcaggcacaaggacggctccattcctggtcctccctcttgccaaagagtctgaccctccaggacggaagagaaagattctgcagccagcatgaagttcccatgacatcagaaaccacagagggacgcctgtgtgcctgagcatatccccctgacaccgcaagtccagcacatttgtatttattaaccaagcagttcataattcccctcgacacagccccccagctcataggcagcatttacaggggaacagggctctgtaccccagacccatgctgcagaaggaagactctgcaaagaggctgaatctggcaaagaaacagagacttggaaggttctagaaacatgcgggtgtcaggggagactgggttattttttgaaggagaaaagataagccagaaacgctctccaaaaaggggcatcagttcaccacaagagccctcaggagcccccactcttgagccatgggctgccacctggtgacccactcctggcaggcctcttacttctctagtaagggcaactgtgacaaaacttttaagatttaagtcaaaaaaaacctgtcattttatccccctcatttccctcccctggcccaggttcccaaaaagcccatccaaacacccatgttcaggagcaaggacaacaggctcctccctcccctcctcttctctcccaggctccaccacagccaggcaagagcccgaggcacccaacagagacaaagcccactctggtccctgggggccttgtcttggaccactcgcttcactcagaatcaccccaggctctctcctccaggagggcagccaggcaccccgagcctacaggggcctcacctctggggagctttgtttcaactgccctgctcaaccacactccacccccagcccctcccccacctccccaccctaccccaccccttccccagtctgcaggctccagccctgtgcacacttccaggcccaggaaagctcagggagcatggagctgtgtaaccagtttcactctctggacagggccctctgagcaagcaaccaggaggcaccctgtcggctttgtcggctttgtctgccaggggcctgcccrgcaagggctccgaggcaaaggcaggcagatgggcactggaagacaagagcccctgcctcctggccagcctcgcctaccagggccaaagaacagatcctcaaaaggcctctggcagagccagggctaggcccatgtcctggagctccagtggccctgggcccctacacacagaaaggccagagaggtagtttctttggaggggctgcaggctgcccccaggccttcagtaccccagggtctccctaagtccttcagggaggttacagtcctttgcctgtaactctggcaaaggaaaacagacgagtgggrgaaaaaggaatcggggctggaagacaaagaaaaaattagctcattctagccacaaagggagaagagaaagaaccagaatgagcgagcgagctgcagcccgcagtgaccccaggggaatcgtgtgagtcagagcagccatattgagcaggaaattactcacagacgctgcgttcctgcctctccactccccagagaatcggccttttgtaaatggctcctctgtcagtaactggggggatgggcgggggtggggaggctctgcacagcgccttcctgtcagctccttcccttccagctgaaatctgatccctcccttcccaaaactccaaatttagaagccagattgaaactgaaattcttttcctgcctgccctgggctcttaaaggcgccagggctgcatttacagaggctgtagaggccctgcaaggtggggtccctcacctaggatgcccacgggtatcagggcagtcttggcatgagaccctgaaagggctgcctgattccactcccaagttctcggtgttttagttaatctcccagttaaaagagcaccatggtgaatccagggtctccagaggaaacactgcctccttcccaagcaaggcgtacagaactccatgcaagcctccaggtccccagtgagctaggccaggccactcaccaactagggactgcaaaatgctgctcactgctccgaggtggaagagggtgggcgctctggagaaccaacacaacgtgtgctgcaaccagcggccacgtggcaagatgggcccttgctgcagccaccccggctcctgggcacactcctcctagggtctactgttgaacaccatgcccaagagcctagacccaaagtgaaaacccrgacctgtggagaaggtgcggaacagccaacaactctaggcacgccctcccctccctgttccttctgctgcctcaaataaatgtcaccaaaccctctccaagttcagtgtgcctctcctgccacctagtggctactttgagatttcctctactggaggaactgggtcccaaactttggaaaagcttttggggtgtttataccaacaaaatcaaccaaccaactaaagacaaaattttaccatggaatcaattcccaaaatcctggagrccaggcctggcatgcctcctagttagaataccgacagggacccagaggcctggccarccgccgggggagcccaaacagctcagcctttcagccacacccaagaactcagtgtggcatctgcacccttcttcccaccctgctcctccagcttatcctgaggtcccccagggctcygcagacccccacattccactccacagagagcagcgcgtgactggctttcaaggcagtgagccaggctgcccccaagtcctcccgaccttgggcctgccacactgctgagggcagcagatctccgggaatgaagtggtggccgcccagccgtcagtcccggctccatttgctgacttggaaaaaatgtgtcattcccctctggcctctggagtttggcagaagcctgagccgaatgttgaccaggaagagcctggagccaaggctgctggttataacccagctttctccacctcgtcgggggctcagaatacacagcccggacggagagcagcccccgtggccagcatccacaggcctgctaggracctcactgaggcagcagacatccgtgctggtgtcgggaaagggactgaggagggatagaactctcaaaccctctccagatagctgagcgagggcgccctttggaaactggggcatggggatggcagagaggatgagaagtcctaacacstccctcaagagaggtccagagagcagagggtccccagctttcctgtgcagtcgcctggcacgtgtgtttagatgcaggttcctggctcttgtcccctaagattctgatgcaataagctgggatggagggcccaggaatgtgcgttttaacaaacacactaggagatctcgcacaagtggtccagggcccactgcaaggaatcctgccttggtgagacaataacttccagttccagaacccagccgtggggctggctatccagtgactgccaccacaggccaggcctgcgcactcccactccagcactttgctcgggcccacgtcctcaggcactgacagagacgtgtcccttcgacagaaaagctgtctgcaccagaagttcgctccatctcctctggtggtttcattttacacatccacagcacatggttctacagacccttgtggggccccaccgaaagatgctgaccctcccccacaaacctccgcccgccccgaccctttcagacctgctgcagcagtcaccaaggccagttagtgaccaagtcttagaccctcatctcaagactcctgtggtgttcaggagaaaytgaaggagaactgggcggaggacctgacagtcagcagcggctctttcggaagaggcccagtggtgcttccttttcaataacccgctccggccggccctgccattttgggcagcagctctggctcttctgatccactgtaaggccaccagccttggttcatctgagcctggaggcagccatgggcttctctctcacccctcctcctcacctcggtaataaacaggatacactccaggaacatgtagtccttgtggttctcattcacggccttctcatccacaaagtgtctgggctccaggtatgggtggtctgggaaaaggaatgggccccagcgttcagaaccaggccccacgactacctgggcaacccggcccagcagtcacacccccccaggggcctcagtcctgcccgtggtgccctcaacacctcaccttgaaggagcaataagtaactctgggtttgtgtattctaatgtgctaagctctagctrcatggcgttggacgcatgacttcagcctgccaaggttcagtttcctcacctggacactggggacaagaagagcacctcctcctaggggccatgacaacaattaccacacctacagcactcagtatggtgcctggtgcaggtgccagtcagcagagccggcttcatgctggcagacccttcgcagtgtcactgagaagattcggggaggcaatgcacccgaggccacaactaatggtcatttatgaatatcagtctgtaggcagttcattcttcatcaaaatagagatgatcaccyacgcccatcctgaaaactagcttcaagagttggggagtcaccagagcaggcctctctgagccccacaggaagcaggcccaccrcccagcacttggyggctgctccctaacgggcccctttgcacacagctcgataataacagtggatgacactggtcaccaaatcaaaagggtccctcattttcaacataaaaccccacagctgctgccaggagctggggcgcatttcacaccagtccattatgcaccaggcgtgcgcccttgctccagcccatgtcacttcccattatcttggtggcgcttggcctccgcctcctccagcccaccacacgggctctcacagcagaaggtcgacagtaaacagcctccctcaatagctggtctaatgccctgctttccaagctgtcactgtctgccctgggcaggaagaagggaaggagggagcgcaggaggggcaggggagggccacagaacgcagccttggttgggggtggagggataggcacctcccgctcyagtacctatcagctgcgaactgccccagatgaagggcagaaactggaagtcatccagaccccacactccctggctgccggctggctccatcctgtatgttttytggagtttccgcataacctcaaggtacctgcacaggaggacagggaaagggaaggtagcaaaaagtaaaaagacagtctcaccctttcggccactgggagcacaaggagaccccaaaataaccactgaagagtgttaactggtctcaatttcaataatgtagctttatttcccccaacaaacactcagccatcttttggctcaggaaaggcataaaaatcactgattaagggcccgggcacggtggctcacgcctgtaatcccagcactttgggaggccgaggcaggcggatcacaaggtcaggagatcgagaccatcctggccaacacggtgaaaccccgtctctactaaaaatccaaaaaatcagccaggtgtggtggtgggcgcctgtggtcccagctactctggaggctgaggcaggagaatggcatgaacccaggaggcagagcttgcagtgagccgagatctctccactgcactccagcctgggcgacagagcaagaccctgtctcaaaaaaaataaacaaataaataaataaaaaatcactgattaggaaggtgggttttggtgccatcaactcctgacaacttgtaaaaccctgggcagggcctcagcctctccagcctcagttggcctgtctgaaagctaacacaagtcccagcaggttatctcctaggttcttctggttccaaccttctatattatcagaggctgcatatcaaccacctgtgaagcatcgagcactgctcctgggctccgtcacaggcctgctgcagcagcactgctagactggggcccgcaatggggattttaagagctctgggtaactgatccacatcagtgctgcccagcgactggcttgggtggtgtggggcagcaggtcagagtctgactacctgggttcagctggcgtgaacccagtgaagacaccggatatctctgtgcctcagtttcctcatatgtaaaatggaaataacagttgctatttcatagggttgttgttagaattaatgagttatacataaagtgcttagaattcttcctccatatggtcaacactgtgtcaatactggcagacattatgtgacaattctttttttttttaagacagagtctcactctgtcacccaggctggagtacagtggcacgatctcagctcactgcaacctccgcctcctgggttcaagcaattcttctgcctcagcctcctgagtagctggaattacaggcgagtgccaccacgcccagctaattcttgtatttttagtagagacggggtttcatcatgttggccaggctggtgtcgaacacctgacctygtgatccgcctgcctgggcctcccaaagtcctgggattacaggcgtgagccaccgcgcccggcctatgtgacaattctttcacttgcttttacttggaggttaatttgaacctgttggaaaaaaggcttggacactccatccacagccagagcttgattaggacaggacaagagaaccatgagctactcaggagaaccctagagcaccccatttcccagtttgaggaggaaacaratggcccctcacgccccctcctccaaccctcctgtcctttctctcaccgattgaacaccttgaagacaatagctatttggtyatccaccyggagcaccccaatcttgcagagacagcagaggaaagcagcgaaggctgcctcatgccctggaggagaaaaacaaccagcgttgacagtagtccaggtaaaggactgggattgttttagtctcccagaatccraatcattgataagtgcccctctgaggagggtggtcaacatggagacaatgagacctcttccccattcagaaagacttgctaggccctttcctttcaagaactataataccagtactggccgtgcatggtggctcatgcctgtaatcccagcacttcaggaggctgaggcaggcagcttgcttgagctcaggagtttgagatcagcctggccaacatggcaaaaccctgtctctacaaaaaatacaaaaattagccagacatggtggcatgtgcctgtggtcccaactactcaggaggctgagatggaggatctcctgagcccaggaggttgaggctgcagtgagccatgataaggccactgcactccagcctgggtgacaaagtgagactgtctcmaaaaaaaaaaaaaaaaaaaaaaaaaaaagaactaccagtactataattccactcgtaaaagacccgggctggacatttacatttcattacgtaggtttaactcactcagcaattccaccatatttactgagcacctactatgtaagcagtcactgtccatgttacgcactaggagacagtgacaagtaagtccttgccctcagaaagtttatgatctatcagggacaacagacattataaatatacagtcactactatgattccagctctgaaggagamagacagggtactaactggaggatatcacagaaggaccctgacgtaagggttcaaggtttcccctaaggaagtaacatctaatctgaaatctgaaagatgtgagctggcaaggcaaagggagtgagggaagcaagaaatgcattctagccagaaggaatagcatgtgcacaggccttgaggcaagaaaaagtttgatctgtttgaggaacactaaggaggccagtatgtcgaaggcagtgagagcaagggagaacgtgtaatgacaggaggctacaggtcacatgggccttttggccataggaaagagctcagactttaccctaagagcaatagggagccactgcaggcttctaagcagggaacacatgatcagattacagggtgaaaaagtatcctccttcctttcccagtcatatcaaacaggaatggtctgcactgtaggaacaactcactggactgtsattgaatcccattgttcacaatgtcacacaaaacctatctggagggaggtgagaagagaatgtgtcagagaatacttctgtcctgtctctggaggacgaagacccctccagggcctggaagcttgtgagctcagtttccttcccctgccacagtttccaattatgaccagacagggcccaggctcccattgttcaggggttcacatgcagctggggcaccaacccctgctgacctggccagtcttccctctttgatcttttcctgctggtcttagtcaaagccccacccggtccaagagggcccttctccagggcctgcctctgtggctggggctccctcctgtggatcacattccccagacaaggggagggctgagcggtgccccatctgcctgcctcagggaaggaaggcgggccctcaccaaagcagaggtcctccttagctgcacaggccaggccctgacctagagaacgcctcccttctctatttttgagagatggggtctcagcatggtggctcgacaggccgtgccctgacacagagaaygcctcccttctatatttttgagagatggggtctcagcatggtggctccacaggccatgccctgacctagagaacacctcccttttatatttttgagagatggggtctcagcatggtggcttgcacctgtaatctgagcactttgggaggctgaggtgggagaacagcttgagctcaggagttcaagaccagcccaggcaacatggcaaaaccccatctctacaaaaaatacaaaacaatcrgctgggcgcagtggctcacgcctgtaatcccagtcccagcactttgggaggccaaggtgggtggagaagtgacctcaccagaggtcaggagttcgagaccagcctggccaacatggtgaaaccctgtctctaccaaaaacaytaaattagccaggtatggtggtgtgtgcctatagtcccagcagaataatcgcttgaacccaggaggtggaggttgcagtgagccaagatcatgccactgcactccagcctgggcaacagagtgasactctgtctcaaataaataaataaattgccaggctggtggtgcacacctgtagtcccaggtactggggagtggggagatgcagaggtgagaggatcacttgggcccgggaggtcaaggctgcagtgggccaagatcacatcactgcactgcagcccgggtgacaaagcaagaccctgtctcaaaaaaataaatatataaataaaaataacttaaaataaatttttaaaaaagagatggagtcttgctacgttgcctaggctggtcttaaactcctgagctcaggcaatcctccccctcagcctccaaaagtgctaggattacaggcacgcaccactgcacctgtctacacttcccttttaaagtgtccacacactccctctcctcaaagtccaggtcccttggcttacatggaccacagatccaaacagcccaatagcacagagaatgtggctaagagacaaggggttcaagggagagggtgtgccacgacactgcaaaggccaccaagaagcgttcccatttctcaaagcttcagtaagctgctgccttgacacacagtaagtgctcaattaataattattttggtgatgatgaggagctcagagaccattttcacaagaacagaaagcagcgctgcgcaagcaccatgcacggggcatcagctccccctggtggaccacagcagagctgcagcatccgggcctccctgcatgcctacgccctccctgccggtgaagccaccctaaccccagctggccccaataggttgcaggtgcttggcgaattcttgattgctctcactygctcagagggcccagagaccacctgaagcccaaaacagaaagcagtgaagctagataagtacagagccccacaagcagcagatacctgtgccgtagtcaatgcgcgtggagttccccactgactcctttaggtaaacagccacctcaggcacagcagctgccagatgggtagggaccactgtggccaccaagttttctgcttcctggtaacacaagagacacaaagtggtggcagcatattaagcagcatcccagtgggcaggtgcccaggggcagcacctgactgggggcccacactgccttgccaggccagcttggttcctgttctgacaggccacagaaggaaggggagggacagcatttattcttccacagcagaagactacccaggcgacttatcatcaactgatttttccagggcacaggagtctaggggcaaaacaggaggaatctggaaaaaagcctcaaccctcccatgtggtaactcactggagccccacagagactctggaaggtcagtgctatgattcccacacaggccaccttccttcacactctcaggtcagcaagagctggtgtcatgtgccatcaaaagacgtgcagaagaatgttcacaacagcactgtttagagtagccaaaaggtggaaatgcaatggaaatgtccatcaacagtgaaatgaataaattgtggtatattcatacaatagaatactacacagcaaagaaaaagacctatagctagacatgaaaacatggatgaatctcagacatgacattgagcaaaagaagccagagagttatacgaagttcagaaacatggaaaaaaatcaatttatggaatagaaatcagaataatctgggcgatatcaattgggaaggggagcactccagctagaatgttctattgcttgacatragtggtgaatccatgggtaaaaaacttggcatgagtggtgagtccatgagtaaaaacatgtaaaaatccatcaagctgtaaagctatgatttgtcagctttaagatataacttaaggctgggagcagtggctcacacctgtaattccaacactttaggaggccaaggtgggcggatcacctgaggccaggatttcgagatcagcctggccaacatgatgaaaccccgtctctactaaaaacacaaaaattagccaagcatggtggcgcatgctgtagtcccagcaacttgggaggctgaggcaggacgattgcttgagcccaggaggtcaaggctgcagggagctgagatcatgccactgcactccagcctgaacaacaggaaaaaaaaaaaaaaaaagatcatgtaccatcttaagagtccagaggcaggcccgggcgtctcttgggaacagcacttcactgggtcctgagtcctcccctctgctctatgtgaaaatattgggccagagcaattaggacccaaatttccttaagctcagttgtagacaactggcatgagccatctcctggaaagctagtaaaaatccaggttcccagtccctacccagacctgtagactctgcttttctagacagggtctgagatcctgcatttttatttttgtttgctttgaataggtaacaccttcgtaagattcaaaaataaaaacatcagtagaggatcagttcaatagactagtccatccacaccatggagtatgcagctagcattccaagtgggtgtgcaatggctccatcatagctcactgcagcctcaaactccagagctcaagtcattctcctgcttcagccacccaagcagctgggaccaaaggtgtgcaccaccatttcttattttttgcagtaacggggtcttgctatgttgcccaacctactcacaaactcctgggctcaagtgatcctcccgccttaacctccccgaattctgagattacatgtatgagccaccgtgcccagctatgaaaaaaattcctttttggggccgagcgtggtggctcacacctgtaatcccagcactttgggaggccgagrtgggcggatcacaaggtcaggagatcaagaccatcctggctaacacggtgaaaccccgtctctacgaaaaatacaaaaaattagccgggcgtggtggtgggtgcctgtagtcccagctactcggaaggctgaggcaggagaatggcgtgaacccaggaggtggagcttgcagtgagccaagactgcgccactgcactccagcctgggcaacacagmgagactccgtctaaaaaaaaaaaaagataaaataaaaaataaaaaaaattcctttttatagctgcacagtactccatgatattgatggactaatttatttaaataatcccctacagatggatacttggaacatttccagtttgctgtaatacagtgacttaataaacagccttgtagtgcagagggccgtatgtgcacagtcgtgtttcccagaagatgaccaagcagagtataaactcatttgtaattttgctaagtgaaattgacattttaacaaactgagatttgtatatgcctagaagcgctatacaatgcaggcccttccccaactggtgccagaaccaccctcactgccagcccagtccctggcctgtcctgtggcagcctcacctcatcaagtttggcataccaggtcctgtatgccttattcccaaaccgagagggctggtccactggaggagtctcatcaatccacctgtccagcgtgttgagaagagcgactagtttctcaatggcctgtggaggcaaaatagaggggtccaagctacagagcaagtggctcccgcttagccacagagggaagtccactgctgccagacaatgaccccttggcatggcccctactggsaactctcccccatccctctttcttccccactgttctgaatatgaaggagggtcaggagagcatgataggctttccagagagggaagcacactaggctgatgggacagggacggggtggctttagcacctggtttctgtaggcagcctacccatgggctgctgctatagagaagctaactccagccctgacatctttttaaaaagactttatggaagccttttgttcagtatgcaatacctactcatcataaaaaatagaaatataaacagaagaaaatgaaaatgaccagtaatcctgccacccagaaatacactaaacttttttttttttttttgagacagagtttcgctcttgttgcccaggctggagtgcagtggtgcaatctcggctcactgcaacctttgcctcccaggttcaagcgattctcctgcctcagcctcccaagtagctgggactaaaggcgcacaccaccacgcccagctaatttttgtacttctagtagagatggggtttctccatgttagtcaggctggtctcaaactcccgacctcaagtgatccacctgcatcggcctcccaaagttctgggattacaagcgtgagccaccgtgcctggcctacactaaacattttaacatacccttctgtgttatcttctcatagtgttttacatggtttagcatggtgggcctggattcaaaccccagctaaaacaccatttagctgctgtgagaccttgagcaagtgactaactctgagcctctcagtttcttcgtctaaaaaatggggctgatgataaatacctccgaaggtgcacagtgcccggcgcggggtaatggtatgcattcatcgcaggacacactctgctttgcagcctgctccttttcctcatgaacctcattccacatctacatataaacataatcttatgacaacttttactaagtgaataacatttcatcgtgccactgcattataattaatttaattcctcactgttaaatgtttgggttatttccacctgtttcactacctatttcatacacaatgctatggtaaatcagcttgcaactcaatctttgtggaaatgccagatcatcgtgtgcaatgctttgtagggtggcagagtttgagagcccatccccctacacctttcccacagaagacagggaccaagaagtagaatcggagtcagaggtgcgggcagcattggcacataaaatgttactcaatgaagaaatcgggtggctgtctatccaacccaaagatcagttagaaggtgctccttccaggttggcttktagaaatagcccagcaccagggccggtggaaaatacaacgcggaggctatctgcagccattcagtcctgagaaaagagtccctgccaggaagtggatcttgcctgtgtctatggaaacaaacggcataagaaacttacaggaaatcctggcactgggtargaactagcagggtgatgcccacatgagaagttgcgcctgggagggcaaggcagaccaggcctgccatgtgcaaagactcagccaagagctatgtatgtacctggggagaggcaggcttaagctaatgaaacaggctggccatgcccccagctgcataygtgaaaccggccctgagtgctgctctctcttatctcccctttatctaggcttggggcatgggaggacagaaaaagtagcctgtaagaggataaatttccctttacacctggctaaggcagagggctaggatggcataaagctgccttgctgaaatgtgagagcgctgccagagcctggctttgtgaaaaaccaggaatggctgataagcacaggccagacctaacccatgcagaaacgggggcttacaatggatggcacagtcatcttggccccaggaagcactagtcagccccagattccccagggatctcagtcttaggcgaggcactgaaggggacagagaagacggagtcacaggagccaggccccagctgctagctcagctgggccaatgaataattcaaaggctcccagctcctcttcaggagagggctttttgaatgttgtaggggctgcctctattgtttgctgtgttgggagagaagggctgaaagaaagggaactggggctgaaacaccttcgaggcacaaagaacaactccagctctcccattctccctaggccagtgtttcctttttggatttcaaggaccagtaaaatcttccctaacattttactgaccatttttgaattttgcccccttgtaagttttaaaaaagcaaacagaacaacaacaacaaaaataaatctcttatcacatttattttgcaaaaatcgaaaatgttaacccccataagaggaggacaggcatcatttaaaataagagctagctggccaggcacrgtggctcacgtctgtaatcccagcacttacggaggccaagacgggcagatcacctgagttcgggagttcgagaccagcctgaccaacatggaaaaaccccatctctactaaaaatacaaaatcagatggacatggtggcacatgctagtcgggaggctgaggcaggagaatcgtttgaacccgggaggcggaggttgtggtgagccgagatcgtaccattgaactccagcctggggaacaagactccatctcaaaaataaaaataaaaataaaaataaataaataataaaaaaataagagctagttttttttttctttttgagacgaagtctcgcactgtcgcctgggctggagtgcagtggcaccatcttggctcactgcaacctccgcctcccgggtttcaaaggattctcctgactccacctccgaagtagctgggactacaggtgcctgccgccacgcccagctaactttttgtatctttagtagagacggggttccaccatgttggccaggctggtcttgaactcctgacctcatgattcacccgccttggcctcccaaggtgctaggattacagtcatgagccaccgcgcccagccaaaagctagctttctatgcaacaacactaytgaaaattagaactgactaatgcctaatggtaacaatagctaataacaatcgaagtatttatttagtatgtgttaggcgctatgcaaaagacaaccactactcgtgggatctcagtgaattttccccagggggccatgactagtctgctgactcttaccactctacagatgaggaaacagagggtcaaaaatgattcacaagttatgaaactagccagctggactccagaacccaagcatgtaaccacactgcaatcctkccaaagtacagcccttgagctaagacaatacctgggccgggcgcagcagctcacgcctgcaatcccagcactttgggaggacaaagcacctgaggtcaggagtttgagaccagcctgcccaacatggtgaaaccccgtctctactaaaaatacaaaaattagccgggtgtggtggtgggcgcctgtaatcccagctactcgggaggctgaggcaggagaatcgcttgagcctgggaggtggaggctgcagtgagccaagatcatgccattgcactccagcctgggtaacaagaaaaactcaaaaaaaaaaaagacaatacctgcttggtgtggatggctaccatcaaagccacgggcaattaggggacttggcagctaaggatttgctggggtaattacaaccttcccctttaattagccttcctccacgacattcctggcccactgagcacagctgagcatccctcaccacaggctccaggaggaaccccctctttccccagccatcctgcacccagagcctcagtcccaaaggactgagtgagcccaaaaggaacccaaaaagccactaatgggcctggctcccaagggaaggctgtctaccagaagcacaggcctggttctcctgaagtggacagaacaggacctaggtcacctaatagccagacaggcccagcaataggcagctctgccaggggccgggtatgagggtgaggcacacagtgttaatcttggggcaggtggaaaaactgggccagggcagggctacatcttacccaacaggyccaaggctgtggctagagagctgggtaggccaaagtaaagggaggcccttcaggccctggtgtctgagataagagactcaaggtgggacatgaacccaagaggctcctggaggcctaggtcctagccctgggagacagcatccagcaaaagcaaacagccagtaaggccacacctgccaatcagtatctgcctcccctcagctcttgccctctctacacaaacaaaactatctctgaaacaacgtccaaaaagcacccaccaggcagtgtgaacccaaacgcaaaaaaaaaatgcatgtgccctttgactccacatttccacgtctaagaatgaatccttcggaaacaaggcccacagatctatgtgcggggatgcaatgatatgcgaggagcaatgtttaccaagacaacctaaaagtctgaagatagggggctgtttaaataaatgaggggccaagcttggtggctcacatctgtcaccccagcacttcgagagaccaaggcaggaggactgcttgagcccaggagttcaagaccaacctgggcaacatagtgagaccctgtctctatatttaaaaaaaaaataaaataagataaataaatgagggcacagctcactgcaggagaagagaagctcttgctttcctgggtgaccactgtcaggaggggctgccctggaagctgggtatgagaaacacagggagagatcagctctgctgtgaatgtcatacacatgtctattactgatctctccagtgagcacatttactgttttgtaatctgttttaatttcaagttatataaaaacaccaggccaggcgcagtggctcatgcctgtaatcccagcactttgggaggccgaggcaggcagatcacctcaagtcaggagtttgagaccagcctgaccaacatggagaaaccccgtctctactaaaaataaaaaattatccaggtgtggtggcacacgcctgtaatcccagctactcaggaggctgaggcaggagaatcgcttgaacccaggaggcagaggttttggtgagccaagatcgcgccactgcactccagcctgggcaacaagagcaaaactacgtctcaaaataaaaaaaaaagaaagaaaaaaccaattagcaaaaatactaactacaaaacagcatatttaccttgatctcaattttataaatatccatctattcacagatttcaaaaattagaaatatagatatgaaaatgtgaagtgcacatgtatttgggcgatcttattttctgctctggccccgtggtgggcactgagcccacaagactctggagctattttttttttttgagacagagtctcgctctgtcgcccaggctggagtgcagtggcgcgatctcagctcactgcaagctctrcctcctgggttcacaccattctcctgcctcagcctcctgagtagctgggactacaggcgcccgtcaccacacccggctaattttttgtatttttactagagatggggtttcacatgttggccaggatggtctcgrtctcctgacctcrtgagccgcctgcctcggcctcccaaggtgctgagattacagaggtgagccaccgcacccagtgactctggagctatttttggaaaggctgctgcagcagctcctccttgggcctacctcggagactctgtactcgaaggtcagcttcttccccttcacaccttcgttgagggtaaggatgaatccgatgtagtcagcgtatgcctaccaaacagagaggagaatggggatggggagaggggtggcagaccccccygccccacctgccccgagctccaccaggttaccaaagagctccgagctttctacttctcctgaccctgactcccaacccaatagcaggagaagcagaaacgtaatgccaaataccgacccctaccctccagaaaagctggcaagacagygaccacagcaacacgctgatctccagccagagtgaaccaagtactcactattgctgccagcagtttttttacacaatagccctataaggtagacactgctggcgccatcttacagatgaggaaaccaagatttcaagagaagtgatccgcccaaggtctcccaagaccaagatatcattagacatggagctaggacccagtagcctaacttcaaagctgagtgggcacatgcttgtccatgatgctctaccaccaggaattcaaggagtaccaccaagtgtctcacccccagcaatcagcgaccaaaggcgggccaggctgtctagttrgagtgcagatgcctgccacagacaggtctccccacacaaccattcccagctttcaactagacactcttcttccctgctgggctgcagttacacccaacacagggataagaaagcactgagggtcaggtattgtggctcaagtctgtaatcctagcactttgggaggctgakgcaggaggatcacttgaacccaggagcttgagaccagcctgggcaacatagtgagaccccatctctacaaaaaattaaaaagtttgccaggtgtggtggtacgtgcctgtggtcccagctactcaggtggctgaggtgggaggactgcttgagcccaagaggtggaggctgcagagagccatgatcatatcactgaactccagcctgggggccagggtgagaccctgtctcaaaaaaaaaaatagcattgaggtgcaggcccctagagaggcagttgctgggaacaagtgactcctgattggttttgtttcttcttcatccctttttcctctctctttcttcctttctccttatccaagccggggtgtccacagtaagccctgagacaagccctgatatctagaaggaagtattcctataccaagatcctcctgccagccatgggatgacccccagcaggccaggcctctccaaagcaactctctcagaccagggcaagtctgagcccctgtcctgactgcagctacactggaacacatggatgagaagcagcaaaggaagtgtcacatttggattcagacaaagaagcwggttctcaactagagcaatctggctcagagaagatctgacaagatctggagacaatgttagttgtgacagctggggaaaggcatgctgccaacatctagtgggtagaagccagagatattagtaaacgtcctacatggcacaggacggcctcctacaatgaagaattatctgcccctcaatgtccatagtgctgacattgagatgccccgaggtaaagcaaccaagatgatgaaaggactgaaaccatatcctttgagcagctgaagggaccaagctgccccctaggctgaagggactgttgatcctggtgaagattcagaaaagacatgataactatttccaaatactgagagggcaggcttgtgaaaaaggaatcagacaggtttagatggccccaagccccagtgaggacaaggcatagaagctgtagggtgtgggtctcctggagaatctgcccagcatgcaaggacccctgtgcccagccttctgcatgagcaacactctccagcccagctcaccaggccgggagcaggagcctgacgagaactgggccagaggccttccctgagaaattgaaattggctttcttttgctcagtctgtctttccacagcctgtaccacaagcctgrgaggtacaagtagttatcttctgcccatcatttcagctgagcagcagagaaagccagtctgtgcccagtgctctgggtcccagctcccaggtatttgcaggcttagccatatccctggccaaagtttccatgagatagcctcttctccccttgaggcactggctgccacacttgctgttacttgcagccaagaatcaaagtgactcgctccatcatttcaaacactcatgttcagccaatacagcaacactcaaggggcaatggcttaagagaaccaggagcggaactctcccgggctaccctggcagcagcctgaaaaagtaggcaaccttcctgataaagcatctctgagtactgcctctgaagggaagagacagccagctcccctgtcacctttctccctagcttctgaaaagtcaggctccaagagcaagaagggccaggaactyaccgcccgtcatgctaggaaaaccactgtctttgaaaagcccaagtttctcaccacagttccaaatggtacctgagaacgcttccatttgcccatgtctggaactgtgtggatctccttttttggaatgatgaagttctgagtggctggaggggcctcctctgaagaatcttgacaaaaaaaaatgaaaaaacaaacaggtaaatagaatcctcccctacaacacacacactccctttcacctttttttttttttttgagacggagttttgctcttgttgcccaggctggagtccagtgacacgatcttggctcaatgcaacctccacctccagggttcaagcgattctcctgcctcagtctcctgagtagctgagattacaggcacgtgccaccacacccagctaatttttttttttttctttgagacagagtctcgctctgtcgcccaggctggagtgcagtggcgcgatctcagctcactgcaacctctgcctcccgggttcaagcgattctcctgcctcagtgttctgagtagctgggattacagacgtatgtcaccatgcctagctaatttttgcatttttagtagagacggggtttcaccatgttggccaggctgatcgcaaactcctgacctcaggtgatccacccgccttggcctccaaagtgttgggattacaggtatgagccaaagcgcccggcctctctctcacttttaaaccaggactccaacacctgagccttagaataaaccagacacatacttccaggacagagtaagggcttgttaagccaaacccacagcctcctgccctccctcactctggggaggaaagagaagggcaatactgacaatcccttcaataaccatgccctcccttccctctcccccccagagcagaaccgttagaaaaataaaaccaagttgatgtttcagacatacacaggcaattcacagaagaaaaaaaaacaggtcaggtgcggtggctcacgcctgtaatcccagcactttgggaggccaaggcaggcagatcacaaggtaaggagatcgagaccatcctggctaacatggtgaaatcccatctctactaaaaaagtacaaaaaaattagccaggcgtggtggcgggcgcctgcggtcccrgctacttgggaggctgaggcagaagaatggcgtgaaccygggaggcggagcttgtggtgagccgagattgcaccactgcactccaacccaggcaacagagcgagacttcgtctcaaaaaaaaaaaaaaaacctaattgcagtaaacatttggaataaattgccaacctcctgaataagcacggacacgtaaattatatgtgatttctctttctggataaggttggcaaattaaaaacatctggctaggtgtggtggctcatacctaatcccagcaatttgggaggccaaggcaggcagatcacttgaggccaggggttcaagacsaggctggccaacttggcaaaacgccatctttacaaaaaaaatttaaaaattagctgggtgtggttgcatacctgtagtcccagctacttgggaggctgaagcaggaggatcacctgagtccaggaggtgggggttgcagtgagctgagatcataccactgcactccagcctggacaacagaacgagactctgtctcaataaaaacaaaacaagattccaggaagaggaaacaagaattctcccgctctgtgggtgggaaggacctcctaaggggacaatcttttggaataaaaaactgcatatacacaatgagtcaacaggtctacttacaggaatctatctttcagatgtgctcacggaaacacaaaggtgtttaatgcatcaaaaaaaaaaaaaaaagctgggcatagtggctcacacctgtaatctcagcactttgggagccccaggtgggaggatcacttgagtccaggagtttgacaccaacctgggcaacacagcgagaccccatctctactttaaaaaaaaaaaaattttaggcggggygcggtggctcatgcctacaatcccagcactttgggaggccaaagtgggtggatcacacctgaggtcaggagttggagatgcgcctgaccaacatagtgaaaccccatttctactaaaaatataaaattattcaggtgtggtggcgcatgcctataatcccagctacttgggaggctgaggaaggagaattgcttgaaccaggaggcagaggttgcagtgagccaagatcgtgccatcgcactccagcctaggcaacaagagtgaaactctgactcaaataaaaaaattttttattaattagaaacaacccaaatasgctgggcgtggtggctcacacctgtaatcccagcactttgggaggccaagacaggcagatcacgagatcaggagttcgaaaccagcctggccaacaaggtgaaaccccatctctactaaaaatacaaaaattagccaagtgtggtggcgcacacctgtaatcctagctactcaggaggctgaggcaggagaattgcctgaacccaggaggcagaggttacagtgagctgagatcgtgccattgcgctccagctctggttgacagagcaagactccatctcgggggaaaaaaaaaaaaaagaaacaactcaaatatcagttgataagacaatgggtaaataatgatatgcccaggtccggcatggtgactcacacctgtaatcccagaactttgggaggctgaggtaggtggatcatttgaggtcaggagttccagaccaggcctgggaaacatattgaaaccccatctctactaaaaaatacaaaaattagcctgacatgacggcacacacctgtaatcccagctacttgggaggctgaagcaggagaatcgcttgaactggggaggcagagcttgcagtgagctggaccgttccactgcactccagcctgggtgacagagtgagactgtcttaaaaaaaaaaagaggctgggtgtggtggctcacacctgtaatcccaacactttgggaatccgaggcgggtggatcacttgaggccaggagttcaagaccagcctggccaacatagcgaaattccacctctactaaaaatacaaaaaattagccaggcatggtggcgcacacctgtaatcccagctactcgggaggctgaggcagaagaaccgcttgaacccaggaggcagaggttgcagtgagccaagatcacrccactgcactccagcctgggcaacacagcaagactccgtctcaaatttaaaaaagagaaaaaaaagataggcccacataataaaaattttcatagcttataaaatgaataaaatctaggccaggcacagtgcctcccgcctataatcccaaaacttcgggaggccgaggcaggcagattgcttgagtccaggagtttgaaaccagcctggaccacatggccaaaccccatctctacaaaaaatacaaaaattagccaggtgtagtggtgcacacctgtagtcctagctattcgggggctgaggcgggaggatcacttgagcccaggaggctgaggctgaagtgagctgcactccagcctgggtgacagagcaagaccctgtcttgaaaacaaaaaaaaattagaaacaacccaaatatcagttgataagatgatgtgtaattaattatatgcccacataatggaaattttcataacttgtagaaagaagaaaatctagaccaggcacagtggctaacacttgtaatcccagcactttgggaggcccaggcggcaggatcgcttgagcccaggaattcaagaccagcccaggcaacacagggagacccccatctctacaaacaatttaaaaattagccaggtgaagtggctcatgtccgtaatcccagcactttggtaggcagaggtgggcagatcacctgggctcaggagttcaagaccagcctggtcaacatggcgaaaccctgtctctactaaaaataacaaaaattagccgggtgtggccgggcacagtggctcacgcctgtaatcccagcactttgggaggccgaggcgggcggatcacaaggtcaggagatcgagaccatcctggctaacacggtgaaaccccgtctctactaaaaatacaaaaaattagccgggcatggtggcgggtgctttagtcccagctacttgggaggctgaggcaggagaatggcgagaacatggaactcggagcttgcagtgagccaagatcgtgccactgcactccagcctggtcaacagagcgagactccgtctcaaaaaaaaaaaaaaaaaaaaagaaaccctgtctctactaaaaatacaaaaaaaattagctgggcgaggtgacgcatgcctgtaatcccagctacttgggaggctgaggtgagagaatggcgtgaacccaggaggcagagcttgcagtgagccgagatcgcgccactgcactccagcctgggcaacagagcgagactccgcctcaaataaaaaataaattagtcaggcgtggtgrcgagtgcctgtaatcccagctactcaggaggctgaggcaggcagaatcgcttgaacccaggaggcagaggttgcagtgagccgaggtcgcgccactgcactccagaccaggcgacagagcgagactcgtctcaaaaaaaaaaaattagccgggcatggtagcgcacacctgtagtcccagctactcgcgaagctgaggcagaagaatcacttgaacccaggaggcagttggccaggcgcggtggctcaggcctgtaatcgcagcactttgggagacggaggctggtggatcacctgaggtcaggagtttgagaccaagcctggccaacatggtgaagccccatatctactaaaaatacaaaaaaattagccaggcgtggtggtgggcacctgtaatcccagctactcgggaggctgaggcaggagaatcacttgaacccaggaggcagaggttacagtgagccaagatcacgccactgtactccagcctgggcaacaagagtgaaactccatctcaaaaaaaaaaaaatgcaaactctccctaaagtggaagagtaaaggactatcatcaatcactcacaacctggtataaatttgtccccctgccttcctcctaaaacctggctgacatcagctacatggagaaaaagggacagggacctaagaagtttctggaacatataacatttggagaaatagagcctgtctggagaggaactgaagaaaagaaaagtgccaggggacttggagacctaaggagaaggatagagaacctgagtttagagaaagacaaatctctgcctaactcaaaccaaggccccagaaagagatcagaagctctcttcctcctcccacctgtcctgcaagctctgttcccagaacccaaaactgctattagtaaattggcacttcaactaagatgccaaataaaaagctttgtaggtcagactagtaacccaaccacattgcttttatgrgaaaatgtgtcccacattccaaataatcaacttggaaataatctttgggaacatacagcccttttataygtgtgagatcaccattctctgcaaagggacagctctcctcggaggttgcactgagccaagatcatgctactgcactccagcctgggtgacagagtgagactctgtctcaaaaaataaaaataaaaaaagggatggcactcctgacattatttaaccgggatatttcacaggaagagagccttcaggccagtccatgtttgggaaaaggctaccttaccaggaagcactataacaaattactgatgaaacacacacaagttgccagaacacacaatcccaaatcaaagaaacaagccttcaaaggcaggatggtgataaatgaggtcacgcccacagtctctccagcctcaggttatagagacataggttccaagggacagtggattcccaacaacctcacagtataaaatcaacattcagaattttagaaatgttccttcctaagccccccaacaaagactataatatatagcattatcattggccatttgaaactygtctacatgttcaacctgtacaactttgaaactttgaaaaagataagggcaatcagcatttactgatcgcctactatgtcccatgctttgcacacatcttataaaacacatactacaattctatgaagaaagtatagtagcctatagttattttaagaaataactgaggctttttcttagggaaaaaaaaagaaattttaaaaaagagagaagtaactgaggctcacagagctgtgacttgccaggcagagccagatatgtatgactccaaaatccaaagttttcatcattacattaagaacttctcgccgggcgcggtggctcacgcctgtaatcccagcactctgggtggccaaggcgggtgaattacttgaggccaggagttcgagaccagcctggcccacacggcgaaatcccatctctactaaaaatacaaaaaattagcccggcacagtggtgggcgcctcagcaactcgggaggctgaggcacgagaatcgcatgaactcaggaggcggaggttgcagtgagctgagattgcaccactgcaccctggcctgggagacaaagtgaaactctgtctcaaaaaaaaactaaaaagaagaagttctttccagctgttcccaaaagttytgtttcaaatttcaaaaaaggaccacaaccagggacctggctgtttccagccacggataacctccctgagcacagctctctttcagggcacaggttctctctcctcccactccccacccccactcatcttcagggacacattcatctcactgataacagtggttgccttatatctcctatctcctgatgtccttaccagaactttttcttttttgagatggagtctagctctctcgcccaggctggggtgcagtggctggagtgcagtggagcaatctcggctcactgcaacctcygcctcctgggttcaagtgattctcctgcctcagcctcccgagtagctgcgattacagacgtgtgccaccacacccagctaatttttgtattttgaatacagacggggttttgccatgttggccatggctggtctcgaactcctgacctcaagtgatccgcctgtgtcggcctcccaaagtgctgggattacaggtgtgagccactgtgcccggagtcatcaccagaacttctaaggctagcttgtycaacccacagcccaggacagctttgaatgtagccggacacaaatttgtaaactttcttaaaacataggccaggcacggtggctcatgcctgtaatcccagcactttggaaggccgaggcaggaggatcacgaggtcaggagttcgagaccagcctggccaatatggtgaaaccctgtccctattaaaaatacaaaaattagccaggcatggtggcgcacctgtagtcccagctactcaggaggctgaggcaggagaatcgcttgaacccgggaggcagagggtgcagtcagccgagaccatgccactgcacttcagcctgggggacagagtgagacactgtctcaaaaaaaagaaacacaaaaccattatgagatttttttttttgtgactttttttttagctcatcagccatcgttagtgttagtgtattttatgtgtgacccaagacaattctgcttccaatgtggcttagagaagccaaaagagtggacaccccggttttttttttgggggggtgacggagtttcactcttgttgtccaggctggagtgcaatgccgcgatctcagctcaccgcaacctctgcttcccaggttcaagcgattctcctgcctcatcctccctagtagttgggattacgggcgtgtgtcaccacgcccggctaattttgtatttttagaagagacggagtttctccatgttggtcaggctggtctcgaactcccgacctcaggtgatcagcccgcctcggcctcccaaagtgctgggattacgggcatgagccaccgcgcctggcctggacatccttgttctaagggcacacacccagaggttttgtacaaaataaatgtctggttttgaatgtcctaagaaacggaacccagctctttgttcacctcttttgtggggcatggagrggatgccttttctgattttcaacatttctccctcctgagaccttcccagggaccccaacattggagacaggatagcaagaatatcaaatgctttcaaaacattagctgtgtttggtcggccaacctatttgcctctgtcgggaatgtaaaagttatctatggccagtccttcttagtycaaggtaggtcggcaaacagccttctccttctgcacaaaaagggtctctaagatccttccgtagcacctccatcccagttatttaagawgaactaaaaagaggctacaaggtaaataagagttaccgaaggagatgccggagagactaacctccttgcacaaccagccttttaaaattagggatttagacaccacgggcagtttccctcaataaattctcaggcactggaaccagagagtaggaggatgaggggtgagcaggacgcggaggccgaaactggaggcgaggcgggcgcaggcccacggagcaccaccccatcccctaagcagcgactaataaagacggcagcctccggaatcactttcgcccccctccctggcagcttccccaccgagtcarcagcttacttaagcacgcgctgcccagagatgcaaaaggcccccttatgaccacggcgctgcccacccagcattcgggcagcctggactcccacaaaacccagagttgcgccccaatcaccacccctttgcagcccctggttccctccccagcggcgccccaccacccacctctcccctaaggccattcaactcagtccctcctcggggcccctcagcttttgcccctccagttcctccgtgtcatgactctcgccctcctgagcctcccacacctggcaccgcccccaccctacccgaccccggcccggcctggccccgccggccttacctggcggcggctgccgctcgccctcagccatcttgctccggccaggagccgacccggatgcttgcagtcccctctcgcctttcactcttgcacccacccttcctctccccggctccaccaaaggctccgagcttcctgaagacaagtgagcgccggccggctataaccgaaaaccgagagttaaagtcaccacagcgaagacggccgccatgtcggtgcggggcgctcagggagcaagcctattaacggccggcgcgcggcggacgcgcggamccgggcgacggccatgtcagtgcggggcgcgcggggcgcatgcgcgccaacggcygccaagcgctaggaccgctcacggccgcccgaacgtcgggcgccgcgactgccacgattgtgcggggcgtcaagtttgggttgtgctcagccatgtttttccgggacagtctcctgtcccggagtaccacctgtcatctttgtgggtggtactgaccctaacccaaggaatattagaggacattccccggtcaacatggttgtgttttcctatcactctaagagttaggctcaaggacaccagacggagttggaaaggtgcacaccactacctccaacagcttagaagacatgtggggacaggggagagacagctggacggtgacckcctccttcctcctccacaggtctcaatgactcgycctcggccctgcccctctgtccccgcccgccgtggtcccgcccccgactcgcagccagcctactgcgacccgctaccgggcgacgccccgcccctccgtccccgcccctcctgtccctcctcaaggagactccgccccatcgatgccccgyccccgccccacagccaacctcccgggcaccgttgcccgcccggggcccgctaccggcccaggccccgcctcgcgagtcctcctccccgggtgcctgcccgcagcccgctcggcccagagggtgggcgcggggctgcctctaccggctggcggctgtaactcagcgaccttggcccgaaggctctagcaaggacccaccgaccccagccgcggcggcrcggactttgcccggtgtgtggggcggagcggactgcgtgtccgcggacgggcagcgaagatgttagccttcgctgccaggaccgtggtgagtgcggcggatcccgggcctgagggccctggacggcctgggcgggccgtgyggttgcgtccgggaacggagaccgcgtcctgcggccgctgttcgacccggcctccagctgatggggtggggtcaggcgggcgtcccaggtttggcagagcaggagattggggcgcaaggtcagaagcgggattaaacccacgtcctggagcattcagttccaacgacccaggaaagacaagggggaccccggcttcagttagcacccccacccttagacccagagacaggccggtaggggagagagaccaggagcatccagaccctagctcactctcccagttattctccgattgacacacccgtcgcacgcttaggccagagccactcctccgaccctgtccagttggtcacactcctttggtttatcagacggtccctggggaattgtgtgtggccagagaaacacgcggaggcatcaagctagaaaggcctcagaactggcaggtggcagccccatggtctccctcccctccagcccccttccccaccctggctgtatccttccctccagcccccttccccaccctggctatatcctcccctctagcccccttccccaccctggctatatctacccctcagtcctccccggtgagcagcccggatgctagcctaatttcagtcccttccgtccctgatccaagcatatgttgctggtgtctcactctgtctcagacacacactacggggccagagggcggagggtgcatccaggctcaggcctagaggctcttttaggtgttgcaacaccctgagcctccaccgcacccttgtcacygtctcccaagctgcatccatcccacaaacagcctctagatcatcctccaggaccatccgactggactggttaccttcctgcagggaaactgaggcaaggagggacttgcccagagtcccctggacctgctcattcaaatccagcccaatcccagtgtcctttggtttatttttcataccaaaagtcctccgctcttggaccctagctgaatgagccacagctcaggaaaaaatgagtgttcrtagagggatggctcagatgggtcccaggagtcctggagagaaacaggaaataggcagggcttctggctgtcccatccactgatggccttttcctggtgtctgctcccttgcaccaaccctaatttcaggaccgatcccagggctgtggtgtaacctcagcggccaggcagtctctgtcctccagccaagttttccctcatcaaaacgatcttcgcagattctgacaggtggattttttattaccttttgkcctgactccctggcactgagcccatgcagagaagaaaggaaagaactttccaggttcccttctactggaatgccccccmactagccctctcacctgctccccattcctctacttctgggagctcgggagggtggagcagcttctagagtccaggagcttcccctgccactgccacaacccccgatkccaccacagccatcgccactgccacctgcctcccgctgaatcttggctcttgtcttctctttccagcccaggcaagtggctgcctctggctaggttctgctcacycactttgtagcacagttaggcttagagatccagccaaggcagacagacagggcccagaacctcagtcctgccatggaggaggacgggcagcagagagagaaggtatggaacagagctcctgccactcgcctgcccactgcaagagcagcctcgggccctcctgtctctgcccactccagggcctcctggactttctctttctctctctgccgcctctcaccctccatgccaggccacccggctctctcgccacagcactgccctcaccccacccctgccccatctcaaaggcaggaggaagcccaaggcccctcacccgaaggtgctgccattgtctggctctctgtgattctctcttcttcccttctgtttctcaacctggaaagggtgggagaaaaggacgtggggacctccargagggacagtcaccactctgctggctggctcctcttccagggtgagaaaggaggggcctgtgcaacccaacaggtgggcggtccccctcacctctgccaccccaaaggtgccgttcatcctgacttggttcccctgagccttgctaagaaccatggccacaccccaccctcccccatccctacctgcatctccaggccccagagaggcggggacacctagagctctagggctgggaggccagggccagccccacccaagaggccgtctctgcccccagggatgggcacttaagtgcccaggactacagctttggggctgccagggctccagagccggggagggaatgaacaggatgttctgctacctgcaggtgaagcctctgggcttcctgaagcccttctccttgatgaaggcttccagccgcttcaaggcacaccaggatgcactgccacggctgcccgtgccccctctccagcagtccctggaccactacctgaaggcgctgcagcccatcgtgagtgaggaggagtgggcccacaccaagcagctggtggatgagtttcaggcctcaggaggtgtaggggagcgcctgcagaaggggctggagcgtcgggccaggaagacggagaactgggtgagtgagggcatcctcactgtgacctgctgctggctgcacatgcacagttctccagtgcccactgctctggcacggccgttcgtttgctgcccagagtttcgtgagcacatactctgtgtctggcacttggcagggtgctgggtgatcaagaaggacacagtcaccagctccttggagctaacattcaagtagggaggagagaaaggtaatgaacaggatacaggttgtggacaaggtttcatgttccaggacagaggcaggagtggggtgcacggcaggtacaaccagatagaagatgcccttgtgcttggtgggacagcctcaggcaggggatatgtgtcactcagtgaccgatcgcccaggttctgtatctgatctatgacacaggtgtacccagtttggcaaatatgtctacaccaatgtttggtgtgcttttctatttgcatctcatacttcaatacacagatttaaaaagtggcagctggatgcagtgactcacacctataatcccagcactttgggagtccaaggcgggcagatcacaaggtcaggagttcgggaccagcctggccaacatgatgaaaccctgtctctactaaaaatacaaaaattagccaggcgtagtggcacgcacctgtaatcccagatactggggaggctgaggcaggagaattgcttgaacctggcaggtggaggttgcagtgagccaagattgtgccactgcactccagcctgggcgacagagcaagactctgtcttgggaaaaaaaaaaggtgacccagctgctgggagggaggcagagtggaagccagaggcgagggggaggggtgacatcacccccaaggagctgtggcagcctgggtctgacaccggatgggagagagggagagtcgttaggtccaggactgttttggaggcagtgccagtgtcacttgccaatgaggtgggggcacgggtggaatttgccaagtcggggttgcctgagagagaagctacctgtgggagagccagagcgggtccggccctgggaaatgctgtgttatagggggtgccatggggaggggaggtagagctctagccctggggcttggyggaggcygtggggctgcacacaggaggtgggagttgtcaacatttgctgagacgcgtcaggtcaggactttggactccagaaccaagatgcttcccccgaaaggtccttagagcgtctgggggctggtggttttccgacttcatttagcctgggactccttcaaacagaagctcctggttaaaggggtgggggcacccctccttccactcacggggccaccgaagggtctccgccaccacctggcagattctcgctgggggagtacccatacctgcggggtctcctctggtctcccaagctttggccagaggctctgggatccctagtggagtacaggcccctggctgtttccccaagggaaggaagctcctgtctgcccttcactgatctacagatgaggaaaactaaggcccagagaggtggcccaaaagcccagagccacacagcagctctcaaggaagccctcggccacacaggaaggtctgactgactcagggacccagttcttaggggctaccagtcacctgttgtacaacttggggacaagttgcctccccctcaccccttgccaagttgcctccccctcaccccttgccaaaggctagtggcccagtgctgcaggggagtgcgtgtgatgaagaggcgcatcctgctgctgttcaccacgggttgagggggcgcaggtgggcccaggtctctgggggtggaaggccagagaaagctgtactggctgtgtgcaggaagggtgggtgttgcagtcagcatagaggacacagggtgacagtcacctgggagtgtgcrcagcgccagacatggagcctttaataccacatccctggctggtgcccagagaccccccaccccccagagagaggacagaccgtcagggcagagagtaaggatgtgtcacccacatcttgtcactagcataaggattcatccttgcagggagcatcccctcaagattgccctgaccttgagatcaaagtgggtatctactccccgaggccacaggttcctcaggctgctctgataccccagtctcctgcctccttggacagttctctgctggggatggtcaaaaactcacttattgggccagacscggtggctcacgcctggaatcccagcactttgggaagctgaggcaggtggatcatttgaggtcaggagttcaagaccagcctggccaacatggtgaaaacctgtctgcagcaaaaaatacaaaaatgagccaggcatggtggtgcgcacctatagtcccagctactcaagaggctgaggcaagagaatcgcttgaatgcaggaggtggaggttgcagtgagctgagatagcaccgtggcactttagcctgggtgacagtgagaccctgtctcaaaaaaaaagtcactcattggactttgtttttgtagacccttcccttttttcctttctatctattcaggcatacattttaatttaacatatgacagtcattgacagagaatgtgtaagatgagaatttgttcaccttgccgggcgcggtggctcacgcctgtaatcccagcactttgggaggccgaggcgggaggatcacgaggtcaggagatcgagaccatcctggctaacacggtgaaaccccgtctctactraaactacaaaaaaaaaaattagccgggcacagtggcgggcgcctgtagtcccagctactcaggaggctgaggcaggagaatggcgtgaacccaggaggtggagcttgcagtgagccgagatcatgccactgcactccagcgtgggggacagagcgagactccgtctcaaaaaaaaaaaaaaagaccgggcacagtggctcatgcctgtaatcccagcactttgggaggccaaggygggcggatcatgaggtcaggaaatcgagaccatcctggctaacacggtgaaaccccgtctctactaaaaatacaaaaaaatagccaggtgtggtggcgggcgcctgtagtcccacttactcaggaggctgaggcaggagaatggcgtgaacccaggaggcggagcttgcagtgagccgagattgcgccactgcactccagcctgcatgacacagcgagaccctgtctcaaaaaaaaaaaaagaattcgttcaccttgctgcccctccccacaccccgggtttcctcctgatctttctttcacatcctttcttagcagcagcatckgattgatctggctaatactgatcactcgggctaaagggaagaggctggtgggtttaagttgtggggcagggagggtgggttctggatctaggcatttactttgagaatctccatagccaggtagagggcatgggggccagccaggtcccctagccctggggaacagggggcaccagggcccatgcacccctcctgacaggctctggcacttttcccagctgtctgagtggtggctcaagaccgcctacctccagtaccgccagcctgtggtcatctactcsagcccaggcgtgatgctacccaagcaggacttcgtggacctgcagggtcagctccggtgagtggctggggtttgggggccaggaggcagccgggcccctcgagttcacttcgcccagccgcttggaggggccccraccctgtttatctttctgccccacaagcagccttatgaagtaggsagcatcctccctattttacaaatggggaaattgaggctcggagcagggaagggagctgcccaagaccccattcaggaagcagggtctctccagctctaaagcctcatggctgttaaccaccacatcttcgcagaggccccatcctcctccatacctgaggcttctccccgaccccagttttagcacttcacctctcctttccactcttctcagctagccacaggggtgacctctgtacacagtcctcttttccacattcagccaggtcacctgccccagcccctattccagtcctaccagagataaaaataccagtgacaaggatctcctgcccaaggaccagcyactggctgccaccacctgcttctcttaaagggaccagggtaccctgggaagggccggggttcaggcccaggaactccagccactggtccccatggtgggatccaggggcggccccaagcattgagggtggttgccatgggccagacagccctgggaggaaggcggcctgggggacacagaggcccagagtggggaagggacctagtggagggaacaccggagccactgctctcccatcacaccaccccaggggcccggggcctccagaaccgatgcttcagagcagatgacaccccctccagattctaggctgaggttcaggagctcaggccctttgtgggtagacccagcccactgacccctaaccaagccacactccagctgcagggggccagcacccaagtcctactaggcccttggccaccagcacttccccgagccctcccgaccatgctccctctagaggttatgaagaagcacacacaggctggcaagctgggactcrcaggcccctcccttgcgctcccaggctttctggaagcggtgagagaggctggaagactagacctcccgctccccaagcaggtgtccctagcccggggcctccctcagggtgtccacgcagcttctaatctctaatcaatctttccagatttgctgccaaactcattgagggtgtgttggatttcaaggtcatgattgacaagtgagcatccccacccctgcccagccccmcmcctgcccaggcctgcttaattaccacagccacctctgaccccagccctggcccggcatgccagcttgggccctgggccctgctccagctgctggaatctcctyttggtgggtgaccctgtcccatcccaactaaagaggaccccagagttttattygctgyttcatctcccctgtgacaaactgaagcccagagaggggaaaggagggagtttctagatgayttctgaacaggrcccatctggggcagaaagcgagccccctgcccacagcacagccctgaggtgtcctgctcatctgggagtgggagcarggacactgtgtgagcccccagcagtacctagcaggtccctgtctaccctgccctcctccccattcacttgcccagtggyggcctcactgcccctctaccccatagcgagaccctgcccgtggagtacctgggggggaagccactgtgcatgaaccagtactatcagatcttgtcctcctgccgagtgccgggccccaagcaggacacagtcagcaacttcagcaagaccaagaagcctcccacgcacatcaccgtggtacacaactaccaggtgggtggcccccacccacacctacaagccccggccctgctgcaggagtacagccggacggccgcagtcggcttccccactggggttccccagcacacgtgcccacgtgccccaggaatgggcgcccctggcttctccattgggggcccagggaggccaggaggggcygtgggcctgcccagcccagaagggtgatccaaggacctcctcccsctctcacccttggcctgactccatcccctccaaggccaaggccaggaggaggcaggtrtggggaggtggctgctctcagcctgaggtccccactcagctccctcctcttacctgcctgtgccccaacagttttttgagctggatgtgtaccacagtgacgggacacccctcactgcggatcagatctttgtgcagctggagaagatctggaactcatccctacagaccaacaaggagcctgtgggcatcctcacctccaaccaccgcaactcctgggccaaggcatacaacaccctcatcaaaggtgcctcttgggggccgtgctggggctgcacacccaggcctcttcccctgttggggaccagcctcaactccacctgtagggtacccgaagtctgctggcaacaaaggaatgagaagagacaggttaagagttcatgaaggtgggagccaggggccagttgcaaaatggaggctgcaaaaggcgcagagttctggtctccacactattgagtgcagtcacttagctctaagaagcasatgttcagggcgaaacagtgaaagggaggcagtgcctcataggaggcataatctatagcaatagcagtttaaatgaatctcctttgtgctcaaacagcgtgtctttaacttatcggagagtagctggtgggagcgggcttaactaggagcctgcacatctgtccacttcccagtgtttcaaaggagtgtctttctccttgaacacagtgtttacagataggagagcgggtctcgctctgagcatgggaacatgatggcaattagtaggctttcctcctccgtggcctcttctggctttccacaacttattgtcccctatttttatggccagtttatacaggcaccccacaagyccttttcccaacattcccccggcatgctgggccccgcacagccatgggcagacatgtttcccgctgcatcctctcaacgtggagcaggcaatgtgggccccatgtcctagttgaggacacctcatggttagggtagtttctctcagctaaatagcaagttaggattagagtccaagtcctctggctgagaagcccacccgcctccacaccccctgtgcccccaagtaccagcagtcctccaaagcatgtcttgctcaggggcattgaccccaaagtcagaccacctgtgtgggttccccggctgccacaccagctcccatgtgacccctgggcttyggtttcctgtgtctaaagtgggccaggtgttgggccctgcctcgaggagtgctgtgggcctgcagggtcctgttgagttcgaagctctgaacccacaccctgcacttggtgaatgccctggagggccggcgaggtggggggtctcctcatcccagagrggtacaaatgggtcagaagagcccagggcaggaggctgcggaggggctggtccatctctcccacaccatgagaccccattttgcrtctccccgccccatgccacctgcagacaaggtgaaccgggattccgtgcgctccatccagaagagcatcttcaccgtgtgcctagatgcaaccatgcccagggtctcagaagacgtgtaccgcagccacgtggcaggccagatgctgcatgggggcggcagcaggctcaacagcggcaaccgctggttygacaagacgctgcaggtgaggccyggcagggcttcgcccactcacacacacctgaacaggacctctgcagcctcrggacttcctgcccgtccccggctgcgtccccagcctcctagcttgtaaagcaggcaggaagccagcaggctggacgctgccgtaattaccaggcagccagcctgtcatcaccagtcctgcctctggcctggaaaccgctgtcacccccagcacaccccctcagcacctcacagagaacctgggatccggggtcaccagtgcaatcctggcacaacagtccctctccacacctgtaaaatggggtgatggtcaacctcaccggtagagtagtttgaaggactcagtcaggcacgctgagcgtgggatgtgcttagcacaccagggcacctggtgagtgtcagctattgttaataacagtaataagtcatcatagccccttgagatggcttcagagaggcccttgcctcaaccaaagagtggttgggtgaggggccaccccccagggccctggggctgaccrgggtctcccttcccttccacagttcatcgtggcagaagatggctcctgtgggcttgtgtacgagcatgctgcagcggaggggycccctattgtcacccttctggactatgtcatcgagtacacgtgagtacagtcacatctctcgcctagttccccagcttctagtgacaggtgacacacaggtgatagaccagtttatagagaaatatcactctcctttgtgcctgggaatctgtttttttccaaggaagccagccagatatggtggctcacgcctgtaatcctgacactttgggaggctgaggtgggaggatcaattgaggtcaggagtttgagatcagcctggccaacatggtgaaatgccatctctactaaaaatacaaaaaaaaaaaaattagccaggtgtggtatcacatgcctataatcccagttactcaggaggctgaggcaggagaattgcttgaacccaggaggcagaggttgcgttgagcggagactgtgccactgcactccagcctgggtgacagagcaagactcygtctcaaaaaaaaaaaaaaaattaggccaggtgcagtggctcatgcctgtaatcccagcactttgggaggcggatcacctgaggtcaggagttcaagaccagcctggccaacatggtgaaaccctgtctctacaaaaattagccaggcatgatggcgggtgcctgtaatcccagctacttgggaggctgaggcaggagaatcgcttgaacctgggaggcagaggttgcagtgagctgagatcacaccattgcactctagcctgggcgacagaatgagactctgtttcaaaaaaaaaaaaaaaaaagttagccacgcgtggtggtgggtgcctgtaatcccagctactcaagaggctaaggcacaagaatcacttgaacccaggaggtggaggttgcagtgagccgagatcgttccattgctccagcctgggtgacagagcaagactctgtctcaaaagaaaaagaaaaaaattagccaaggtggcgggcatctgtaatcccagctactcaggaggctgaggcaggagaatcgcttgaaccagggaggccaaggttgcagtgagctgagatcgcatcactgcactccagcctgggcaacagagcaagactccatctaaaaaaaaaaaaaagaaaaaagaaaaaaaagctgaagtgagggtggttttcagaacaaactcacacctccctgggctggccccctccagcttcaggtacccatcctccccaccctggtcccagaatggacccaggctctagaggcaccagcatgagcctgaggccccgtttactgtgcaggaagaaacccgagcttgtgcggtctcccatggtgcccctgcccatgcccaagaagctgcggttcaacatcacccccgagatcaagagcgacatcgagaaggccaagcagaacctcagcatgtaagtgcctgcccccgccatccctgtgctggatgggtgaggccaggcccttgagcttgagaggctcctgtgccagctctgtcatgacacccagaccctccgtggggttggcaggggctgccggggcctgctcctcacctgctcttcccacacccccagcatgatccaggacctggatatcaccgtgatggtgttccaccattttggaaaagacttccccaagtcggagaagctaagcccagatgccttcatccagatggctttgcagctggcctactacaggtgcgcctctgtggcccacccatggaggagggaggagacctgggggcaggggaggggrtgccygcctccaaggggcgtgcttagccccatttcccaccaggatctayggacaggcatgtgccacctatgaaagtgcctccctgcgcatgtttcacctgggccgcaccgacaccatccgctcggcttccatggactcactcacctttgtcaaggccatggatgactccagcgtcacggtgagaggtctggggcgagggtggrtgagctgggcctgagcccctccctcctgctcactcagtcaacacacaataattgagcacctacaggattccagccccatggtgggcacrgggaatctaacagaagctggagccgtgaatctagctctgagcttcctggggaccaaagaggaaaagggagtcattcatttgttcattcatttattcattggcagtaagcaactgccctatgtcaggccctggctgaggaccaaggagttggtagttgcaatactcgctctttttttttcttgtttttttttagaaagagtctcactctgttgcccaggctggagtgcagtggtgtgatctcgactcactgcaacctccacctcccgggttcaagcaatcctcctgcctcagcctcccaagtagctgggactacaggtgcctgccaccatgcccggctaatttttgtatttttagtagaaacgggatttcaccatgttggccaggstggtctcaaactcctgacctcaagggatccacctgcctcggcctcccaaagtgctgggattacaggcgtgagccaccgctcccagccccaatatttcctcttaaagagctcagaatctagtgctgggtgggggtgggctactgaggtgggccagaagagaagggacagtgcttcagctccctctgaccctcaccactctaggagcaccagaaggtggagctgctgcggaaggccgtgcaggcccaccgaggctacaccgaccgggtaagtgagcccgcttgtgcctactcacttgtcccttagtgtcagccatctgtctgtccctctgactgtccrtccctgcagccaatggctgccaaccctttgctaggaccacatctcccccaacctgggagcacctggagccaggctgaatagcccccaactttttctttttttttttttttgagatggagtcttgctctgtcgcccaggctggagtgcagtggtgtgatttaggctcactgcaacctccgcctcccaggttcaagcaattctcctgcctcagcctcccaagtagctgggattacaggcacccaccaccacacctggctaatttttccatttttagtagaaacagggtttcaccatgttgacaggctggtctcaaactcctgacctcaggtgatccacccacctcaggctcccaaagtgctgggattataggcgtgagccaccgtgcccggccaaatatccccattttaaagttggagaaacccagcctgggcccagtaactgccttggttccaggttccagggctggcctgggccctagatgttgggtcacactctctccctgatgctaggtatctctccctgacgctaggtatacatggtccagcagacagccagtttcctgccctccagcagcttgggctgcagtcagggaggtggctgtctggatgcgtgtcctggctctgtctctgagcacctgtgtgtccaggctctgaccgtgctacatgcacacgtccatttagagctcaccgccaccctgcgaggggagtgtaggactcacccctctttacagatgaagacactacagttccagaacctaagcaacctgccaaggccctgcagccaggatggggctaggtcacccagctccagggccctgccctacaaccctgcactttcctgcctccctgggcaaatccccgcccctccctgagccttggtttccccatctgtgaaacgaaggctctctctggccagaatactctggtcttgtggttttgagtggccagtgcctgcgaagggtggcgctgccacaggctgaagagggcagggataccccgggggtccacagcccctgctcctgacagctctcccaccccaacaggccatccgcggggaggcctttgatcgacacctgctgggcctgaagctgcaggccatcgaggacctggtgagcaygcccgacatcttcatggacacctcctacgccatcgccatgcacttccacctctccaccagccaggtgggccactgccccaggtgccccgggggctggaggcagagaacccactggtagtttgatgtggcctacacaggccccactgacccattgccaacacagctgagttccagaggaggagctgggggcaggggcctctctgcagcccaggcaggctgagaaggggtcagtgctcctcatgggagaatcagcttcgctgactcactggtcaggtataaaggaacatttgattcgtgccagcctgtagtggttgctgggatatagcaggggacagaccatgatccctgcccacaaggggcctgcagtcttggcggaagcacaggcagcctgggaagtgctgggggcgtcaaggtaggggagctgagagctttcatcctgccgtccccaggtccctgccaagacagactgtgtcatgttcttcgggcccgtggtccccgacggctacggtgtctgctataaccccatggaggcccacatcaacttctccctgtcggcctacaacagctgcgcggagaccaaygccgcccgcctggcgcattacctggagaaggcgctcctggacatgcgtgccctgctgcagagccacccccggsccaagctctgagcccctaggactcaggcctgccaatgccacagccaagcccaccctrggatgggccacccaccagggctcagctccttggttccctcttccttggttccctcttccctggtccccccaaatstactgagccacggaccgcatcctccagggggcctgcaggccccagccaagtgccttccgtgggtcatcccagcacctgccagggcccgacctggggctgagtgcagaggctgagcaggacgttaggcccgggcccctggcacgtcctccaccggtgcctcctctggggaagggaaccagccctccagagcaggagactggcaagagctctttgtctcaccagctcagccccggccactccctgccaactccatgaccaggccaccatytgtaccctgcttcccaaactcccaggacctggagacaggattgtctggggccgaggggccagggtgtgaggtttcacctccgttgcggctgtgctcctgtggataacattgctagcgagccgcctctggttccmctcagcttggttcctgcccccgccctgctgtatgatattaatgtgsaaggtcatcaataaaggggaattgtgttggtgaagaggtgtttcagctgagaggcaggcagggtgggggcaggcacctggccttgccctcttcagctttccctgggcctcggagctggtgtccaagcagccggtgggcctgagggctttggcccaggagccaaggtccagctgtgaccttggggcactgggcccagaaccataccagagccagggctgcgtccttcaccagcagcttcccacctgcctctggcttgggccttcccaagtcccatgggttgtgggtaggggcaactctcccaggggactgtggggcccagcaggcccaggtctggtgggctgatgaatgttgctaatacccaggggcccagggtgtcattctacttcccccaactgagcccagcaaaagtaggagtacagcagcaggctcagcttgccccaggcccagccgctgccaggacagacaccttcgggggtgggcaggtgcgatcagagcagaaccacatacctgcccatagccccgtgtccatggctgaggcagggcatcctggcaaaaccaagcgtgcagtttgtggagaggggagagtctcccattaggacactggcctgtgaggaaggcctgtgtgaaaccacaagggcggatgccggggtgggctgggggaggttggctggcctgtgagtgaagggctctgtgacctgactaagctgggacagtcatccgagagtggggcctttggttttctccgtttgtcagatgaggaagcaggcttagcgaggttaaggtcaccgggacgctaaatggcagagcaggattcacagaggccacacttgtctcctctaggccggggctccaagaagcccctccctagagccaggtccccagccccaggccacatccacctaggtgtcccgcagcagggggtggagaaagggatgctatgggtggaaaccggcccagcctcaggaccacaaggaagcgggtaaagagggaggctgggctgagcctgagctctaatcaggcgcagggacctgccaggcctgaccattggtggtgtactcagcaggagagggcagccacttgcccagtgccccaagggcacaggaggtgtagcccagacaatggaggaaatggatggaggcagagaaagggatgcctctggggggaacacgcaggcctggaagagaatgtcacctggaccagcacccggactctgctcctcgctacacaacagggtgctccctctgggggtgactagaaccgctaggaaacagggtacacagcagggcagagtgctgcatgagcagccaggagtgggcctgcagccagcccaggcaggacagggaggggagagcgaacagtcaagaggctgccagacagacaccctggattcccaaaactcgcctaagaaccctacaggtctgaatataaggttggattttttttcccccagaattatccttctgaattgaggggcatccccttagggtggtggcattacaggcctcatcacatggaagccccctcaattccttggagccaccaagtattgttcagggagggcgcattcagcatctgagcaacctcagtcatggtgagagggaatccctagaggtcctttgtgggggaaaaaggcaaagaaacaagatttcgccgttcttccttaggggtaattcctgagacctcacactttcaagtgttggatgtcgggataaaccagcgcttaacgttgtgccagggggcacttgtggcttggaatgaaatttctagagctagtgctgtgcatgaaatcctacaggcgctgcttaaaggctagcatagccaagacagcggccccaggagagcaggctcagctgacccagagggggctccaggggtgaccaaactctggcgccagtgatgcagacgaaaaacgtgattcgtttttgcaaaatgagtgaaaaaaagctcttctgaattggtatatcttgagcaatgcatcatttgacatttgaatgagtaataaatttttttttttttgagacaatttcactcttgtcacccaggctgaagtgcaatggtgcgatctcagcttactgcaacctctgcctcccaggttcaggcaattctcctgtctcagtctcccaaatagttgggattacaggcctgtgccaccacacccagtatttttgtacttttagtagagacagggtttcaccatgttggccaggctagtctcaaactcctgacctcaggcctgcctcagcctcccaaagtgctgggattacaggcgtgagtcaccacgcccagcctaataagattaatgaattcaagagaaatagacgtgtggctttacggaaagtctgtacatccagcgggcatgaactttttttttttttttttcctgagacggagtctcgctctgtcgcccacgctggagtgcagtggtgcaatctcagttcaccgcaagctctgcctcctgggttcatgccattctcctgcctcagccgcccgagtagctgggactacaggcacccaccaccacgcccggctaattttttgtattttgtttagtagagatggggtttcaccgtgttagccaggacggtctcaatctcctgacctcgtgatccgcccgtctcggcctcccaaagtgctgggattacaggcgtgagccaccgcgcccagccgcgaaaagtggatatttcaaagaggcttctgagggcttgaagagttgggcttctgcccagcaccgcaccttgggcaggttggagcggggtcagggtaagcaggtgagtgtggatgaagtgaaggcgatgagttagcgggggcgggtgcgcctgaagctgctcccggtagctttcccactccacactgcagccgggatgtcttctgacacaccctccagtttgcttttcctttttaactctctctcatctgctgttaaatctacctctcggatccttgttttttagctatgattcgaggccagggctcgccttatagtttcctgttccctgcagatattgccatttatttatttttttgagagggagtctcactctatcacccaaactggagcacagtggcgcgatctcggctcactgcaacctctgcctcctgagttcaagcgattctcctgcctcagcctcccgagtagctgagactacaggcgtgtgccaccatgcccagctaatgtttgtatttttagtagagatggtatttcaccatgttggccaggctggtctcgaactcctgaccctaagtgatctgcccatctctggattatgggcgtgagccaccgtgcctggtgttctctttaaaaatagtaaaacaggctgggcgtggtggctcatgccataatcccagcactttgggaggccgagatgggtggatcacttgagatcaggagttagagatcagcctggcctacatgacgaaaccccatctctattaaaaatacaaaaaaaattagccaggggaggctgaggcaggagagttgcttgaacccaggaggcggaggttgcagcaagctgagatcgcgccactgcactccagcctgggtgacagagcaagactccatctcaaaaaaaaaatagtaaagcagtctgcttaatcattccagtatttgaagaatttgtgggtttgtttctattatctgttttctgctgctgctccatcatggtgtcttttttccttttatatttgatcatctttgtccacatatatttgtttttgagatggggtttttctcaggctggagtgcagtggtgtgatcacagttggctgcagccttgactcccgggctcaagcgatcgtcccacctcagcccctcgagtagctaggaccacaggtgtgcaccaccacgcctagctcatttttaaaaaaatattttgtagagacagggtcttgctacgttgcccaggctggtctcaaactcctgggctcaaatgatcctcctcctttggcctcccaaagtgctgaaattacaggcgtgagccactgtgtcagaccaagtggagatgtttatcctggcacactctgaagggcacactggctgcccctgagtcctcaaggctgtcccacagaggaggaacaaggctcagtgagaggagggccagcgccacacagggagggagactgacagtgaaaagaggaaaacttcctaaggctgagagtgtccaggtttggtatggtggccctcagtgaggtcccctggagggatgtaatcagaagctggacagaccctgacaggaaatgccgcagaggtcattcagacccctgctgtgggctagaagggactagatcacttctggttttatggtcttcaccgtatccttgcccctaagggtcatgtgtccccacagctgccccaatctcctctcctgagctcaatcagcaagtgctcaagctgccagagtttacggttttattttaaaacagtagtaaacaatttcattgatttttcttaaatcaaaccacctcatactcggcttgtctcaggcaaaaagtaaaaaataaaaataacgggagggaaacatggaaaccgacctaccttccctagaaataagcccctggtcttggcatctggaatggcttttggacactgcctttaacaaatgagaaaagaaagcaccaaaacattgtgcttcagcagcaggttaggaaactccacaaagaaaggggtggggaggattcgaacacagatcccgagtgacccagttcagtcctcaaaacttctgagagtctggaggcgtctcctctccacaactccctttcagagtgacttagagatgggggtccctttaggaagagccctcccacgaaccaggctgatagggatctgtgagcccacaccccagacacaggtttgagggggaccccaagcaggttcccagctggtcagagatgggtcaggaaggacaaggacatattcagagcacacagagggaaggacgagggacttcgggtgcctgttgcctcactcctctcctcacggctccttcccattttgttcacgtggggatgaagactaactgctactggatggcaggacaagaaagagctgtaaacagcttgggtctgctcacccaaatgtgcaggctcctttgtcagaaagcgattattgtcttagggacaggggaccagagaaagcccttgtggtgttgggtcagtacggggtagaacacaacgacagcagccgccagacgcgtgctcgctctgggccctgcccccagacagggaaacactgaccgaggttctggaacggcaacggtggcagggagggtgtggggtatgctcccctcctcctggcacccaggccaccccggcccagggagaggcagtctgccctctgggcatagggcgaagggcctgggaagctgaccgggagccctctgttcacagggcagccaccggagagcagattcttccagctccaaaatcctgcctgcctctgacaaaaccaaaaaataaatagtgtgtacttctcacgccacctggaattcctggccccgagaccagaggcgcgagccctcctcctccaccccacacccaggtgcccatgccgagggcactttctgcccagccaggggctggcagcagcacagcgagggtctctggccacggcccccaggcagcaggccccccagggtcctggttgaggggctggttcagccctttggtccaccttgttcattaaaattaaaataagaaaaaaaaaggctccacttggtgacttgggtctgtagaggtctctgcttcgtccctgtctgtcatcctgtccatcctgcaaggcatcgtgcgggccagatctggaggctggacccagccacacccactggtcactgcagtttcgtccccagcttgcgttgtctgttcctgcaaaacaggatgggggtcagatgtggagacatctggtgttcagtgacctacagctgtccccaccccacccgtagtcccaactaagtaggcaaatgcccacacccagtagccagcgattgacctgaactgggccaatcagagcacctgccctgggaatggcacctagacagggct

SEQ ID NO: 94681 - DNA, 51030 bp, Homo sapiens
gccaacctactttcgagaggaagaagaagaaatccacagccctaccctgctcccggaggcacagaattgagccacaatgggtgggggctattcttttgctatcaggaagtttygaggagcaggcagagtggagaaagtgggaatagggtgcattggggctagttggcactgccatgtatctcaggcttgggttcacaccatcaccctttcttccctctaggtggggggaaagggtgagtcaaaggaactccaaccatgctctgtccaaatgcaagtgagggttctgggggcaaccaggaggggggaatcaccctacaacctgcatactttgagtctccatccccagaatttccagcttttgaaagtggcctggatagggaagttgttttccttttaaagaaggatatataataattcccatgccagagtgaaatgattaagtataagaccagattcatggagccaagccactacattctgtggaaggagatctctcaggagtaagcattgtttttttttcacatcttgtatcctcatacccacttttgggatagggtgctggcagctgtcccaagcaatgggtaatgatgatggcaaaaagggtgtttgggggaacagctgcagacctgctgctctatgctcacccccgccccattctgggccaatgtgattttatttatttgctcccttggatactgcaccttgggtcccactttctccaggatgccaactgcactagctgtgtgcgaatgacgtatcttgtgcattttaactttttttccttaatataaatattctggttttgtatttttgtatattttaatctaaggccctcatttcctgcactgtgttctcaggtacatgagcaatctcagggatagccagcagcagctccaggtctgcgcagcaggaattactttttgttgtttttgccaccgtggagagcaactatttggagtgcacagcctattgaactacctcatttttgccaataagagctggcttttctgccatagtgtcctcttgaaaccccctctgccttgaaaatgttttatgggagaccaggttttaactgggtggccccatgacttgattgccttctactggaagattgggaattagtctaaacaggaaatggtggtacacagaggctaggagaggctgggcccggtgaaaaggccagagagcaagccaagattaggtgagggttgtctaatcctatggcacaggacgtgctttacatctccagatctgttcttcaccagattaggttaggcctaccatgtgccacagggtgtgtgtgtgtttgtaaaactagagttgctaaggataagtttaaagaccaatacccctgtacttaatcctgtgctgtcgagggatggatatatgaagtaaggtgagatccttaacctttcaaaattttcgggttccagggagacacacaagcgagggttttgtggtgcctggagcctgtgtcctgccctgctacagtagtgattaatagtgtcatggtagctaaaggagaaaaagggggtttcgtttacacgctgtgagatcaccgcaaacctaccttactgtgttgaaacgggacaaatgcaatagaacgcattgggtggtgtgtgtctgatcctgggttcttgtctcccctaaatgctgccccccaagttactgtatttgtctgggctttgtaggacttcactacgttgattgmtaggtggcctagtttgtgtaaatataatgtattggtctttctccgtgttctttgggggttttgtttacaaacttctttttgtattgagagaaaaatagccaaagcatctttgacagaaggttctgcaccaggcaaaaagatctgaaacattagtttggggggccctcttcttaaagtggggatcttgaaccatcctttcttttgtattccccttcccctattacctattagaccagatcttctgtcctaaaaacttgtcttctaccctgccctcttttctgttcacccccaaaagaaaacttacacacccacacacatacacatttcatgcttggagtgtctccacaactcttaaatgatgtatgcaaaaatactgaagctaggaaaaccctccatcccttgttcccaacctcctaagtcaagaccattaccatttctttctttcttttttttttttttttaaaatggagtctcactgtgtcacccaggctggagtgcagtggcatgatcggctcactgcagcctctgcctcttgggttcaagtgattctcctgcctcagcctcctgagtagctgggatttcaggcacccgccacactcagctaatttttgtatttttagtagagacggggtttcaccatgttgtccaggctggtctggaactcctgacctcaggtgatctgcccaccttggcttcccaaagtgctgggattacaggcatgagccaccatgctgggccaaccatttcttggtgtattcatgccaaacacttaagacactgctgtagcccaggcgcggtggctcacacctgtaatcccagcactttggaaggctgaggcgggcggatcacaaggtcacgagttcaaaactatcctggccaacacagtgaaaccccgtctctactaaaatacaaaaaaattagccgggtgtggtggtgcatgcctttagtcctagctattcaggaggctgaggcaggggaatcgcttgaacccgagaggcagaggttgcagtgagctgagatcgcaccactgcactccagcctggttacagagcaagactctgtctcaaacaaaacaaaacaaaacaaaaacacactactgtattttggatggatcaaacctccttaattttaatttctaatcctaaagtaaagagatgcaattgggggccttccatgtagaaagtggggtcaggaggccaagaaagggaatatgaatgtatatccaagtcactcaggaacttttatgcaggtgctagaaactttatgtcaaagtggccacaagattgtttaataggagacgaacgaatgtaactccatgtttactgctaraaaccaaagctttgtgtaaaatcttgaatttatggggcgggagggtaggaaagcctgtacctgtctgtttttttcctgatccttttccctcattcctgaactgcaggagactgagcccctttgggctttggtgaccccatcactggggtgtgtttatttgatggttgattttgctgtactgggtacttcctttcccattttctaatcattttttaacacaagctgactcttcccttcccttctcctttccctgggaaaatacaatgaataaataaagacttattggtactcaaactgtcatccccttgtcagatgtttttgcccttccgataactcccactttcttggattgggactcagaagtttttctgttcagccagtttgttaggaatgaatcttgaaagttcagtcctcttagcacctcattacagtggatttttgtttctagttaaggcctcttgtcctttccttggaagcttccacattcaagaggggattaggggcttggcatgcataagaatggggttgcctgtgccactggctgggatgaaaggatggggccatggcttggggcatgagaccctaataatactttgtcccctactcctcaaagccttttacaaatcttaattaattaaccgcttgcagcaccccaaggagagaaatgtgttgtggaactggggaaattgaggccagaggagattcactgactagctataaatgcaacattttctttgagccaaagtttgctagctttttaatgaacatcgagtttttttatatacatcacaagtcatcaagcaagaacactgaattttaaacatctattcccactaagggaaggaggattttaaaaaggaaaaaaaaaaaacttgattggaggcaaaccaagtatattaacaccgtgcaaggaaacagggaaactggtttaaatcctcaagcctgacattataagagtaagggtaagaagtttcataatctactccagggactttgtggctccttaattgtaccaaaagtcaaagctgacagtagaacctcatgaagcagcaaactactagtggacttcattaaattgtcttgctgcaaaatgaagtaacttggactgaaatttactccccaggctgcaaagcaggaaggatggaaaagctcaacactattcatttctactcatctctagggctttctttcatcatgttgctgtgttaaaataacccctttcattagaaagagtggaagacataatcaattagaaagtgccaataaaacatctcttccttgcctcatttctttaataatattgtaaaatgaaatgcgacaaaaaggttctttgacaattgtgaatttttattccactcaaaacataatactacataaagttgtattatgctttgcaagaaatactggttgtggccgggcgcggtggctcacgcctgtaattccagcactttggaaggtctaggcaggcagataacgaggtcaagagatcaaaaccatcctggccaaaatggtgaaaccctgtctctactaaaaatacaaaaattagccaggcttggtggcacgcgcctgtagtcccagctactcaggaggatgaagcaggagaaacgcttgaacccgggaggcggaggttgcagtgagccgagatcgcgccactgcactccagcctgggcgacatagccagactccgtctctaaataaataaataaataaataaataaataaaaataatactggttgtataagaatctgtaaagaattttttcctcctctttcaattttgagaaaattgaactacaaatttgttttgtgagcctagaattcttgcaaccctttttttcgtaaaggttcagtagagctaatgcccttaacttttctaccagggttaatttctgttattttcatttatgtactgccaaagcgagcacctttctgttattttagaagtcatgctttttttttttttcttttttcagacagagtttcgctcctgttgcccaggctggagtgcagtggcctgatcttggctcaccgcaacctccgcctcccgggttcaagcgattctcttgcctcaccctcccgagtaactgggataacaggcgcccgccaccacgcccggctcattttttgtatttttagtacagacggggtttcacgatgttggtcaggctggtctcaaactcctgacctcaggtgatccgttcgcctcggcctcccaaagtgctgggattacaggcgtgagccaccgcgcctggcctagaagtcattcttatggcagaaatctttctggccttaccccttctcttgagttcgttgggataggtcttgggaatccacaaatcctaaaatatgcgtgccttaagtcggcacaaaatagattaatattctgcgcgtctgtaagattggctgcggctagaaactccttcccagacgattaaatccactaaataaaatacgaaacggtaacgagataatttttaagagtatgcaccagtgctctaatgaagcccggttctgcggcattccaaggtaaggacgctgccttacccagtctctcagcagtcctaagctgccttcgacggccgagaagcgcctcgattcttgcccctggctcatttccctggcgcgttttccagacgcctccgctcccaacgctgggctcaaccctgtcttccccagctggtctcccagcacgtggcctggagcccagcctcccgccccgctcggtcacgtgagcctggctctcacccgcgccggcttccacaccccgcgggactgagaaccgccctcccactagctcgcaggcgcaggcgcagggcagggtcccctcartttgggtgacggaaggggcgtgtcgcagcgcccaaagatgacgtgttctgccagcgccacgtcatgaggaagtgccggcccactgaagccgtggggacgcgcccagcggagctaatcaggtgccactgaactgaaggggtgaactagaggagaagagggtgactgggcggggagcagctgcgggagaagcaaagggacgactgagggaataatcaggagaccactgaggcgtgaagtactaggcgtgcgataactgaaggagttagtaactgggagcacagagttggaaacagcttaggggaagatggagaaggaagaaacggggaatgatcaagatgtgggcaccatgatgtggcaggaaaccgacttagatgttcagaagaagtcagtgcagatacggrggaaatgggaatgggaagaagtctgcaaagccaggagaaccgaggaaaggcttttgcctccagaggtcacattgcgttataaaactctgggtggtaaaagattataggcttagaccagtgtctttggattctaatgctggctgctctccatagtccatctgattccccagaagtcagttatagctcttcgcaaaccttggtgacttcttattttctttcttgtttatccaagattacctggctggtgtttgcttgttctggagtgatcttctgactggaaaagaactatgtcatggatcaaggaaggagagctgtcactttgggagcggttctgtgccaacatcataaaggtgagcaatggcccagagcaccggttggccttctggtcagttggataatcttatataaaaacctgttattaaagttgatgatgttaagtgcaattcatgatgttaagtggaatttagcaaggaaaccaaagagtcttagaatggtaacttccaggtctacatttctggtagacttttgtcctaactctgatattttctggaagcccaggcctcttaatgtcactgggcagcctagactgctaagtattctttatagagaactgaaatttgtttccctggaacattgatccattgttccatgtactgtcttcttgatttaaataggttaatctttgatatattctttgatctgtcagtagagctgggcccggtcactcacgcctgtaatcccagcaatttgggaggctgaggtgggcagattgtttgagctcaggagttgagaccagcctgggcaacatggcaaaaccccgattctccaaaaaattaaaaaaatagcagggcttggtggtgtgcacctgtagtcccagctactcggaaggctgaagtgggagaatttcttgagcccaggtcaaagctgcagtgagtcatgattgtgccaccacactccagcctgggtgacagaacgggactgtctcaaaaaaaagagttcagaacaagactctgtctcaaaaaaaaaaaaaaaaaaagagtttgggctctagacgcagacaaacatgggtgaaattcctgttcttttttttattttgagatggagtctcgctctgtcgcccaggctggagtgcaatggcgcaatcttggcttactgcaaccttcatctgccaagttcaagcaattctcttgccttagcctcccaagtagctggggttacaggcatatgctaccacacatggctaatttttatatttttagtagagatgggattctcatattggccaggctggtctcgaactcctgacctcaggtgatccacctatctcagcctcccaaagtgctgggattataggactgagccactgcacctggcctgaaagtccagttctatcatttagtaatcatgtgactttaacaactgtagaattatcatgagaatttatgagacattaatataaagcagttagcataatgtctagcagttcttaattattattaggattgtctttcagacatttgaagactattatctcctatcttccccaaatcttccctcagctttttctctaggaatcacagcaatattatatctgcctaagacaggtttgagattggggccagtcagcttggttttgtttttcaaccacaggctgtcaagcagcaggtagtaatgaatttatgagtcagtaacctttatacaagccccacacatgctcacaaacaaatgccaagtgatctcaagcagtccaggaaatgggaagtatctccttggggaaccactgcagtggtatgtttggaagaacaagctgcataacttgaatggattttgggggctggaaaggctgtatgtgagacagaagtagaaaaaggagaagtgttgatgaggaagcagtcagggaagagccctcccaggtgaggaaaaataggctaaggagtccatttgtgttatgggagacaactcaaagctgctccaagccaaataagggttttgttttttgtggtttcttttttgagatgcagtcttactctgttgcccaggctagagtgcagtggtgcagtcttggcttactgcaacctctgtctcctgggttcaagcgattctcccacctcagcctccccaagtagctgggattataggcaccggccaccatgcctggctaatttttttttttttttttttagtagagttggggtttcaccatgttggccaggctggtctcgaactcctggcctcaagtgatctgcccacctcagcctcctaaagtactgggattacaggcttgagccaccacgtccggccccaagtaagttttgtttggctcaaaaaaagtcttttttgtttgctttgaaaaacaatttttttttttcagacagagtctcactctgtcgcccaggctggagtgcagtggcacaatctcagctcactgtaccctctgcctccccggttcaaacaattctcctgcctcagcctcccgagtagctgggattacaggcgctcgccaccacgcccggctaatttttctttatttttagtagagacagggtttcaccattttggccaggctggtcttaaactcctgacctcgtgatccacccgcctcggcctcccaaagtgctgggattacaggcatgagccactgcgcccggctgaaaagcaaaattttaataaaaatcctgatgtttggttttcttgcaagatcaccagatccagcaatgttgtgccccagttcctgtgtgtcagcagttggctagaggtcaggaattagtgccttttttttttttttttttttttttgagacagagtcttactctgtcacccaggctggagtgcagtggtgctatctcggctcactgcaacctctgcctcccrggttcaagccattctcctgcttcagcttcctaagtagctgggattacaggctcccaccaccacacctggctaatttttgtttttgtttttttcttttttccgagatggagtcttgctctgtcgcccaggctgcagtgtggtggcgtgatcttggctcactgcaacctctgcctcccgggttcaagcagttctcctgcctcagcctcccaagtagctggtgttacaggcatctgccaccacacctggctaatttttgtatttttagtagagacggggtttcaccatactggccagcctggtcttgaattcctgacctcgtgatctgcccgccttcgcctcccaaagtgctgagattacaggcatgagccactgtgcccagccctaattttcacatttttagtagagatggggtttcaacatgttggccaggctggtcttgaactcctgacctcaagtgatccacccaccttggcctcccaaagtgctgggattacagacgtgagccactgcacctggccctatgagttccttttttctgtggaaggtaccatcttcatttgactatgcccatcaaaatttttcctggccagacacgatggttcaaacctgtaatcccagcactttgggaggccaaatcgagtagatctcttgatcccaggagttcgagagcagcctggccaacatggtgagacccccgtctctacaaaatataaaaaaattagctgggtgtggtggtgtattcctgtagtcccagctacttggggaattgaagtgggaggacctttctcctcccgaaaggtggaggttgcaaatgacctgagataacaccaccacactccatccaccttgggtaatagagtaagactctgttttgtttgtttgtttgtttgtttgtttgtttgttttgagacagagtcccgctctgtcatccaggctggagtgcagtggcgccatctcggcttactgcaagctccgcctcccgggttcatgccattctgctgcctcagcctgccaaatagctgggactacaggcgcccaccaccacgcccggctaactttttgtatttttagtagagacggggtttcaccgtgttagccaggatgggctcgatctcctgacctcgtgatctacccgcctcggcctcccaaagtgctgggattacaggtatgagccactgtgcctggcctgagtaagaccctgtttcaaagaaaaaaaattttttccttttgctttctagttggagaccaactaaaccaagcctgtatttaagagcatatggttgaaagattaactctggaagcagatggacatcagtttgaatccctatttgcctcttcttaaccgcgtgactgggccgggcgtgctggctcacgcctgtaatcccagcactctgggaggctgaggcaggcagatcacaaggtcaggagatcgccaccatcctggctaacacggtgaaaccccgtctctactaaaaatataaaaaattagctgggcatggtggcaggtgcctgtagtcacagctactcgggaggctgaggcaggagaatggcgtgaacccaggaggcagaggttgcaatgagccgagatcgtgccactgcactccagcctgggcgacagagcgagactccttctcaaaaaaaaaacagaacaaaactgtgtggcttatgcaagtcactagaactctctgagcttgtttttccacctgtaaaatgaagataatactatttactttacagacttgtatgataagatgaagtataagaagcccagcatagtatttggcatgtagtacgtgctcagtaaacacgtaaataaaaataagtaggccagctatggtggctcatgccttttttaatcccagcacttcgggaggctgatgaaggaggattgcttgagcccaggagttcgagacctggttaacatagggaaacacaccatctttttttttttttgagacagagtctcgctgtgtcacccaggctggagtgcagtggcacgatctcaactgactgcaacctccacctcctgggttcaagcgattctcctgcctcagcctcccgagtagagtagctgggactacaggcatgtgccatcatacccggctaatttttgtatttttagtagagactgggtttcgccatgttggccaggctggtctcgaatgcctgacctcaagtgatctgcccacctcagcctcccaaagtgctgggattacaggcgtgagccaccatgcccggccgaccccatctcttaaaaaaagaaaaaaaaaaaaagaaaagaaaagaaaaaaggataggtaggtgtggtggcatgtgctggtagccctggctactcagcgggaggcagaggtgggaggatcacttgagcccaggaggccaaggctacagtcagctgtgatcataccattgcattcccacctgggtgactaagtgagatcctgcctcaaaataaagtaagtaactaagtaagtaaactttaatgtctttttactgagttaaaagcacaaagtacccaattcccttcgtcagggttttcatcacatagcccaaacatatcaccttggggtgtagtgtcttcctttatccctgaagaatatgagacctgttcatcatttgtcttcctattccacaggcaggcccaatgccgaaacacattgcattcataatggacgggaaccgtcgctatgccaagaagtgccaggtggagcggcaggaaggccactcacagggcttcaacaagctagctgaggtgggtgtgtatggcagagcccaaagtgaacagtctgtggagaggtagattatagctagaaaaccaggctctgagtttgctgtggttggagagtgttttttgtatctgtctctgtgttttattgtttgcttgctagctatagatctcatcttgacattggccagacgtggttgcttttgcctctaatcccacactttgggaggccaaggcaggaggattgcttgagcccaggggttcaggactagcccgggtaacatagtcagaccctgtctctacaaaaaaatttaaaaattagccagacttgatggtgcacacctgtgcccccagctactcaggaggctgaggtgggaggactatctgagcccaggaagcttgaggctgcagtgaatagagattgtgcccctgtactctagcctgggtgacagagtgacaccatctcaagaaaaaaaaaatgacattaacaaagaagtaatcatccagtgaatgaccataaaatactggaaataagaacaaaattgcctcttcttattttaataaatcaatagtttatattttatgcctcatccaatccttattgtatgctctacgtgacttaacattaataaaattgcatctgtagcttcagtaaccttattttcacttaacattttggttttgtttatttgtttgagacagtctcactctgttgcccaggccagagtacagtgcatgatctctgctcacggcaacctccgcctcccgggttcaagtgattttctgcctcagmctcctgagtagttgagattgaacacccgtcaccaygtccaactratttttttgtatttttagtagagatggggtttcaccatgttggccaggctggtctcgaactcctgacctcaggtgatccacccccttcagcctcccaaagtgctgggattacaggcatgagccactgcacccggccaacatttggggaggcattttttaaggtgtatatataagctttctatctgtatctttcaatgactgtagaacattttatcaagaggatctgatataatttaactgctccactattacttgacattacaataaacattataaatagtactgtttcagcctgggcaacatggtgagatcctgtctctacaaaacaaaaaaaaaaattagccaagcatgatggtgcatgcctgtggtcccagctacttacgagactgaggtggaaggatgacttgaaccctggaggttgaggctgcagtgagctgtgttcacgtcaccgcaatccaacctggtgacagagcaagaccttgtctaaaaaaaaaaagtactctttttggataaattcttagaagtgacatttctggacgaacattgagtgactactcattctgctttgccaaggctgaggggtttctcaggacacaggtctttcagtgctaaaactggtgaaagtccccggcaaaccaggacatcactctacacagaggtcatgaacattttatggtataatgcatgttataaattggaagacattaagtttaacaaaagaatggaatatgacaatcttggtgaaatttttaagaagaatggagggccgggcgcggtggcttacgcctgtaatcccagcactttgggaggctgaggtgcgcggatcatgaggtcaggagatcaagaccatcgtggctaacacggtgaaaccccatctctattaaaaatacaaaaagttagccgggcgtggtggcgggcacctgtagtcccagctactcgggaggctgaggcaggagaatggcatgaacccaggaggcggagcttacagtgagccaagattgtgccactgcactccgcctgggcaacagagtgagactccgtctcaaaaaaaataaataaataaaagaatggaaatatggtctgtagttcacaggtcccagtgtcctagcacagggacacagtttgatgccagggccgtgatatttttttccttgagtgaatggcagtgaggttctcaccagaaccttgtagaagtctttacgtttgttgactccagcttctcttttgtaactgagaggcagttttgcctaatgcttaggagcttgagctctggagtcactcagaattcattggcacccctgctttgtcactgtctggctttgtgacctgcagcgagttatgtagcttccctttgcctcagtttcttcatctataaaatggggttagcaatctctatctcagtagattatttgaagataaataagatggcacaatgaaaagcatgtagcacaggccctgacctaaaggaagtactcaaaaaattgaaacttgttattagcaactgtattgactgatgtcagtggtgggttccaacccagatgtgccatccacagtggctgccttgcaaggtctttagggcctgaggctattcaagtgtcaggttctcactggcaattttcctaagatgacagtagatttgtttgcttgtatgtttgttaaggggttagagaggcagctcttcagcttgtttcttctgttctgtttgaatgtcttctgttgtctacgtttaacctcccgctctccatctctcaacattgtcctccacctctcaacattgttctccacctttagtggtacaggattagagcagccccaaaggactaagttttcttctttttttttttttttgagacggagtgttgctctgtcacccaggctggggtgcagtggcgcgatctcagttcactgcaacctccgcctcccaggttcaagcgattctcctgcctcagcctcctgagtaactgggattacaggcctgcgccaccacacccggctaatttttgcatttttagtagagacggggtttcaccacgttggtcaggctggtcttgaactcctgacctcgtgatccgcctgccttggcctcccaaagtgctgggattataggtgtgagccaccacgcccggcctgtttttttttgagttgaagtctcactctgtagtctaggctggagtgcagtrgtgagatctccactcactggttcaagcgattctcctgcctcagcctcccaagtagctgggaatacaggtgtgcgccaccgcacccagctaagtttctgtatttttagtagaaatggggtttcaccatgttggccaggctgggcttgaactcccaacctcaggtaatctgcccaccttggcctcccaaagtgctagggttataggagagacccaccacacccagccagtttcatttctttttgagttataatttcatatggtgaactgcacagattttaggttttgacaattgcatttatttatctaacccatacccctgtcaagatataggacatttcctgccgggctcagtagctcatgcctgtaatcccagcacttcgggaggccaaggcaggcaatcacctgaggtcaggagttcgagaccagcctggtcagcatggcgaaaccccatctctactaaaaatacaaaaagttagccagatgtggtggcacatgcctgtaggcccagctactcgggaggctgaggcaggagaatcacttgaacgtaggaggtggaggttgtagtgagccaagattgcaccactgcactccagcctgggtgacagagcaagactccagcttaaaaaaaaaaaaaaaaaaagatgtaggacatttccatctctccaaaaaaattccctggtgccccttctcaatcaacttctgttctacctcctccttttcctctctaggcaactaccgttctgatttctgtaactataaatttgtttttcccattctagaactccatataatggaatcagacagttgaggatttttgacatattcttcaactctgagcctgttttatcatttgtaaagtaggcatgaaaacagtagtgtcattttaaagtggttgttcaaagaatcaaatgaaattatgtgaaaaccctttgcaggctattaaatgctacacagctgtccagttgttgctttttttcttttaactcagcctctcaacctaccagaataatgaagttatgctgtgagtaataacaccttgtgtttttatattgttcgttagccaccttgtaagggatggattgtgatcccatattacaggtaaggagacttcaacctagagaaattaaatgatttgattccagtcacataagtgcatgctggagtcagggactagagcctatgtctttacactctcagtgcagagttctttcttgtagtgcacaatgccatcagcattcactaagatcacatttttcagtttcttcaatggtggttttctgcttatttgatgcattaattctgacataaacactgatgttatcctagcttcacccagctttggggaggagaaaagtctgtctcctatctccaactctgagtcaggaccaaaaagtatctcttatttccccttcccactcttccttgtatcctagctccttgccttctcccctctcagactctgcggtggtgtttgaacctgggcatcctagaggtgacagtctacgcattcagcattgagaacttcaaacgctccaagagtgaggtagacgggcttatggatctggcccggcagaagttcagccgcttgatggaagaaaagtaagatgctatcagaggggagagcatgttcttccaccacccccagccttatcctaacccttgaaattctgttatctgaggcttacttaagggacttgcaactctttttaatgttagttagatatcttgggtggcaaatatcagaaatacaagatagtctttcattctttatttctaactttttaataaaaaagggggcatttatttgaggatattgaggggtgtcacatgatttaagaacaagtacagccagcctcaagcaaaactgaaaccaggaattaaacccactaggtagaacctctgtattcatttatttccacctctctctgcagaccagttttctcttgcttcaaaagagcagcctggaatcaataaaatcccttaattgggatccctaaattctatcagatttctaccccagagccaataaactatggccaaggaagtggagttaaagaaaacattgaggaagtcattttctgctgcacagtgaaccctaaaaagttactgtactccccctgcatagtcttttgggagggataggatgatgcataagagacatttatggggaagcatcagtaccattcttagctgtcagtaagtttaggcttaacttagggaataaagccagagaggggcaaagacaaatttcagtggagactgcttgcttcaaagtatggagcccttaccagccagaattgcccgaaagtcttagttacaactgttgtgtgcccagctcctacctgtaccaggaagatgagagaacagtgagcctagaactccagtgaagatgagcctagaacaatgggtggtagggagggtagccaggcttccttctgtctatattaggatggtgagactctgggctacagacattgctccccggtccccagcagagcctgtgtggctcagagtttacacctaaggagccggggatggaggcatggggggcatatcccactaatcttacctttttaaagtgtttactatatgccaggctttgagcctaaaatatattcttactcatcctgtaatcacattataccatgacaaagatattattagccaatttttagagagaaggaaagtagttaaccaaagaagttaaggcatatatcctgggtcacacagctatcagacaggcagagccaaggtgcacacctggatctttttgactccagagctgagctatcatctactacactgtgctctgagagacagaccatattacaattcctgcaagatcaaaacgcatggcagaagagatgctaatgagattgcgctgatcagttagtagtagagaaaatggtcttcgtttatcatgaagtcctggcaaaagcaagargaaactcagaggtgcttttccattaatgtgccacagaaccccaaggtctgaggaggtgtagaaagaacctagtgggaatggggtagggggtgctgagttgcatttacctattttatgtgttgggcttctgtgtagaatttgatttgaagaaagggttctttggctaaaagaaggtgggaaaaccactggcctgattctgtttcatcagttgggaaactaaaccctagtaaagagaagaggttgagcaaggtggctcatgcctgtaatctcagcactttgggaagccaagragggtacattgcttgagtccaggaatttgcttgattccagcctaggcaacatggcaaaaccccatctctacaaaaaaatacaaaaaaattaactggggatggtggcacatgcctataatcccagctatgtgggaggctgaagtggggggatcactgtgatgagcctggggagtctgaggctgcaatgagctgtgatcgatccactatgctccatcctgtgcaacagatcgagaccctgtctcagaaaaaataattaaaaataagtaaattaaaattttaaaaaacagaagacaagagcttacacatggtcacacatcaaactagtggcagaactataccacaagctagcaggaggagctgaatcaaggtcttctagtatactgccttcaattaatctcccattttccaaatgtgaagcattcggtttcttcatagcatttccagatgagagaagctggctgaattcattctcactgtatgcagagtttgggagttattgtatggaagcaatataatgtcataattaagaagacaagctctggaggctgactccctacgtgcaaatcctggttctccahcagctgtccaaacaaattacctaacgtccctgtgcctcagtttcctcatctgtaaaaggggaataataagggtatataactcagaggttggtgtaaggatggaatgtgttggtacatgtaaagcacttagaccaatatctggcatttagtaaacatagaatgttagctgtcaccattatcataatatttcactagaacataacaaaagtaccccataatacagctccttcccttgaggagtttactcacttctcaaatgggacaaacttcacagatacataaaatgcaactgcccaaaaaggacacatgaggtcgtgtaatgtatagtaaagagtttgggttcttgctggacatggtggctcacacctgtaatcctagcactttgggasgctcaggcaggaggatcacttgaggccaggagtttgagaccaccttgggcaacatagtgagacctcatctttacaaaaaatacaaaaattagccaggcatggtggtgcatgcctttagtcccagctacttgggaggctgaggcaggaggatcgcttgagcccaggatttggaagttaacactgaaccatgagtataccactgcactccagcctgggtgagagtaagaccctgtctccaaaaaaggggaaaaaaaaatgtagtttggggctgagcgcagtggctcatgcctgtaatctcagcacttgggaggccgagacaggcagatcacttgaggtcaagggttcgagaccagcctggccaacatggtgaaacctcatctctactaaaaatataaaaattagccaggcctggtggtgggcacctgtaatcccagctacttgggaggctgcggtgggaggatcgcttaaacccgggatgcggaggttgcagtgagctgagattgcgccactgcactccagcytgggtgacagagcaagcctccatctcaagaaaaagaatttgggttctcaaatcagacaaactgggtttcaatcctgacaaagcacttgatggctatatgaccctgggcagtccctatctgactgtcctgtctgagccttggcactgaagtaagtttctttcagagttgttgaagggatgcaatgaaataatgcatgtagaacagggtctgacacacaggaaagcactcaaaaaactggtggtcagttattacctgagcaccttgctctctccagctcagcaggggccctatcccaatgctgcctcttttccctgatcagggagaaactgcagaagcatggggtgtgtatccgggtcctgggcgatctgcacttgttgcccttggatctccaggagctgattgcacaagctgtacaggccacgaagaactacaacaagtaagttctcagatttccctatagggagctgtttcaatctttgattccctgctggctttagggagacgtcctgggctttccttggtctggattggtgcaaggggcaatgagagagtaggttgagcagcttagagactttctccgtctgcagggcacaccagacatgattctgcaataacatgttatatgtgtgtatactgacacatacacatagtttctctttcctcctttctctgcccagcccccaccaaataagtgtgtgtgtgtgtgtgtgtgggtgtgtttttacttgacagggaatgggatcggaatacagcagttcttatccctgactttgaagacagatccttcaagaaattcttgttctgttccactcctttaacctatggataggatgaccttgggaggtcatacagatgtacaggggaatagagttcaataatccaaactctgtgatgtgtagctttgaaatataacgtgtattttggcagtggacttgttttacatcaaatctccttcctattttcctttgtttgtgccaatatcacagtagagtcttcctctgaaagccggtgtacagtagaaggggagagggttaggacggcaataggagctatttggtggctgggcacagtggctcacgcctgtcatcctaggcaggtggatcacctgaagtcaggagttcaagactagcctggccaacatggtgaaaccccatctctactaaaaatacaaaaattagccaggtgtggtggtgtgcacctgtaatcccagctactcgggaggctgaggcagaagaatcgcttgaacccaggaggcagaggttgcagtgagtcgagatcacgccattgcacttcagcctgggcgacaagagcaaaactctgtctcaaaaaaaaaaggagccatttagtatttgtcttattataaaactagttacatgtttattccaagaaaacttggaaaccacaaaaaactcataatttcacctttcagaggtatccacaattaacatttgatgtgtatttgtttttctagggaaaggctggaagggcttctctgtaatcagtgacttcaatcatcagtccctgtccccctttggtaaattattctcttcttccctcctcaggtgtttcctgaatgtctgttttgcatacacatcccgtcatgagatcagcaatgctgtgagagagatggcctggggggtggagcaaggcctgttggatcccaggtatcccgagttgttttgcatggtaattgttaaggaaaacaggcctgggccagcatggcagctcacgcctgtaatcctagcacattaggaggccgaggtgggcagtccacttgaggcaggccaggagttcaagaccagcctggccaacatggcaaaactccctcttttcaacaacaacaacaaaaaagcaggcctgtaccaaaccataaagcccctctgtgccatgtacttggccagaggtctaattaggggagcatgtggaaagatttaaggggatctcccaaatttagagattaggattggcttattacaacctgcttcagaactagagttcaccacacaccaagaaaccccagagaaagagcaaagcagatgacaaagccatgttattattcctttacaaattataccctcctggccctttggtagtgtttttccaagaatgacttttcatgaatgcagtttgttggggctagagttctttaggtctctcatgttctagttccacacaagattcaggtgtttttcttttcttttttttttttttttttggtgaggcaaagtctcactctgttgcccaggctggagttgcaacctccacctcccaggttcaagcaattcttccgcctcagcctcccaagcagctgggactacaggtgcatgccaccatgcccagctaatttttgtattttcagtcgagacaggtttcaccatattggccaggctagtctcgaactcctgacgtcgtgatctgcctgcctcagcctcccaaagtgctgggattacaggcgtgagtcaccatgcccagccgattcagggatttttcaaaaagaaaattattaattattgtcaacatagtggaatcctaattattaaaggtggagagacttttgaagccatttaaatatttggtccctctcatgttattatttatgtaacttttaatatatttgtaaactaacagcaatagtaaaataatagtagcaaaaaataacccaggagatgtgttgtgttctgtatttcattaagtcattaaccttatgtgtgagagattcaaggctgttgtccattgtgtagatgagaaaactgagttcagcattgaagtgacttgcccagggtcactctactagtaagtgccagagctgggactcatatctaaagctgtttgattttagggttcttatcctttacctctattatgtgggatcttgggaagcaggaatttttctggttcccttcccgattcgattgacctaggaaactagattaaaaatcaaaaagttacttggtgagaatagaattagataaaaaggagaggagacagtttttgaggctattttatgaatgcctctccttcctaacagctgggtgacatttctctgtcacatagttcattcattcaacaaatattttatttttatttatttatttttattttttattttatttatttttttgagatggagtctcgctctgtctccaggctggagtgcaatggcgagatcttggctcactgcaacctccgcttcccaggttccagcaattcttccacctcagcttcccaagtagctgggattacaggcgcccaccaccgtgcccagctaattttttgtattttttagtagagacggggtttcaccatgttggcgaggctggtcttgaactcccaacctcaagtgatctgtctgcctcagcctcccaaagtgctgagattccaggcatgagccatcactcctggcccatttttatttttattttgagacagggactcactctatcgcccaggctggcgtgcagtggtgtgatctcggcccactgtagtctgtgcctcccgggcccaagcagtcctcccacttcagccttccaagtagctgggactacaggtgtgtgccaccatgctcagctaattctttttttggagacagagtctcactcttgcccaggctggaatgcaatggtacaatctcggctcactgcaacctccgcctcctgggctcaagcgattcttctgcctcagcctcctgagtagctgggattacaggggcatgccaccatgcccagctaatttttgtatttttagtagagacggggtttcactatgttggccaggctggtctcaaactccccacctcaggtaatccgcccacctcggcctcccaaagtgctgggattacaggcgtgagccaccgcgcccggcggttttagacttacgttacagtggatagtggtgcccttcaccatgctaggtaaccctgagagaaaatccagttgaaaagggtcagcagtttggttttggatatcctgtacatgttgaacagagatgtcaggtcaacagttcagcgagggattggtatagtcaggtcaacagtcagacagagatgtcaggtcaacagttcagacagggtttatctctgtcgccagtatggaagccatctgtgtataggttaacttgagcaaagaggggatgagaaagctaaggagagtctgtctgtctatctgtgtatttatctatttagagatggtctcacactgtctcctgggctggagtgcagtggggcaatcaaagctcactgaagcttggaactcctggtctcaaaggagcctctcaagtacccagtactacagacgtgcaccacctacccagctaactttttatatttattttttgtaaaaacagggtctgactttgttgcccaggatggtcttgaactcctggcctcaagtggtcttcttgccctggcctcccaaaatgctgagattacaggtgtgagccactcagccctgcctgttaaggagtgtagagtgagaagaagaaagagcctaagatggcatttttgaggaactctaccctttactggctgggtagaggagaataagctttataagcaaaaacacagaaaagcaggaagaaaaccagggcagccagcattacataagccaagaaaagagggagtttgttggtgcaagttgggaaggggtagggcacccatggaaacaatggtgtcaaatgctgtagagaggtcaattaagatgtagagtgaaaatcagctgttgttaaaacaattaagagactggtggagttagcagaggtagagagcaggcaggaagatgagacagaaaaggggtatagaaatagaagcatgttttcaataaaattcttagtttggaggtactttcgtagttcattatatttttgtgctttataatgaatatgtttcaaatattcttgtatgtatgaaataaatattaaggcacaagggttgacactagaatgaaagaaagccatttgacaagcagatctaatatgcattatgcctaggactctgatcttgactcctagtccagcatgctttaccctcataccacattacagtaaccactaccttatctcctgcttcttgtccagcaagtttttccatatccttctctgtcctgcatggtttagtaacttgcctctgtggggttagttatgcagacagggtgtgggttgggcagtatcaccagggtcaggaggccaatgtctcaacccaccaactcctgaagcttggtgtgctcagactgggctaatcagggcctgaggcgttacactttatattattcgaatttagacaaacctgcatttataacaaagtcagtgcgttaattacaattaggtcctatgcttctaatagctggaattttcctgatttctcactatcaccatccaactcctcatttttctttcttccagggtatgtatgtagatgtgtgtgtgtgtgtgtgtgtgtgtgtgtgtgtgtgtgtgtgtgtgtatttttgtttttttgtttttctgagatggagtcttgctctgttgcccagggtgaagtgcagtggcacgctctcaactcactgcaacctccaccttataggttcaagcagttttcgtgcttcagcctcctgagtagccaggattataggtgcacaccaccacacccggctatttttttttctttttttttttttttgagacagagtctcgctctgtcgcccaggctggagtgcagtggcacaatctcagctcactacaacctctgcctcccgggttcacgccattctcctgcctcagcctcctgagtaactgggactacaggcgcctgccaccccgcctggctaatttttttatatttttagtagagacgggtttcaccatgttagccaggatggtctcgatctcctgacctcgtgatctgcctgcctcggcctcccaaagtgctgggatcacacccggctattttttgtatatttagtagagatgggatttcaccatgttgaccaggctgatctcgaactcctgacctcaagtgatctgcccaccttggcctcccaaagtcctgggattataggtgtgagccatagcacctggcctgtttcgttttgtttttgagacagggtttcactctgttgctgaggctgaagtgcagtggtatgaacatggctcactgcagcctagacctcctgggctcaagagatccttccacctcagcttcctgagtatctgggaccacagatactgctaccacatctggctaattttttgactttgtagagacagggtcttgccatgttgtccaggctggtctcaaactcctgggctcaagtgatcctcctgccttggcctcccaaagtgctgggattacaggtttgaaccacggcacctgaccgaggtatatatgtatttttttagcagttaaattaatagattgttttgtgagtctggaaattatagaagaaggaagtagattgagaccaaaggatagttaataaattctattccaccgtgttaccttgaacgggctacttgattccctgtaggcctctgtctttcttataaaacaatagtgttaatagtaattgctaacacttactgagcatttactctgttccaagcattaagtattccacatacatttatccttagaccctataaggtagatactgtttttatgcccattttaaagatgagaatactgagacatggagaggaaaagtaacttgtgcaagttcacatagttggcaaacctgggggccaagatttcaacctggcttcagagcctgtgttctcattcactgtggcatattgacttcctcatagcaaagctgaaatgaacaataaggcagtaaaaaagaaaaaaattagatggacatggtgacttatgcctgtaatcccaggactttgggaggctgaggcaggaaaatcgcttgagccctggagtttgagaccagccctggcaacacggcaagaccctgtctctacaaaaataaaacagttagctgggtgtgctggcacacacctgtagctacttgggaggctgagtgaggaggattacttgagcctagcaggtcgaggctgcaatgagctatggttgcgccattgctctctagcctgaacaacagagtgaaaccctgtctgaaacacacacacacacacacacacacacacactcacttttgacataaatatttataacacatgaaatcacataatgaatagtttacactctgaatcatgcttttatcattcaatgttacgagtacttttcatgacccgtgtttttaataattcttcatatcattatttataatggctgtaaaatatatcttgtgttaatttctttaaccagtcttctatttgttgggtatataggcagtttaatatttcattattacaaataatgccacaattaaatctttgactgaacttgcctgcattttttattgtttcctcaggatctgagtttgaaagtgctcatttcaccttattcttgccaagattttttaaatgtaaactgttctgaccaggtgcagtggctcatacctgtaatccagcactttaggtggctgaggcaggttggatcgcttgagctcataagttcgagaccagcctgggcaaaatggtaaaatctcgtctctaaaagtacaaaaattacctgagtgtggtggcatgcacctatagtcacagctacttgggaggctgaggtggaaggatggcttgagcccaggaggctgaggctgcagtgagccaagatcacatcactgcactccagtctgggtaacagccagatcctgtctcaaaaaataaaacaaaaaaataaacctattctcataggtaaaaactgatattttaccgttatttaatgtaaatcatttccgaaaagtcttcacgtagacagctttaactcaccattccatttagtgatggatttttgttggccaaagtctacagatgttccattttgattttgtcagtttcatctttccaccctagagttaacccctttttttttgtttttgagatggagtcttgctctgtcacccaggctggagtgcagtggtgcaatctcggctcactacaagctccgcctcccgggttcacgccattctcctgcctcagcctcccgagtagctgggactacaggcgcccaccaccacgcccggctaattttttgtatttttagtagagacagggtttcatcgtgttagccaggatggtctcgacctcctgacctcatgatctgcccgcctcggcctcccaaagtgctgggattacaggcgtgagccaccggcgcctggccaacccctttgtttttttgagacacagtctgctgtatcactcaggctggaatgcactggcacaatatcagctttttccattaagaattctgcccactgcagaattcttactgcatacctactgcctaaagtaggtagaagaaactctttgcagataaattgtaaactcagagagactgagtctctgaagtcacactgcaagttggtgggactgaaaataattttttattattattctttatatagcactttatagttcccaaagtgcactcaaatctattatttcatttgatttgaccctcatgataacctataaggtggataggacaaatgggccctgtttttttttttcccttttaattacatttattttaatgctgaatttactcctgtgccataagtttttgtttcttcagtttctttgggatatcattttcttctgggcaacctcctcttctggtttaggaacaatctgttccttttcagtaaggatcatctcaatgtggcagggagagctcatggatgggttaatccaaccatgagctctgtaggtccagcggcacatcttaggtgctttgttcacttggatatgctcaatgaccagagaatctacatttaaacccttaagttcagcattactctctgcatttttaagcatgtgcagcaaaaattcagcactctttttgggccactgaccttgtgtccagccccactgcttggcctgggcacacctgccagctccaccattgtaacgtcggaatggtacgcactgtttctgtaaagtgacatctttcaggtacttcatggcttttcrtatatgcatacccttgatggcctgggcagtttcacgaatattcttaaagtaaacacgaagattggaacctcttgatttgcatgatatcatgaggttctccgggttaagtgaatagtgaaccattttcacagattacctcaggccgcttagggaaagagcaaatgggcccattttaaagataagagaatgagaaattatatggattgtacagagtctcacataacttggagaattaagaccatgctgccaagacaagattgtcagattaccagagaaatctgaaccagagcccttcttattgctcaattataagtgaatactgtttcctctgtgatgatgatacggaaaagaaagctctctctgtggtttgccttaaaggactgagagagatgagcaacttggctgggtgcagtggctcacacctgtaatcccagcactttgggaggccgaggcaggcagatcacttgagctcaggaattcaagaccagcctggccaacatggtaaaaccccgtctttactcaaagtacaaaaattagccgggtgtggtggtggctgcctgtagtcccagctacttgggaggctgaggcaagagaatcacttgaacccgagaggtggaggttgcgggagccaagattgcgccactgcactccagcctgggtgacagcgcaagactccatctccaaaaaaaagatgaataacttgcctaaagacacacaactagtaagtgtagagtctggttttgaacactcagcccagatctttctgctttcctgaccatgcgtccagaaacatgttcccaccaagaaatttttgtcttctggaccctttccaagatgtaactctaactacctggacattctgaattctgcttctgggtagttggtaggacaggtaaacagcattcttggagccaacagacaccagccatgcaaataccctctttctgtggacaggatagttttacttaagataaatgcttccactcaccagttttcttcaattctatctcctttctgaccatctctgtgcttgggaaagtagctcttatcaaacacaggagaactgatcatattgctgtttatttaaaatccggtgtaatgtggaatttttgcaatgtttcaggrtccatatgacttaaataagrttttaaaaakaaattagctgagcatggtgttgcacacctgtggtcctagctacttgggaagctgaggtaggaggattgcttgagcatggaaggtggaggttgcagtgagctgagatcacaccactgcactccagtctgggcaacagagggagaccctgtctggaaaaaaaataaaatatgttttctgtttttttttgttttgagacagagcctcgctctgtcactcaggctggagttcagtggcataatctgggcttactgtaacctccacctcctgggttcaagcgattctcctgcttcagcctcccaagtagctgggactacaggcatgcggcaccacacccagctaatttttgtacttttggtagagatggggtttcaccttgttggccaggctggtctcaaactcctgatcgcaggtgatctgcctgcctcagcctcccaaagtactgggattacaggcatgagtcaccacgcctggccaaaaaaagttatttacataaattcaaacaataacagaagtacataaagtaaaaagaaatagtcttttcttccttacttcttatccaatccactgttaatagtatgatgtatctttttagactttgttctttatgtatacttatatgcacgtgtgaatgtttgaatgtgtgtgtatgttttatactatatattctctgaaacttgccttttacatttaacattagattttggacatctttccaaatcagtgcatttagatttatctttatttttagaatgcagttgcatagtatttcatcaaatactgggccataggatgtatgtatgtattttaaaaaacaagaygtttttagcaaaagacaacagatatttttgtgggtgcatctggttttaggcctgaggctaaatgactttcagcaaattattcatctttgagcctcagtttccttatctataaaatgaggatagaaataccttatgtatctgctgagcatggtggctcatgcctgtaatcccagcactttcagaggccgaggggggggcggatcacgaggtcaggagatcgagtccatcctggctaacatggtgaaaccctgtctctactaaaaatacaaaaaaaaaaaaaaacaaattagcagggtgtggtggcgggcacctgtagtcccagctactcgggaggctgaggcagaatggcatgaacctgggaggcagagtttgcagtgagccgagatcgtgccactgcactccagcctggggaacagtgtgagactctatctcaaataaataaataaataaataaataccttatgtatcagaacatgtcaaaaaaggcaaaaaataaaaaagagaaaagaattttacattgtattctctaaaaaaaaaaaaaaaaagaaataccttatgtagttgtgaagatttaaattcattcattaatttagcaaacattttttgagggccttctgtgtagtattggctagtgtatttgatggtattgtataaactgagaagcctatatatggaagttcaccatgagaacactacagaaagagaatactacaggatgtgtgcctctctttgtctcttcttgctcatcttagtgatatctctgagtctctgcttgataagtgcctctataccaaccgctctcctcatcctgacatcttgatacggacttctggagaagtgcggctgagtgacttcttgctatggcaggtaggtcatttccaagtactattatgtttgtgtcatggggaaaccaactgtatccacagaatggatcagagtggtccatccccactcccaaacaggctggggccagagtacttctggggaaagctaaaatctggagaagcatctctaggctgtgtctcataatatttgatgtccattcctcatctgtcgctggctttgcgaatccaactatagtgaaaacttcattgtgccgcttttcaaggaatgggacttctgtcttgcatccctgagcgtaagctcttgccttggtaacctgccagggaccctagcccctctgggttggaagcttgccttgcagttactagtccctccccttcaggataaagggccatacctatgcaagcatggtaaacaatatgcaaacactcaagtctctatcccctgttaacttggtccctggagagcacataactaggggaagtccttgttctgggagagactccatttggaagcagctcacatgataaagctccagaaattttaatggaccacaatcttaaaagtgagctaacgcagggcgtggtggctcacgcctgtaatcctagcactttgggaggctgaggcaggcagatcacttgaggtcaggagtttgagaccagtccagccaacatggtgaacccctgtctctactaaaaatacagaaattagcctggcatggtggcaggtgcctgtagtcccagctacttaggtgaatgaggtgggagaatcacttgaacctaggaggcagaggttgcagtgaggcgagatcgtgccactgcactccagcctgggcaacagagtgagactctgtcgcaaaaaaaaaaaaaaaaaaaagaaaagaaataagtacaatgtgcacctattggttctgtggcccactgtgctgctcagatcacgtttgggaagtttactgatgggctgaattttaagagactacagagtcagttactcagtgtacagaattagttacattgacaaacttgaggacttactggaagaggccaaactggaaagcaaggaatctcatgtcttacaaaaaatgaggaaaggatagtggtctgcaaaagggaaataagtgacaatgtattcccttggaaaaaagtgttgagttccttctttatgctggaaatatggcagtgagtgagtcagaaatgatccctactgtcttgaaacttatagtttgctagcaaagacaaactctgaacaagtcattacaactttgggaactgataacaggcagctctaatctagccttgaaatacttgaaagaatgtcactttgaagaagaaacaaacttgttccagaaaaaatacctgggaccttagtagaagttgtagggaaggtgacattggtttagcataaaaagccaaacaggcttcggacaactagttatcccccatgaggtactgaattcctcaccactagagatatcaggcagtggctgtcaagagtgttccaaaggggattcttcatcagtgattattattaaagtacacctggctctttgctatrcatatgttatctcatttaatctaaacagtaccctgaaaattaggtattcctattatccagttttacatttgaggaatctcaggccaggtgaaattacccctgctcaaataaatggtaaatggttggagccaaaattcaaagccaggcagtctggctccagagctcatgctctcaaccactgtgccctgctgctggtacttaaaaataacaatggcagctaccatttgttcattggtgacctttatcagacagtatgtcttccagatgccctctaagggccaagagccaataacataatccagatgttatttcatagtcctaaaattggctcttagaaaaatcctggtggaaatgttgatctagtctcgttttagttctgctttaccacaggcaggtgatctggctgcctcaagtgacgcctccccctactagtgaatgaatcagggccagcagcagctgcagctacagctcaggatgcctgtaacattgtcatctctgggcttctgggtcctgcttagcctgctttttccctggaggactgaccagggatgcggcccagcaacatgttactaaatcatactctcctccctacctttcccagacctctcactcctgcctggtgttccaacccgttctgtggccagagtatacattttggaacctcttcgaggccatcctgcagttccagatgaaccatagcrtgcttcaggtaagaaagagttcagggctggccagatgggatgggatggaagaaaagattagcattgattgacaaccaccttactatataccaggcacttcctaataagatgatgataatgatgatagtagctaccacctactgagtatctactacttgtcaggcactgcgaacattttacatgctgcaactcatttaatgttcccaagaacccaatgagggaagtcttattagcccctcccttatgtaagtaagcaaacagaaatgatttagttaaggacacataatcagtaagaggtaggaataggatttgagctacaggtcttttatcttttaaagactcaggaggaaaaggcttctcagagaaactggccattattcctttaaagtattaccctaataaaagatcgtagcagtagggattaagaactaaatagcattgtctttccattgtgtaaacctatgttgtgtcaagacttgaagtttgactttcagttttcatcaccaaatcttgaaacaggttttattagcagtcacctgtatatgattaggtctctttataataatggtagtggtagctaacatatgaggatctacgagggcacttaggtgatttcatgtaagttttcttatttaacctaacaacccagcagttttggtgtcctcatttttcatatatggaaccagaggggcagagagacttaagtaactgtcccaaggaacctgaattttatctttatttatttatttattttgagatggggttttgctcttgttgcccaggcyggagtgcagtggtgcgatctgggctcactgcaacctccccctcctgggtttgaacgattctcctgtctcagcctcccaactagctgggattacaggcacacgccaccatgcctggctaatttttgtattttcagtagagacagtgtttcaccatgttggccaggctggtcttgaactcctgacctcaggtgatccgcccaccttggcctcccaaagtgctgggattacaggcgtgaagagcctgaattttaaaatcaaagctggtgctgcttcttcagtctggagagataatgccaggaggaaataatgatgtgagtcagggattcttaatctccttggtattggggtccctttgaataatctaatgaaagccacagaccatctccctagaaaaatcgcagatcactcaaatgtggaattttgcatagaattgtaaacttatcatggaaacacatagaatacttttttttttttttttttttgagacggagtttcgctcttgcggcccaggctggagtgcaatggcgcaatctcggctcaccgaaacctccgcctcccgggttcaagtgattctcctgcctcaccctcccgagtagctgggattacaggcatgcgccaccaatcccaactaattttgtatttttaatagagatggggtttctccatgttggtcaggctggtcttgaactctttacctcaggtgatccgcccgccttggcttcccaaagtgatgggattacaggcatgagccaccaagcccggccacacatagaatactttaagggggttcacataactgctgaaatctgcccctgaatcccaagtccataactcctgctataagtaaatcaaatcacaaagacttgatcatgtatttaattacttagtctcagaatatgaggaaattraaagaagtttagaattagtgaaaagaaaaacagcaaaggcacaattatccactgtcagtggggaatgaatatcagatttttccatatgaccaaagctccctctaaaaactaaaactttacccttttttgatggaaaaatttctaaaatgtatcttgtacataattcattgaaatctatataccaggcacttgctaataatgatgatgattaggataatcacgtgctattttttgtttttttttttttttagcagggtctcactctgttgcccaggctggagtgcagttgtgcaactttggcttacttcagcctcccaagtagctaggactatgggcacacaccaccatgcctggctgatttttgttattttttgtagagataagtcctcactatgttgcccaggctggtcttgaactcttaagctcaagtgatcctcctgcttcggcctccccaggtgctaggattatagacatgagccaccatgcctggccgtcatattctaatgattatgataatagtaattatcatctttaaacacttcattgtacaacaatatccttgaggggtagggctgtttgctctaagttagatggtcccagaatacctgggtttgaggtttcatgtatatttttctgtgtcctccctctttcatttcctactgctgtcaacagttaattttgacagtatctctcctcttccatagtatttactgttttaaatcagctatagacaaggaaaccagatagtcaagcttgttggaattatgtatataaaatgagagtgaactggctctgcatgaagcccaaaggagcttggtgcatgagtttttgtgtttttacctctaattgggctgctcagaagtcttttatagtaatttcacgtttctcagatactttgcatatggttgtcagaggagttaactcaagtttcattcattccataagtatttattgagtagtatgaatcaggcactgtattaggcacaggagagtcaacaggtagccagagggacaagatctctacctttgtggaacttgtattcttgaggagacagaaataaacaagtaaacaaatatataagttccgattgtaataaggcagtgaagaatacagagtgatgtgctagaaagtaatgaagagaatgcaaagagactgaggttaaagtttgggtcttggaagaacaaaaaagaggtcaatgtgccaagggagaagggcaggaaatgaggctagagtcagaccttggctcatatagagccttgtaggtcatggtaacaaagctgaaggactttaatcaggggatgacgggatctgagttgcattttgtaaaaatcattcagaattttcaacgggctggagttaaagccaagagacagaactcctgcagtagtccaggtgagagaggatgcgcctcgaggtagggtggtggcagtagggaaggggaggagtgaagacgggataaaaacaaatgttgaaatagaaacaagtgaaactagctatatcaaggtgataatataactccccagagaaaggaattaattcagcttacctgaacacagttctctgctattcatctttagtggaatttcttttcaggataatacaaactgcaacacaaaattaaacattacttaagaggtttattgttagtggcaatgttggtaatgtaattatgaaactcttgtttctttttttttgaaatggagtttcgctcttgttgcccaggctggagtgcaatggcgtgatctcggctcactgcaacctccgcctcccaggttcaagcgattctcctgcctcagcctcccaagtggctgggattacaggcatgtgccaccacatctggctaattttatatttttagtagagatggggtttctccatgttggtcaggctggtctcaaacccccgacctcaggtgatctgcccgcctcggcctcccaaagtgctgggattacaggcgtgaaccaccgcgaccggcctgaaactcttgtttcttgtaggctaaaacaaataagtacaaataataatgttattaggaaccaagacacttaggttgtggccatagcaattggttgtatagttctgctgtttcctgggatggggtggaaggtgtttgaggtcaactattaagtgttccatttttacctatggatcatatttgcaaacttttttttttttttttttttttttgagacggaatctcactctgtcgctggagaacagtggcatgatctcggctcactgcaacctctgcctcccggattcaagcaattctcctgcctcagcctcccatgtagctgggactacaggcacgtgccaccacgcacaactaatttttgtatttttagtagagacagggtttcaccatgttggccaggctggtctcaaaatcctgacctcaggtgatccacccaccttggcctccgaaagtgctaggattacaggcatgagccgctgcgcccggcctatatttgcaaacttttattgagttcttaccacatgtcaggcatccttccagtattgagttcttaccacatgtcaggcatcctttcagtaaattctgtgaactgctttaaggcagatactattattattgcctctgtttttagagcaaggaatccaaagttataatagagatactgattatcttgaagccttctccagcaggagcccttggaggtcctggccaggctttctctaccccagaagcttcaaagctctgtttctagaaatcatatcaccttggcagatgcactaaggggagaatccagactaacagcatcctcaccagtttgttctcagaccagagaggtctttccaggcttttctcatgtctcccttttacagaccctgtatcatggccaaactggactcttcccagttacctgttccatgccctccagtttcctacctgtatgtctgtgctcttgccccatcacccaaattcccattttaaaatctgagctgctctgtctctaggccctgcccaatgtgtccctattctctgcaggaagccagggcaaggggctaggctctggacctagagtagcttactgagaggaaggcagcgggtggatcgtaagggaagcagggacttggctacaagttgtggggagccagaccttggtatctgaatggaccatgacagtctccaggtggtcacctagccagtcttaaaggctggcaaagggagatcttgactatgatgcagtaggacttgtcagcaaagaggcagggacaaatagagaatcaggccagggagggggtgtgcggcagtgcagagcagctgatcctcaatcacaagttgcatggatggtaggtccttgagaggtcactgatggagatgagtaaaaagtgttcacctcatctccaaggatgatattagagagggaaaagacacatgttcccacgaagcttcctgtagtacatttgtcacaatttaaacgggctggattgaacattatatttcttctgctcttcaggttgtcactatcttctcctcaggataaaagcttgagttatgtatgtatgcatatatgtatgcatgtggaaatggggtctcgccatgttgcccaggctggtcttgagcagctgggctcaagcgagcctcccaccttagcctaaaagcttgagttaatgtctcagacattcatgactttgaatattggcactgcctacatagctatatgactgtacagttacttaacccctcagagtatcattttcctcacctgtaaaatgagagaagtagcgtttacagtaatacctaccttgcaggtttgtgatagggattcagtaagctaacacatgtcaagtgctgagtgcagtggctggaacagagttcattttccaagaatggtggccaatattgttccccacatgtgtgtctcttggcctctcctcagactcctctctggaaaagcaccctgcacatcctgtccccagtacaactccccaggcaaggagactctgagggtgcttcagaacatcatgtttctggtaggaggtgcccttctctgcctgagagcagccctcagaaakgcattcctcatgctgctgacctgggctggctggttgcagcttggggaaggacttttcattggctaatgttttgaagccaaggacctgcagcctctctccaggtgccaacagagtggtagaggacttttagatttaagtactggagggactattacatcttgttctctgattctaccaaggagagaataagagcagagagggataatgcccaggaggaatttagattcataggttagaaccacatttctcaaagtgagcttcttggagcccttgcaccaagattggataaggtctgtacaaaaagtctctaaggaaagaattaacgccctcacttaccctgattggtcattatacaaggatagtagacaaatggtcagggagagaaaagttgacctctaggacttctgttagcttggatttcccaagggtaagtacttgagaagaactggaaacacctctgagattgaaagggtagattcagaccatgtggaagctggatagacaggtatccagatacaggccaccagcttttccacccctagaaagtagagcttatacacaggcacgagatacacttcacattgtcctctcaagaagttatcttagtggagaagccaagggaacttcagccatctcagcctcgctgtcattttctgtaaaatgacgagcagacaccctcccaactctgctatctgaacaatgaactgctaattcctggcagacaggggccaggctctgcctgggctacagcccccattgctggcatgcactctgatgccatctggaagaagcttgcgcctcatgaagtggctttagctagctccatatttcctccctctgttgctgagcgtcccccatcctttctgttctgccagaaacttagactacttagcccagtccacaagtggcggtgatagaacagctaacagttaatagccaagcagtaggctgaaaattcattatctcatttttcctcaaacaacccagtgaggtgggtactcttatcccggttttgcagagtaagagagagccttagagaggtgagggaggccttaggaacttctcaaaccccagtgctccaggtggacttactctggccttaacaggctcttcggttccatgcatctttgctcattactcccactgccagaatattctccctgccccccacacacctcacctctgtttgaatcctcctcattggttaaagggccagctcaaattctgtctgtccatgaaggtcactgctccgtgatgttcatcagccacacttgctttctcctctgaactgcatgacccttaccacatcctattttgcatcgtggcactctgtgtgcatggctgtacaatcagcctgtaagcacctggattgctgggatcgtgtcctgcgcatctccatatcctcaaaaaaaatcctgtatgtagcacccagggagcctcctgaccaaggcctggaagaagcccttccagcaagacggagagctctacggcaactgttcaagcccgaagtcctcatagctccacatgtaattcattgtaatagcagaagagaagtattcttgaatgcctgggattattcaggagccgggggggacagtccagaattctcatttgtcatccttattcatgcagtaaacctttattgctgagagacagcaaatcagttccctgctccatgtctgtctccagcagaaagtacctccctcacagctccattgtgagggtcaagtgaggcaacagatgaagtggttgtgcacatgtaagatattctttaaaccatgaagacagagcagtcaaggtgcttacaggctgattaggacaaaaacatgtatacaagtttatcgtaatacaaggtagaatgtgggaagggtcatcagggtataggataccataggaaaatagagtttctcacacatggaataggtttggcaggaggagctctagtgcaaaggctttgcaggtcagttagactggcaggaacagagaggatcagtgaggcacaggaaagccttggttctgctccaaagggattttccgctcttctgtatcaggagcatcctcactgctctcctgggatcacgtggtcagtcagttgagtgtttcacatgtacagggcaccccaagtgctggagaggaagaagcccagtctctgccctctagtacttgggatgataactgctgccagggagtatgatcaccacctggtgtcagagctggttgcaagaggcttgaaggctctcaaacttccaagggcttattttctaacagaaagagtggattgtgaacactaacacttattctactatgcagaatgcaataagtggcttaagagagttgaacctgcttctcagaatgttcataggggggtcatttgctggaaggatcaggctggtcttcatacaggaggcaagtctggagctctgaaaaatagcctagggagtggggaggatggtaccctcagaggaaaacctggggagatcaaaggaagtgacccaagggacatgtccccgacaagaataggacctttcttgcagcggagaatagacaataacaacttgtaaaattgctgtttctgtctaagagcctgctaatatcctagagaggattttgcatatgttatctctaatccttaaaaccactcttcaaggtaggcacaacccccactttacagatgaagaaatgaggttaggacaggatttgcccaaagacacaaagccagttgatgggggaatcagaagtcagacccacatttgtttggttccaagagcatgagaaaaactttaagaagtacagacgcttccacacaaaacaaaccaagatggacccagaattgccactgccctgcctgtacaacatgagcaccacccactgcatacctactcccaagccttttcaaatctggtacctactttccactgttccacttcacttggcccaccctgtgccccaccccctacctcctccatcccagtttcacccactcctaaaaatgatctccccaccccaatccccacttttctctagcagaaggcccgagacatgtatgcagaggagcggaagaggcagcagctggagagggaccaggctacagtgacagagcagctgctgcgagaggggctccaagccagtggggacgcccagctccgaaggacacgcttgcacaaactctcggccagacgggaagagcgagtccaaggcttcctgcaggccttggaactcaagcgagctgactggctggcccgtctgggcactgcatcagcctgaatgaggctggccacctgccactttgccctgccctctgcctccagggctccactccccttccttttcttggtgaaaggcacctcctttcctgataatgaatggtgttccctttgcttggctggggagccccccaggccaggtttgctggccatagatacctttgggctgcctgggacaggctcctgaggaggattgagggtgaaagtctcccacgagtacactaaacctaggtctggtcaccaatagggtttggagagcaaagggccacaactcatcagctgcctgtctcttagatgcactttctttttccaccagcacatccttcaacacacagaatttcagggaagagttctccccaaaaccctagctctttacccttccattttagccttccacccagcttccacaaaagatttggctctaccttggatctgctagtaaataactaataggcaggcagttatttgggtaaggaaaaaaggggtgggagagacagaaaatttgcccatctgctgctcctcccccttggctctccacctgggatttgctattgaatctctaccctctcccaccacacagtactgattgctcactgaaagactcagcacccccaatggtgcgcggaagcyaggcgggcgattacaatccaattacctattgtcgactcagcccacacaagcttttctcctcctcttgcagggcatggggccaggctccactcccaaatgagactggccccctccatggttcagggtaacagaagggcctgtaggccctggtgaactgaatccagcacaggcctcccctgtaacacaacaggactgagcagaaccaaacacttcttccaactgactctgctccctgccctcaccatctcaaactctgattcccactccactcttcgaggtttctctcagctttttgacctggctccctaagtaggccctagatgatttattcttggcatggcaaagcttgttctaggtcctctgcttgtgagggtcaaagctgtgtcctttcccttacctccctctgccaggacttgctgcagagctgctgagaggattagtgcctttgaagagctgtctgcctgagcaactctatttcaggtgccccacaccggcaagtaccagccagcaacaccaaccaaatgctactctctttaaagtccattttccttcttctttttttttttttttttggagacagcatctcaccctgtcctggctggtctcgaactcctgacctcaggtgatccgccggcctcaccctcccaaagtgctgggattacaggcatgasccaccatgccagacttcccattttactttctgcaagctgtttccctagcagctccctctaggggagaggtgaaatcttgcaagttgtagcaagagcacacaggaaacccctaactttcctataccccacccgcctcttcccctttctgtcccgggatacctggcggcaagagacttcttggctattgtccatgctcccagaatcaagcataaatgccagacacggcgattgagaagccaatcagtgaaccctttggcaaagcccccatccacacctggcactcccctctaccaatccctggcacagggttcctggagagcaggtgctgtacattttacagctttacaatggggctgttgacagccataattagggaggcatgaattatgcggctataatgcagagccctacaattaaggcgggaatgaggggctggaggcagcaaacggaatctgccctatgagcgtggctgttgagtcctgtctcctgggtctgactttccgtaatatgattggggtacagtagaggtgattaatggggctggcatctctctttggcctgaggttctgtattctgggaaaggtayacagggtggagtagggagaagctgccccaggaggcgatgtagtggtggaaagaagaggcagagaggtcgtcgtcgtcgcccagcagcaagggctgcaaaatagtagaactcgtggttgctttggacaggtgtgatttgtgcaagcyaggttcaacccttgcctcaagaaatcagatgggaccaatttagtgtccttccacctgtgagccaagcccccatttgaggacatctatcgtattcttgtgtgctgggtctcaaatagaatttttaaagattcttagatgtaaaacttgtttgctaactgcaacggaagaacaccttcttttgctgctgcaattgcctaccctccctcaggtgcacttggctagctccaagaccctggctttggactaggggrcaccggaagagcccttttgccatcacaccacctgttcctctacttgtttcctaatccccgggcgctttcctccaccctcctttcctcgcgcaagtgaaaggcagccagcttgacagtgtggaaggagggatttcgccagctgcggctgcagtgcccaggcttggtggccgcgtcgggttgggcagctgggcaaaatgtctccgagaggggtagagtgtagggggaagtgagtgctggtagacctcgacggccgctctccaccatactgtggcggggtctggaggtttgggaatacagggaccttaagggagccacccgagaggagttgggggtgggggcttcgatagcatttggggaggcggctgcgcaacgggtgctgaaaggacagctcctacctgacccacggcacccaaaaggcacctctgcatggaaagkctccccctgaaacccctagcccacctcgagtgggaccgtctttcaggtgaggtgcacgaaaggcttctccgaagtggcagctcggaaggatgcacgtccggctgcgccaagctggtttccccgcctttttcccacttcggcgtcagcctgggctctgggaactgcagcctgtgcctccagccgcgcgcttcctcctgcttccagaggagcagggcagtgcagccaggcctcgcaaacccctcttctggggcccccagcgggagcaggaaggaaagccgctgagatgcgccgtgagtgtcgcacggcttggagaagtgggttgctgggttgcataaggtggaaggaacttgctagtttgcaaaagacagctcttggcgggagccggaacccggagcccgccgactcgcgcacccctcctcatttactgccttcgacgcgcgccaccccgactgcgcccccaccccctcggcgcgccgccgtctccgcgcactaccccccccacacacccccctcctcactccctccagaggaggtgagtttaaaccccgcccacgtgaccccagctgggccaatgaacggcggcgggaggtgaaatccggttctaacyggtccggggctcccagcgctataaaaactttataaaccccccggagcccgagcagtgtgaagaagaggcgagaacgacccccggaccgaccaaagcccgcgcgcygctgcatcccgcgyccagyacctacgtcccgctgccgtcgccgccgccaccatgcccaagagaaaggtacgtggcgcgagggccccaggcgccgggccaccactgccgccaccgccgccgccgcctccctggtgcagggagcgagaatcggcgccgagcaggagccagcgcagcctccccgcgcgggggctggagacggtgtcgggcagctcggggctaaccctgagcggctcggctgcccgcgggcgccagaggccatattggaggagcggcggccgcggcgggaggagccatgttggcggctgtttatcccgctctcctcgggctcgccgcccccgccccgtgccccctcccccatcgcgagggccccttccctccctctgcgggcgggcaattcaaacccgaaagggcgggaaggcggcgctcggggttggcgggcgggggaaagcgctgccgccaaaaaaccgccgccgtgagggcggggcttgtgcggtatggccccgccccctcgcccacgttccccgcgcacgagacgcgcgctgtcgccgcccacgagttccccgggctgcgcgcgcctccctctcccgccctcgacggctgccatagcaacggcgctgggctccgcctccggagggggtttgtttgcgccatctgcagctgttgctcctgcctgtcgcggtggtgcgggctccgctgccctccccggctgcgctccggtccagccctcgcttctcggggtcggcgagccggagctcctgcgcgcgcttcgttcttatacgaacgtcgggctcactcatttatgtcctagaaaagttgtgtggacgactgctttaattttcatttttagcactctaaagtttgggaagtaattaagaaccacctcaaaatctgcagttttttgttcttgtttcttataggctgaaggggatgctaagggagataaagcaaaggtgaaggacgaagtaagtcattctctcttcaagggtcaaagccttggactagcagaggccactggactcggtgattaaccgtaacctgtgtcctgaatttacactcctataatctagagcaaattgataccaaactttcaaagcgacttacctgtcctatttctaactttctcgttgtctttaatagccacagagaagatccgcgaggttgtctgctgtaagtgtatgcttttgaattttcgtgcttgtccctgaaactaaaaaacatcaaaaaacaattccctttgcttccatgaattatggttagtgcctggttttgaatcattgcctctacttgggactcttgcccctttgggttttgctggttctgaaattctgatgcctgtagccaaagtgggacatttgagtgggcttctggaaatccaacattctagaagaaagccaaccacaaaaacttttgaggaggaggagaaacttctctacccttggtacttttggttggttgtgggtggttttcttcagtccattgtactgatgttcactttttcctctcttcctgccaaaaaaagaaacctgctcctccaaagccagagcccaagcctaaaaaggcccctgcaaaggtaagtgctaacattggaactgatcattttcacagaatgaggactgtccttagtgccttaacttaattagcataatggtgcctccattaatggaggttataaactgtgtggatagcttacctcgtccgtgtcattcataacgttggtttcctgatcaagaattctgttgttagtttataggaaaatctgcatttaaatattaaataccccagggtttaaactaatttattcttctgttacttaggaaattctaagtactaaagattatagcaaattacagataatttagcctagttttgatcagttgttcttgtcaaatgggtgagggtttgtgttttatcttgagtaaacaatcctaccttgtgcagaactttgcagaccataccttggtaatacgaaatggggagaaacagttctattttttcccctttttcagaagggagagaaggtacccaaagggaaaaagggaaaagctgatgctggcaaggaggggaataaccctgcagaaaatggagatgccaaaacagaccaggtataactgctgtttcaccctttgttagatttgttcattcagttagttgctgatatcaaaaatttaattgcccttttcttgtatcactccaaatgtaccatttggtccagtgtgcttgtggctttcctgttwacttaaatcctggattcttgaaatctctactgtcagctgaagggcattgtgttttatactacatgaagttttcaagctaggagtaacctcaggtctcttattctggtgttcttcctacctcaattttacagtgaggcccagaggagaggtgacttagcaaagttacctagtaagtcattctcagaagaaatactgagtctcagtacctgaaacctgaactttggcctgggagcaaagtgatgctgtaggtggaatgtgaacacagatagttttgaaatctacgcattgcattaatttgtctgttttcttttaggcacagaaagctgaaggtgctggagatgccaagtgaagtgtgtgcatttttgataactgtgtacttctggtgactgtacagtttgaaatactattttttatcaagttttataaaaatgcagaattttgttttactttttttttttttttaaaagctatgttgttagcacacagaacacttcattgttgtttttgggggaaggggcatatgtcactaatagaatgtctccaaagctggattgatgtggagaaaacacctttcccttctagttttgagagacttcctcttggctcccaggaggagggattccctgactttgacacacatggccaccttggcacaaaagccttgtggtatagaaaaacaaatttgtttttatgtcctcttctccctttccatctttcagcatagacttaactcccttaagcccagacatctgttgagacctgacccctagtcattggttaccagtgtgtcaggcaatctggactttccagtgatgccactgagatggcacctgtcaaaagagcagtggttccatttctagattgtggatcttcagataaattctgccattttcatttcacttcctgaaagtcagggtcggcttgtgaaaagttgttaaacaacatgctaaatgtgaaatgtcaaccctcactctaaactttccctgttcagagcatcagatgaagacttcattgggttttatagtggctttctgatttttggtagtccattgaagaagggagtttgaaagttgttgtatactgttaacgattgtctgcccatgtcctgcctgaaataccatgattgtttatggaaagtatctttaataaagctggatacagtttggcttggaatgctgcctctgatcttttcccacaagtggggtaacctggtttatccaagtctcttggaacagggtacgttctgctttgaggtactccatgtacagtctaatgatgatctttcactgatttatagtcagcttccaaaacacacagtgctaggtgcagttaggaaggattccaggagtagacttagctgatggtgaaaggctgggagtatggagtgatttctgtacttggttatgcagcattccctgcagtgtttgttttttgcatgactccgaatacatgaagtgtattaaatgcagatttttggtagatctgcggttttggctgggtagctgacaggagcctctctacttccatctgcatttgcaacttctataaaattagcaaattaatagactcatgtcagagagtgtctctgtgaatgtgtacacagttgtccatttgtaaggtagatgacactttgctcctaagtagacctgcaaacaaagacaatggggtctttcctgattcctttagtttggagatgcagagaaccccacgtttctctaagtgaaatggcaagaagttatttgttagaatatggaactggtaacaaattcatgtttgcaccttgaatttgctttcacagacctggctgtattgttggacaggaataaagtaaattggagactaattgctttgtccattcccttagtcaaaaaagtatcgctgttaagttcttgaggttttttgtgtattatctctcaagtgttgagatgtttgtgtaatatatgtatcacactcatggatgaggaatcaggcacagatgaaacttgttgaaggttatgtgtacatttaatgagcagcagagtcaggattcagaccctcaactagacaaaagtcatctctgacagacttttattcaggataaaataccatttgtccatttagccagttaccagccatttactttcattattgctgaagtcattcattctaggttgtagacgggtaatttttattctaaaagcggtgtcctcttccagaggaaacttaagagacatcttagaatggtcaggggtagtgggctggtatttgagcagaggttgcagaatttgagaaagttacagctgaggttctttgttagtggcaagtctgctaagccctgggctatgctaacagctctgcctcatgctctttaatctttgagtcagacctatgagatacaggtgtagccccattttgtagtcgagagtgaggctcagatgtgaagcgactggctgaggttaaacttgatagtctgtttttacttattttctggccctcttcttgttgccatataattaggatgagtagggtaagcttgaactttttcgagtttttttctttttttccttcctggaaaatactgatttgactggctctggaccatgaaagtagctgggcctaaaaccaaaccagacatcaaaacgtggtaag

SEQ ID NO: 94682 - DNA, 12777 bp, Homo sapiens
aaacagttttttctagttatgtgaagaatgtctatggtagtttaataggaatagcattgtgattcaatgactattctaaattcaagttttctttctattcaaagtgcatgactagtcaatatccaaggttttcccctttgggaaaatttcttcttgccatagtatttcaaagccaccccaygcactaaaccaacacatttatgaccaagctatgaattcttcctcttctattagctggtcatcgggagcctccctgtggcataaatgtgagcacctgcagagattaactacagaggtgattgatgtgattgtcctgccccacttgcacatatagctttcttatgccctctggtactgctcaggtgatatccaggatataccactgctatcttacaatggattgttcaactgttgctggtctgcatgacctgtgacttggtggatctgacattaaccagctcattatgggcagctctggccacatggtcatttattataccatggttagactctctgtatttaccaaggtccaagagaatgccagcagttttctgaaaattttgtaattttctgatacacataacacagttccattccagaactctagtgggattcattggaattcctttattgatgctctaatatgatagggtcatattgcatcatattgctcaaagtagctgggtgttttgtaccataacctgctcatgctatacaacatctagactccatttaaagctggtattcatcctgcctattgatccgaatagtattcctagtgtagagtatgctgtcttcagaagccagataggcctactaggcattgtgcagctttattatgctctctgctataaggcatgcacgtgccttggagggcatgtttccacaaaggccactaatgtactagcatttctttctcatctgggattattagcttaatgcaattgacatagagacacaggacaaaactctgcaaaacatccagtagttctaggtctcttaggtctcttcagattataacaaaggaaagaagagttatcatggccctgagtgaaggctataaatgtataccattgaccttttcacgtgactgcaaactgcttttaatctaagtcaaagcaaactgtttttggacaaaggtgatgcaaacatatttaccaggtcaatggctcatatcatgtatattagcctatgttaatctgttctacagattatctatcatctggcagaacagctacagctgagttgagtttattacttgcttgagattaaaggagtctgctgtcatccttgaattcagctggtctttgcacaggccaggctggtgaattaacaggtgataaaatgaggacacttcacttgtattctttagtttagactctttagaaatagcacttatttctgccacctattttaggatgtgatatttttatatttactatcttatattatagaagaacagtttaaaaactttcagttgtcctttcacactaagtcagctctcactccacataggccaaatagcaaatgtaggaaatgtggaagtatcaattatgttagttccaactatacatttagcaaccagggaaatgatcattggattgtggccttagaagctctggacccactgtgaggacctaggccagactctactcatcacctcactcacatttgtctccactcttaccaagaagtcacaatgacagcttgaatgctggctatcaatattagctcaagcccttgtctaatggttttgaaaagattttatgttgtccattttctcagtgtataaccaggcaagtaaattgaccattggtctcttccagaaaggactgaggaaccatcactgtgcacaatggctgtggtattgtcagtccttcctcctggggttctgactgactcttcagttaatgtgttttggatcccaaaactgtctgagttctggagtctttatgatgaaatcgtggctgtcttttgaaatatctacctttttcattcataaaagttcttctttctttcttgattatagagtatgaacagtcataatctcactggctgctcatctatcttgccgttaggaaaacggtcttttatttaaaaaaaaattataactctatgcaacttaggctcctatggctgccactgtgatgttgcttccaataacaataactgaggcagcctgacttctgatgtttgaataccaccagataccagataacttatttgttttgttttttgtttttgttttttttggtcaaatgatggcacttaatctttgctctcagagagccaagttatttcctgatgttaaaaaaagcaattagtgaacttgttagtaaggatgctactttctcattaacatataagtagaccttgtctgtgcttcacaaacactgccttttttataaattgaaggtttatggcaatcttgcatcaggaacatctataggcaccattttttcaacagcctaggctcacttgtgtctctgtgtcacattttggtaattttgcaatatatcaaagtttttattattattacctgttaagatgatctgtggtcagtgatatttgatgctattattgtaattgttttgatatgtcatgaaccgcacctatgtaagacagaaaacttaatcagtaaatatcgaatgtgttctgactgctccatagactagccatagcccagtctgtttccctttccttgggcctccctactccctaagacacaataatattgaaattaggccaattagtgattccacaataacctctaagtgttcaagtgaaaggaagagttgcatttctctcccaataaatcaaaggctacaaatgattaagcttagtgaggaaggcatgttgaaaactgagataggctgtaggcctcttttgccagctagctaagttgtgaatactaaggaaacattcttgaaggaaattaaatgtgctactccagtgaacacattaatgataagaaagaaaaacaacattattactgatatggaaaaaaagtgtagtggtatgaatggaagatcaaatcagctacaacattcacttaagccaaaacttaatccagagcaaggccttaactctcttaaattctgtgaaggcagagaaatgtaaggaagctgcccaaagaaacctttgaggcaaacagagtttggctcataagatagtagggaagaagcaatctccatcacataaaattcaaggttaagcaacaagtcctgatatggaagctgcaacaagttatccagaagatctagctaagataattaataaaggtggccacaaaagtcaacaggtttttaatgtaaatgaattagtcttttattggaagaagatgacatcttgggctttcatagctaagaagtcaatacctatcttcaaagcatcaaagagaggggctaactcttgcttcagggtaatgcagctggtgacttgaagttaaaaccaatgttcatttacctttctgaaaagtctagggtgcttgagaattctgataactctactctgcctctgctctgtaaatggaacaacaaagcctggatgatgtttaatttatttacagcatggtttactgaatattttaagcccattgttgagtcctattgctcctttagattagattctttttaaaagagtacttatttattgacaatgtgactcatcacccaagagctctaatggagacgcacaaggagattaatgttgtctcatgcctgccaacacaatatccattgtgcagcacttgaattgaggagtaatttcaacttttaaatcttattatttaagaaatgattccttcaatgaatatggacaaaggaaactgaaaaccttctggaaggattcacctttgtaggtaccattaataactttggcgattcattcataggaggagatcaaaatatgacattaacatgagtttggaagaagttgattccaatcctcatggatgactttgagcagttcaagtggaggaaatatctgcagatgtggtgaaaataccaagagaattaggactaaaagcagagcctcaatatatggctgaacttttttctatttcatgataaaagttgaacccatgagaagttatttctcatagatgagcaaagaatgtggtttattgagatggaatatactcctggtaaaaatgctgtgaacgttattgaaacaacaacaaagaattaaaaatattattacctcaaattagttgataaagcagatttgagaggattgactttaattttgaaaaattctactgtgggtaaaatgctgtcaaatagtattacatgttacagagaaaactttcatgaatggaagagtaaatcaattttgcaaatatcattattttattttaagaaattgccacaatcgcttcaactttcagcacaatcaccctgatcagtcagcatcaaaaatattaggatatgctgaagactcagattattgttagcatcttttagcaatgaaatttaattaagatatgtacataatttacacataatgtcattgcacacttagactacagtgtagtataaacctaacctttttttttctttttttaaactttagggtcagagaatacatgtgcaggttcgttacatgaatatactggtatagtggtgaagttcatgcttctagtgtacccgtcacccagatagttatcattgtacccaaaagatagtttttcaacactcagtttcccctaacctcccaactataggaatccaagtgtctgctgtttctatctttgtgtccatgtgtacctactcaacataacttttatatgcacttaaaaatcaaaatgctctttgtgactggccttattttgatattcactttattgcaagagtctcaaaccaaactcctgatatcttacacagaatatcattgcaagcaaattgttgctttttaattccttctgccacatctgccacagcaaccttggcacctcagtaagtctattagtttcctactgctactataacaagttacacatattttgggttcttaaaacaacacaaatttatcttacagttctagaggtcagaagtctgaaaagggtctcactgggctacaaccagggtgttggcaaggttgcattcttctgcaggctctagtaaaatacattttcttgcattctccaacttcaagagcaagcttgcatgtcttggctcataactcagcagcaccattgcccaaattcccatgttgccatctgtctggttctttcttctttcactttttttttttttagatgttttaggactttaatgttctttacatattcaacataaaatactgacaatagataaacaataggggaacgacttttcagcaaagtatcactctcgtcgtcaaacattacaaagaaaacagtcaagagaacaaaggataaggtaatttaacagaaatatttaatttaatgtcataattgaaaaacaaccaaccagtcaactttctcttctacctatggaaagaatgataaaaatgaatcaagaacttctggatctttttcataaaacagcttaaaaagaagaaggggaagactggggaggggttgcaactgttgctaatggaataatgcacaaggtcaaggatttaataacttctaaaagtgtctacatgtatcagtgttaaccgtattattagaaatataaatgtatagaaacataaagtatatggtattaaaaaccgaccttgctaatgtaaacatacataaagtatgtatcttctcttgtaataacagtataaagatcgatctacagtttgccctttgcctggtactcttaaaccactcctccaatgggcaatgctgaccttgaatcaacagccactgaacccaggaggctccacagatgtctagattcagcacctagacggccccacctaccctctatgctgtgtgttcccatgactccagaaacaattaattgcaacttacattatgaagtccacagggaagtttgaaatctaactagaaaaagtagcagcaaaggcattttgctggtgcccagaagaatgttggctctgctggggtcaccgtggagattgtccrtgatgacctgctgggatttgccctcctagagtgcccctcagtcctggaatacaaggtgcaggctggaaacagctccttgtacaacatgcctccatgtttcagcatctacgtcaggggcttggtcctggagtcgattaaaaacaatggaggtgttgcggccatggagaagcgtagctccatcaaatctcaaatgatttatgagattattgataattctcaaggattctacatatgtccagtggggccccaaaatagaagcaagatgaatattccattctgcattggcaatgccaaaggagatgatgctttaraaaaaagatttcttgataaagctcttgaactcaatatgttgtccttgaaagggcataagtctgtgggaggcatctgggcctctctgtataatgctgtcacrattgaagatgttcagaagctagccgccttcatgaaaaaattttggagatgcatcagctacaaacacatcctaaccaggatatactctgttcttgaacaacatacaaagtttaaagtaaattggggatggctagaaaaagttaacaaacacagtatttttctcaaatgaamatgtttattgtagattcttcttttttgaaggaacaacagcaaaacatctacagctctgtaaagctggtgggacctaatgttcaccttaattctaacttgaactggaagcattttaagaaatcttcctgttgcttttcttctttcacttttaaggtctcttgtgattacattatgcctaccaaggtaatttaagataacctctcatttagaggtcaacttactaacaatcttaatcttgtctgaaatattaattctccttttcaatatagccaaacatactaaaggtttaggatcttagaatatctttagtggacattattctgcttactacagtctgtatatgctattacattttcatatttctagaagccattctaccagtgtttctgccccatctcccagagtttctgtgtgaatatttaaccatgggactttctttagaggtcaagtgttcttacaactaagcagggccctggtcctcagctttctcttcctacccaatgtagaagatgagatctactttgtacaataataagaagacttggttttacctttacagttagcattagttgccaattaattgctctgttttttgttatttttcccaaagtaattaaactgagcaattctattgtactcaatgttattatttcccctatacttctccaaggactgatggaatacctagctcgcatatccccaccaattatatcatcccagtttatcacaggtgagcatgttaacaattgcactgctacctttgtcgggagctctctctgctccacaccatgcttatggaatcctcatttccagatgggaggtatttaatccagttcaaaatctcacctaagtgttttctttctgacaaaaatgctgtgttaacatttccaagttggcttcccctgcaagcagagtgtaaaatgaagttttgcatatagtcgttatattttggagtgtgcttgaattaattcctctagaatggagaggaagaaaaaatgaatggacaaagagacaaatcaagtgatcttaaaggaaacctcataaaaccatgtgaagagttccacaaatagtatggagaggctaaggccctgggacagatgactctcttcaactgaaacaattcctaaagagtgctgagagtagaggactgaacaataaatcttatttctgaagagtatctctgagtatcacagcatccatgaatttatagtagatctttctcttgctaactctgtctttctcttaaaaactagtcttccccaccccaattgcactttgcatttagaaataaaaatcctaaaaacacaaatcacctcaaagtacgaaaatagaggcatgacaaaatgcctgaacaagaaaaaagaatgaaaacaatagcctggcttgaatatgagaagaaaatgaaataaatacaggtagaataccaaagttaagatatacatatctgccatatatgttacaaatccagattatattaaaggcaggcaattgaaattctcttacgctaaaaacaaagttgcattattttccaagagcatgttcagggaactttacataattaatgcagtcattaattatttcattacaatgtttgactacctattctgtgtctgaccatgaattaagtgccattgattcaaaagtatataaataaaacagaaatatgcatgatgcaacttatttcccatgtggaggcaaacagtaagatataaaataaaaactctaaaaaacaaaatatcattatttcagaatatacgaaatatttttattataataagtagtaaacgaaccaggtgatgtgataaagaataacttgggaagatattttagctaagaattatttaatattagtcaggttatcaataattattgttcaatttttaataaattaaaagttccttgagatccattgtccagtttgatctttatttcttaacattttcttcatttcatttagaattccttggtaaaaccccacaccatagcttcttatcatagttactaaaacagtaataatatagcatatggtttacattaactgttaatattttagaatattctaatctaaattaacagctctatttctcttttcttaggatataaatatttattcattataggtactatgttattgcgatatttctgaagttcattttgattcaattttcaatgttaacggaaattactgacatattattacttaaagaattacaaacaatggtaattactaactaaaggaaatcaagatgaacaatttttaaatatataaaggtattgtgtgctttgtgggtttaaaatggttaaattattttttaaaagtatagtactgtaaaactgtaagtttaaactattatcacttactttgcttgaaactgatggcttagaagatgaagttccttgcatgtacattcatgtgtgtatgtattcagcggctttttattatttacttacacattataatttattattgaaaaacggtatttaccatgtatacctgtattacggttaagtataatttcaatctagaataaaaaatcactttaagttcaagttattcctttaaatctctgggcaagagtcagaatttctttaaatcagagatttttaactgccgaacacaaactacaaatgagaatttccttggcaatttagggtactgtagaagcatgataataaagttattttttaaatgattcatataggtatgtctgtttataatacacatgagaaactccaatttcattatatacttgaacaattccatagaaaaaccttcagaataagatggttagacaataacatagccctgcttagcacattgctgtataatgtttcttttttctttttttttctgagacggggtctttgtcacccaagttggaatgcagtggtgagatttaggctcgctacaacctcacctcccaggctcaggtgatcctcccacctcaaccccacaagtagctctgaaactacaggcacgcaccaccacgctcatctaaatttttgtatttttggtagagatggggtttaggcttgttgcttaggcttgtctcgaaatcctgagctgaggcaatccatccaccttggcctccttaagtgcggggattacaggcctgagccaccttgcccagccttgaataaattttaccacagaaacccttgaatatgatcgattttctttcaaatagaagaggacatacacactcctcaatgtaagcccttttaaataaattttttaaaatccctcacctaatcccctcagaaaaatgttatagtttaacatggtgttctatttcaagaattattttttctaataaaacggatgtacacagggctttgagcagctagacttgatgacatagaaaggtggcagcaaactaataggtacatatgctctcagaggcaattcgtagaaagaaaaaaggtcacatcacatttttcattgcctttgttctaagaaagaatgcaggtttcctggatgtctgcaacccagcattcaattgcaggtgaggcaattgttttaggtaaataaatttccaatggaagtgctcagtgtttcagcgcaaacaggaatcttgcactgtaccctcaaagcattgacatcagctgtgtcaactgattctgattctgaatataaaaatctgattcatcacaagtttgacacatgctgcttcaaaaaactgaaggaggctccaagtctcattcagagctgcagcctggcaacaatttcatttttgtcttctaagttgttttcctttcacccttttgctgagcagaaactagaaaatggttctgagaggagctgcatactgcaacagatgtattacacataaatatacagaaacatacagagagccctggagaatataagctagtgttattcacaaaatctgtcaatttcctaaatctcaaggcgtaaaacagaaataaatactacattgatcttgctaataatcattatgagataaagagttacttcccaagtaatgactaataaaatctgtgaaacaaagagaaaataaagtccacgaggaaactgtgtgatactgaaagaataagcagaaaatttaagttgataattttcttttttccatcctctaacagagccatatgatttatttttaacttacaagttacttaaattcttgatgtaatatgtattgttatcttaaacccattctggttttctgtatagttcatttcccctagctccattcaccccttcagcaccactgtgtcagggttagggatagggcaaatatgttcattacacagtcttgttttacccagtcttttttttttttaagggcctttccagttcctgcatttatgcctttaaaaacttgcatcaataccttgtgatcacgataacagatatgtcgattattcttactttttcataaatacaggtcaatatttttctcaagaatgttagcactttaaggctcaagcaatgttacctagtaagaatgctgactcagttaaaaactgtaaagctctcacatgtagagctaggaagagatttttcatgatgtagaaatttccttttataaaaacctgacatctattctgactataaagtttattctgccctagtgtttggacttctggtaggctgtttttttaaaccctagttgcaattaaagtgattaatctcactttcttaataaataataaaatttggccttcaatgaagatgagtttcagtaatctaagcaataaatcaaccccaaattctttatttcttactgaatacagataagtgtgttttgtgtgtgtgtataatatataatatatataaactataattaggtcctgtataattaccttcaaaaactgtcttaatagaaatgtgactgtatgaaatattaatcaatttaaaattattgaaccctgatactttgtcataacaagtgtgtctattatcatgcaaagcaacatagactatatttaaattaaccatgaatgaaaattttttataagtccatcaaccttctgtttctttgtgtacgtgtggaaagagtattgctatggcacttaaatgcacaattatatatttaatttaataggctacttcattttaataaaattctaatttttatgaaattctaatattgctaacatttaacatcaagaaaagcattgctagggtaagcaaatagtactttaaaaatgataatttacccatatcaatccaaactgaataggaataggaaaatagtcctcctgagtctaccttattttttatataggaagtcaaaacaatatgttattgatgaaatgcctgaaagtctctatgcaatgcaagaagaatattaatataacagagttccagcataaaaatatagagctatgtattaatcagagtgaattatagctttgacttgcattgcgctctaaataaatgcaggtgagaaagaaggggttaaaattaataatttatactaaaaccagtaaaacaatagtaataaacttagtaagtacctaattcagcacaccatttacattttacatgtattagaggcaatttttgaaaaactgtgttgaatacacttgaatatcttacacagtcatgtattgtgaactgtgttgaatacacttgactatcttacgcagtcatatattttgctcatgactgcatttttaaaatccatattttatatttctctgtattccacatattttggtcttatttcttcctattctgttcacaagggattatagtccatgccatgatttatagatggattgtgtattttgtgatgcaaaactcttatataactggattttggcaccctactcccataaaaaataaataaataaaaggatgtgataagatctgtcaatgcattaggaaaaaatgttgtccactcagcattttggggatagaaagaagggaggacaacttaagggcagagaatatttattaatacttgggaattagtagctgaggattaaaatatgattatttgctatttggctttcagtgttctgaatgattccttgatgttacaataatgtagttactacagaactaacctgtgattaagggggcgtcttctcttttctttcctctatgttaattataaggagggattccacaaatgaaaggcatagcatctatgtgaatttaatga

SEQ ID NO: 94683 - DNA, 13502 bp, Homo sapiens
tgtaaaattctaaatacaatgttagcaaaaacaaacacaggagtacattaaaaaaaacactgtaccatgactaaataaggttctttccagaaatacaaagttaattcaataacgaaaaatctattaatataattcagtcaattagttcaatggaaaaaaaatttacattcacattatatgtgaaaaaagcatataatatatataatatcaaaaccaataagcagtcctcaaagacagaaagtagaatggtagttgccagggcttgagagcagggaagatgtagagttatcatttaatgcaggggtcctcaacccttcctacccaccctgcgcccccaccatggtggcgggcaagcccacctgagctccgcctcgagcccacctgagctccgcctcctgccagtgtcagcattagattctcataacagcgtgaaccctactgtgaactgcgcacgcgagggatctaggttgtggctcactgtgagaatctaactaatgcctgatgatgtgcggtagaacagttttatcccaaaaccatgcaccacccacccccacccgtccacagaaaaattgccttccacaagaccggtccctggtgccaaaaaggttgaggactgctggtttaatgggtacacagtttcagtttgggaagatgaaaaagttaacggagatagttgatggtgataattacaaaacaatttgaatgtatttaataccaccaaactgcatacttaaaaagattaaaatggtaaattttatgtttagcatattttacacaataaaaaaaaaactttaaaaaattttcaagcgtcttgcctattatccagtcttccttttgctaaatgaatttgaatcaatttatactactgtatgtttttaaaaagcaaaaaagtaaaataatccatgtaaaatgtattttcctctagtgagtactaagctcatgtaaaaaccaagttcaagatttcctgcttctcttttaaaaccgagaaatattaatataaaaaaatgaatcttctcagaaagaaacctgaggctaaatcactctacttacaaattatttcactaatgtctagtgtgtttaagtgtcaaaacaaatacatttctgaatttccaaactttttattaagtctttctccagagggccaattcactagtgagcctccctgatgtctaactggcatattaggtaatagacagtataatagatgattaaatagcaccgaaaatatcattacccattctcctgtgtaaaccagtttttaagttttaattcactaatgctttcctgcctttcaactctaaacatgaacagttgtaaaacgttcattacatttcacaacctctgaaaggaaaatatatttattacattatagaattcgatgacttgtcccaagacttctagtgagtcagctttaagtatgggaaaattcaagtggtgccaccacccaaactggggctcacatctttgtggacctaactgataaagaagaaatacatttcatgcaagtcaagacttacttaagaaataactacaactgcaccatttataaacatatataagatttttttaacattatcgcagaaagtctgagaaacaagatttttaaaaataattctgtcacatataaatatacaaaaatagtgagagatcaccttaactttttcaaattaaaaaaatcctatggtcagctgattttaaatctctttgtccatctgtactattttctttcattttgatatcaacctgtttccctaaactaaaaaataaaaataaaaactagaaacaaaacaaaaaaagactattaattcaatttaaccggaattgacttgagaaattaaggctttaattgcttttgctgtacttttcaaagtaaaaatatatctggtgggaaatattcatcaacgtgtttagtgaaaggcaatgtcaaaactaacatcacctaaaatcaaaatttcaccttgccagattaaatagctacttactcatttaaaaagaccaatacatgaatgcatagtgaaaaagtatccaggtaacttaatttgcagttttgtgtagttctgcagatctgtatgtataaaataacaactttgcatgtgttttgagatgtacacattcttgtaaaatttctagaaggatgtacaaaagagttaagtgactacttttaaggtacagatcagagaagggagttgtttatttttcactttatgctccgctccttcgataaaatggttggagttttatacaccgccaacacaatgttttttcaaaagacttctaaatttcactttgtagtttaaatcatacactctgtaaaaacttaattgtttttcatatttatttaatctcccagattacctactttgttgatctcgtggtttgggggctgaatacactcttctccaactcctccagaatcttttattcttattctaaaattaaaataatgttatctttaatgttttcaatttattgtctcatgtcataaaaatggttgttagttcactgtctttgatatttatcttcacgatgcttcatcgtgttttcagaaaagccacaaacaccaacacagttgctggagctgcagtagaggtatcgcttgttccttgaaaatcctaactctgaccaaacagactgtcacaaaggacctcttttcacaacgtcaagtagcttatgagctctcgacaatattacccaacaatggtgatggcagaaaaaacattcacggtcattttagagtgcttaaaattaactgcaagacaaaagcatccatgggagtaaaataccttgccagctctaaattataactgatttagtatagtttgctcatctctctgttctgccatttcaatgctgtgggacctgggtcagtattaccaaatacctctcaaaagtgaggcttcacatctgtaaaatgggtaactgcacctacctcacttaagtcctgcgagcacctcccacaaaggggctcaaaatggcagtactcttcccttccccttctcaaagctccactctcccaggcctccctcctaacgcgcctccacctcggcacccgcccgtccccaaccccgcgggactgaccgactcggcggcgtccgctcagctcaccctcgccaccacagagggcctcctccctcacaggaacgcagctccacagtggagggacgggaaagtggctccccaaactccagtatgggacaagagggaatgagtgcaggtcccaagccactccctccatcgtcgcgcccccaggactccccgcccaacacactaggcacaccagactgtgctacaggaaaagaaaaaggactcagaaccaccttctccgcatccgtaaaggtccttagactcaccgcggggaggaagcggaccaggcaactccacagcacggaaacacagcgccacgagctccaggcggatgctgagagccgccccgagtccccgccctcctctgccccgaagggcttcaggtgcccagaccgggcggggcctcgcggagcctcgcagcgcaggcgcagtctgcaggcaacattcaactgcaaggcatcggccaatgggaactattgctgggctcgttcgaaagtaaacggtggacggcgcggcccgaggcaggtggcgggagtcagtttaaggctggcgcccagctttccgcgcctgcgtgctaggcgcaggccgcctctcggaagcttggcctcgcaggagcggctctctatcctgtggggagcttcggccagtgggcctcgtgagctggggtcccgcctggggaatccgcatggcaccggtggtctgggggagaggctgggcctggcgcgggacgaggcgaagcgccggtggccgacggcttctgaggaattatcttttacttggcgccacacggggcggggcctcctgctatgctgtggagcgcagtgtcttccatcgttgcctcacagacccgctgctccgggaagtcgccacacattctcagggaacacccacatctgtcgcctgcgccctccgccgctcagctgtttgcttttgtttacgcattccggagacctgacccaccggagcactgggctgagcacaggagaaggggctttggagcgctctttgtactcaactccaagagcgagtgggaaactcaggactgggttgggtagatccctgcgtctctccctagccttcgtcctcttcccccgtttttccactttatgaaagtattgcctagagatgagggctgtccaactcaacacttccaacttcaagttcctacttcacctctaactccctagagttagaaaacaacgtacagcttagaggttcctttccctttttttcttgagaaactttattcagctttatctcaagacatcaccgcttccctctcctgtcaaccttaaatagtgaggttctggaaatatgattaaggatagagtttattccagcgtaaggcttgagggtagccacccaggagacaccagctccaaatggggttagcattccaaagtgaagaagttagggtttcgcctaggtggccagagacaaattttaacaggatttcatttcccctaagagaccagtgcatacttacagctatttggtaggttacagattactacattccaagaaaaagtattttgttactccatgagggggggtagtgatctcagggggttgtatctctggtatggtttggtcctcctattttaattatttatagaaacaaaaggcagacgttgcagatgcctgctgcttgactcaggctgtagccacattcctcccaaggctcggaataaagttccaacagctttaagtttgaattatttaacttccaataactataaagtcattttgtttactaatgtgctaaataaagatatgggctctaggccaggtgcagtggcccaggcctgtaatcccagcactttctggaggccaaggcaggtggatcacctgaggtcaggagttcgagaccagcctggccaacatggtgaaaccccgtctctactaaaaatacaaaaattagccgggcatggtggcaggcacctgtcattccagctagttgggaggctggggcaggagaatcgcttgaacccgggaggcggaggttgcagtgagccaaaatggcaccactgcattccagaaaaaaaaaaaagctatgagctctatatactgcacattgcagtacatccaggtcctaggcttttattcagtaaattacagaaaatattaaagatataaagcagaaagtaaggcaatattaggccttagtcaatctcagatagcttcaccaattcagctccttaaaaggttgcttatgaagtgtgaattgtagtggtagctactgtttcatggtggtaaatattcgttttgactttatgtacattttctattaaacattggagtcatcctgatagacatctttgtaacttcctgtcaaaacaacatgtgggacaggcgtggtggctcatgtgtgtaattccagcactttgggaggccaaagtggaagaactgcttgagcccgggaatttgagagcagtctgggccacaaagtgagaacccagctctacaaaaaataaaataattagccggagtggtggctcacacctgtagtcccagctacttggaagactgaggcaggaagattgcttgagcccaggaaatcagggccacagtgagttatgatcacaccactgcactccagcctgggcagctgagtgagaccctgtctcaaaaacaaacaaaaaaacccaacgtattatgaattatttttccatagcagtaaatgtactatatttctattaaattattgtctttaaacaaagtttaattgcttctggaattgaattaatatggctgaaaatgtttctgagctttaatgtttttcacctgttttcccctctgtgctttcttacctcaaaacggttatgtatgtagcaagaaaactgaagaacctcacactagacttactggctgttgtttcccaaaaagcctgagcccatggagaaaaataatatttgagagaccccgcctgctggggcgcaggcggcagcggcgtggccatgaagctgaaggtgaagaacgtgtttctcgcctacttcctggtgtcratcgccggcctcctctacgcgctggccagccatgtgactgccttcctcccctgcgggcagcagctgagcagctacggcagaaggatctgaggatttcccagctgcaagcggaactccgacggccaccccctgcccctgcccagccccctgaacccgaggccctgcctactatctatgttgttacccccacctatgccaggctggtacagaaggcagagttggtacggctgtcccagacactgagcctggtgccccggctgcattgactgctggtggaggatgctgagggtcccaccccgctggtctcagggctgctggctgcctctggcctcctcttcacacacctggtggtcctcacgcccaaagcccagcggcttcgggagggcaagcctggctgggttcatccccatggtgtcgagcagcggaacaaggccctggactggctccggggcagagggagtgctgtgggtgggaagaaggacccatcaccaccagggacccaaggagtcgtgtactttgctgacagtggcaacacctacagctgggagctgtytgaggagatgcgctggacccgtggtgtctcagtgtggcctgtggggctggtgggtggcctgcgagtcaagggccctcaggtacaggacagccgggtagtgggcttccacacagcatgggagcccaacgggcccttccctgtggatatggccggatttgctgtggccctgcccttgctgttagctaagcccaatgcccagtttgattccactgctccccggagccacctggagagcagtcttctaagccaccttgtggatcccaaggacctggagccacgggctgccaactgcactcgggtactggtgtgacatacacggacagcgaagcccaagatgaagcagaaggagcagctgcagcggcagggccagggctcagacccagcaattgaggtgtgatggcggccccaccccaactaccacctcttttcaggcacagaccttgtgggactgggccccaggcctgcccagcatgtggttttccaagtcctgaccgcttgaagccagaagtggcccctctgcccctccagacccagggcatggtcctgctgcttcatctctcccccagcctgccatgtggcactgcccacaggctggggacaagcagcccttgtattgagccaggttgsccctgtctagggtggaacagaaggacagayggacccaggagggagggcagctkakyaactgggtaacttattggggctgggcaarcactggggggctggaggagctgggctggaccctccctacctgagcatgctgacccccttcctacctccagaataaagaatctcaacctgaaaaaaaagaaaaaatatttgaaggaagaggccgaatgcttgagagaagcagaaagaattgtttgcccctaaaatagagatgattcgggtcctagtgggggaaaactatgacaccaaaagggaagggttatattggtgcctccagggagtctgctttagaggcccatgggttcccaaccctgccaaagattcaagatttctgtagtccagcaataatttgggggttgaggaggctgggatggtgtggagaaccacaggagcctacaaaaacaatggtggcctcagtggtggcaggcaacttgacatatttggttttgtggactgtgattaacatactctataaaagataatgtttttctgggaaggtgggacaggagaactaatactcaaatgcaggagtacatgcttcaaatccataagcctaaaactcaggtgataagttgctcagccacccaaaaaaatggtggggaagaggacagttgagctgcttgggcggagggtggggggtgtctctctcttttttttttttttggaagatggagtcttgctctgttgcccaggctggagtgcagtggcgcgatctcggctcactacaacttctgcctcccaggtttaagcgattctcctgcctcagcctcccaagtagctgggattacaggcatgtaccactgtgtcccactaatttttgtatttttagtagagatggggtttcaccatgttgaccagactggtcttgaactcctgacctcaagtgatccacccaccttggcctcccaaagtgctgggattacaggcttgagccaccgcacccagccttacttccagtaatcttttgatagaatattggaaagagataaaagatgataaacatttgcagttattaccaggtgtggaagaggaggcaatataacattaattttatgacaaccaggccgagcgcggtggctcatgcctgtaatccctgcactttgggaaacggaggcaggcggatcagttgagttcaggagttttgagaccagccatgggcaacatggcgataccgcatctctgcaaagaatttttttttttaattatgacatccttttggtgctcaggtcagactttttgcttctaggcatcttctgtctcagttgctaaaacaggaggcatcagtaacagagaagtgccctataggcaagctaaaactctttgattaggggtattaatagctacagagtttaaatactccactcttgtctcccatcacattagcctcagcagaattctaataaagagaacatgtgattttccaaagttagaaagctcctgtgtttcatttctaggacttcacagaaaatgcacagctctcatctggagcctggagtgcaaagaaaacagcagcagctggcaccgtaattatagtgggagtgaatctgtgacaatgagctaggagaatctacctgacagttcacagaaggtcattttatctggaaaaaagcacacagctatatgatgcagtggagtttatagactcagaaacctgaagtttgggggtattttggaggcaatgtagaacctcatttttagaggagagaaacctatcaaccatgttggtgttgctttcaactgagtttgagctcgtttgcatattactacctaaaaatatataaactacacaattttaaaaactggaacataaacagaatttgttttcacacagcccttttcagctgtatctctgaatgcaccttggaagactccaaagatgtgtctgtcctgtagcagtttaccttgtaactagttttccttttctttattatcatagagtcttttttatttcaaatgccactgacttttttgccaccaacttttttaagtactcagttttatgggtggctgtaaccttaagtaaatttggggatctctttatgtaggcacttaatatccaattttctagactattttgtaatggttatgcatgcatctattttttaaaaatgatccaaacattttgaatttcaagaattttttctgataaatgatttgtagaatttttattttgatacagccttgtgtgattctctagtccatttcatcaaaccagtatctgttagttgccttctaaaatacacagcattacagaggcaaagaatacagtcctgtactcaagttgcttatctaagtgagctaacatacagatctagttaaatgacaatatcagataaactgcagattaaagtgtacctccaactgggacaagcagcccaggccgtatgccactgagtttccgagatttctggtgactgatgaccagaagtcggagctgtacctggatgatcttcacctgttctgagatccatagagggatttccagaatagatacaaatcacactggctgcccacctcacaattaggcccctattcatcatgtctgtgctatatcaccttttcaggtgataatctctgtctcctgtaattcagaatggttggatttgaggcagcaagacaagtctgggattgggtaatgtcttcctaatgctggttggcattatagctgaaaagtcaagaaacatatatcttttaagttttctagacttgaaagaataaaacacccctgtaatttaaatcctctactgagacactgccctgttgtcttttaaaggagaaacactaggacttttctagttacaaaaaccctcttacagtatatacatgtcactctgtatgttcagaatggcaaatcccaaatatgtgtgtgtgctaaggacttgaaatagttcatgtggatgattacttatactgttaacccttgaacaagacaggtttgaactgcaagggcccatttatgggtggatttttaaaaataaatatattagaaaatatcatggagatttggacaatttgaaaaaactcacagatgaaccgtgtagcctagaaatatcaaaaaaaaggtatgtcatgaatgcataaaatataggtagatgctagtttatcatttactaccataaaatatacacaaaccttttataaaaagttaaaatttaccaaaacttacacacacagactgtacatagcaccattcaaagttgagagaagtataaacaaacataaagatgcaatgttaaatcataactgcataaaatgaactacagcacataccgtcctactgtagtaatttcatagccccttctgttgctgttgcagttgcagtgagctcatgttgtatctgcttaaaacactgtgtgaccttaatcttctccccatgagcagttcatctccctagtaaatcgcttattgtggtaaaaagtgatctctcaccgttctcatgtatttttcattgtgtttagtgcaatactgtgaaccttgaataacaccatgggacccatagagtgtcactaatgatgctggaagtgctcccgagaagcagagaaaagtcatgatgttacaagaaaaagttgaattgcttgatacgtaccatagagtaaagtctgcagctgagattgcccaccatttcaagttaaataaatccagcataaagaccactatagaaaaaaaaaggaggccggacgtggtggctcacacctgtaatcccagcactttgggaacaccaaggcaggcagatcacgaggttaagagatcgagaccatcctggccaacatggtgaaaccccgtctctactaaaaatacaaaaattagctgggcatggtggtgggcacctgtagtccaagctactcaggaggctgaggcaggagaattgcttaaactcgggaggcagaggttgcaagtgagccgagatcatgccactgcactccagcctggcgacagagtgagacttcatctcaaaaaaaaaaaaaaaaaaaaaaaggaaattcatgaaggtgtcactatagctatgctagaaggcacaaaaaccttgcactttttgcaaaatactttatctcatattgagaatgcagcttttatataggtataggattgctataagaaaggcatacctatagactctaatatgattcaagaagaagcaaagtcacaatatgacaacttaaagcaaaaggaaggttaaaggatctaaagctggaaaatgtaacaccagcagtggaaggtttgatgattttagaaagagatttggcttttaaaatgtcaggataacaggagaagcagcttctgctgaccaagaggcagcagatgagttcccagatgccattaagaaaatcattaaagccaggcaccgtaggtctctcctgtgatcccagcacttttggaagtttaggcaggagaataacttgagtccaggaatttgagaccaacctgggcaacatgatgagactccgtctcaaaaatacgaaaaaaaaagtcattgaagggaaatgattctgcctgattgggtttttaatacagatgaaagtgtcctattatggaaaaaaaaaaagccgcaaaggacatgtattagtaaggtagagaagtgagcaccaggatttaaggcaagaaagtataggctaactctagtgttttatgcaaatgctatcaggactgccattatctagaaagccgctaatccccgagccttgaagagaaaagataaacaccagctgccagtcttggtgtacaaaaggcctggacaaggagaaccctttttctggtttggctccattgatgctttgtccctaaagtcaagaagtatcttgccagtaatggactgccttttaaagttcttttgatattggacattgcccctggccacccggaaccccacaagctcaacactgaaggtgtgaaagtggtctactagcccccaaacacaacatctctaaatcagcctctaggttagagggtcataaggaccattaaggctcattacatacacatggtaccctaaggaaaggaagagaacctcatagagaaaacacatgaaagtctggattacaccactaaagatggcatcattgttatagaaaaagctgtgaaagttatcaagccccaaacaatacattcctgcagttttcttcagcaggaatgtattgtttggggcttgctaacttatatgtaacttgttctgtcataaatccagttattatttattttgacagaaccaatcgaggaaatcataaaagagattgtgaatatggcaaaaaaaggtggagggtgaagggttttaagataccttggagaaattcaagaactaatagacacgacactagaggaattaacagaagacagcttgaagatgagcacctctgaacagtgccaaatgatgaagaaaaagacataaaagaagcagtgccagaaaacaaactgacattagacaacctggcagaaaagtttcaatgattcaagattgcttttgacttctcttacagcaaggactgttctatgataagggcactgaaactaatgcaaaaagtagaagaagaattggtactgtacagaaacaattttagagaaatagaaaagtaataaaagccagacagaaattgtgacatatttccaaaaagttacaccaagtgtgcctgcctttcctgactcctcttccacttcctccatctctgtcagcccaagacagcaagacctacccccgttctcttccttctcctcctcagcctgcttagcttgaagatgacaaggatgaagacttgtatgatgatccactttcacttaatgaataataaatatattttctcaagtttttaaaaatgttttctctagcttacgctattgtaagaatgtagtatataatacatgtaacgtacaaaatatgtgttaatacaggtgtccccaatttgaggaaccgggccacagaccaggaggtgagcagaggctgagctagcaaagctttatctgtatttccagccgctccttactgcttacgttaccacctgagctccacctcctgtcagatcagtggcggcattagattctcataggagtgcaaaccttattgttatgggatctttggggtgtcgattttctgtccagaaacctgtgtggccacagtgcctttgcttgagttcttgtcctacatccaggaagaatgagatacacagacaagtgaagggtgaagaagaagaagatgagcttta

SEQ ID NO: 94684 - DNA, 129823 bp, Homo sapiens
attttcttataaaataagaaggctggaagtaggcagttcagagctggtacagcagctccacggtgtatttaacatgtcagactcctattcattcattcagccatctttagtaggtggctttggagttcacgcttggagttcacttctaagattcataatggctccttggcctctgggcttatacccacattctaagccaaaaggaaaaaggaggagagggacagaaagcttgcaaagcaaaatcttcctactaatcccaggtggactcctgtttgcttcttgtggccatctctagctgcacaggagtctaccgctctaaactgaattggggcttcattgtactctagcttctctgcatccctgccttcctcctaacagcattctttgggtttccgtttgggaaattgcccctctccactatgagagtcttagtaggagagtaaattcagatgctttcctttcaacttctgcagttgaaggagtttgccaacacctttcccaggacaaataggagagtgtatactaatgttggccaatctgagggcctctcccaagactttggctagtgtgcaagtgaaacaagggcatagaaagtgtctagagtttaatcatctatctctgcagcagcttcctgaccagaccatttctactaagagattattcccagggttttcactttctagcttttcagagctactttctccctatccgtttctaagcctggatctccaaactttctgtaagttctgaaggcccaatcctgccaataaactcccatctactgggtcacagagactgtttcaattgcttctaacaaaaaagtcctgactaatactccaaacccaccactggtcaggcgtgatctcgagaaaatcctctaacctctctgggtactctctactgatcacaaaaggatgggttattcctaaagtcttttccattatgactttgaccacctccagaaggccctctttgtaccaagtaggcccaaatggacatcaaagcctggattagggttttagcaataggggtaaaatataaaagctccattaggaacggcagctgacagcactgggatgctgctactggagcactccttgggcaattaacccaggtaagcaccaaccaaaacccactccactgcttttggcaccagagtgcaatgttttcattagcaaacaggcactatttagtgtcttcttgccataattataaaggtccacttataattctgtgctttcaactgttcttgattataagacttcttaattgtgccaccataaaacatgttttcagggggaatctgttttccactttaaattctctcctgcagcaatgtatttgccttacaaaacttcagaataaagggtagaggcttctgtaaattcatagtctgtaccttcaaggaaaaattactttgttagaatagcaaagtggccccagtttggccttattttctagcaaaaactcattgcttagctgcatttaataatccatggaacatttctattaacttcagtgtgtgaattgtgtgactgcagaatgggtaaaaaaaaaagtgagaatcaggaatacaaaatatgcagaaaatgaaaataagtgagatgttaaatatttgatcaaggcctttattttcaggtaaccagttgccatcttggggtctcaaatgccaacagaagccacagaatactattctgaattattaaagtgactaggagaaccttgtttctttttactacttttaaatgagtatgtagcctctcaagctaacctttgcttaaacatttaacatagacattgggtgaaatataaaaaagcaaaagttctcagtctaatactcaacctgtaattataaatcagattacataatacagctcagccatttcattttatttttctgtgttctaacaatttttttcagtttgagaggaacctaaccaagattagttgaaagtctgcattctagaatatttttatctgtatgtgtactgaatatatttttcatttgctcaattcaatgcattcattcattcaacagatatttattgaatatcaggtgctaggcactgttgtgggtgtgaggacatatcagggaacaaaatgtataaagattcagccactcttgggccctacacttctgcgagggagacagataatgagcaaaatatcctccaatgataggtagtaagtactacaaaaggggttgtatgggagtatttttgtttgttaagtggagctgtctactagaaagctaatgaattgggaaagttatcctaagagtgggcggtgtgttatttaggtcaatgaggacagcagcaccatggttctaggtgcaaataggcccagtgtgtccaaggaacagcaacagagtcaaggaaaccagagatgagaatggctgacagctggagcacttgtcagggcagatccttgagggccttgcacaccagggggaggacttgagattttaccctaattgtggtggaagccactggaaacttttgagcagaggagtgttataaactgattcacgttttaaaaggataattttagctcaatagtaagtatagccatgaagccaaattgacaaagtgaaggttttctagtgaggacctgctttgatgcttgtataagaaagatctggcatgagcactatctgttcactgtttgtaagaaaacacctggccgggcacggtggctcatgcctgtaatcccagcactttaggaggccaaggcgggtggatcacctgaggtcaggaccagcctggccaacatggtgaaaccttgtctcttctaaaaatacaaacattagctgggcgtggtggcgagcgcttgtaatcccagctacttgggaagctgaggcaggaaaatcacttgaacctgggaggcggaggttgcacgccactgccctccagcctgggctacaaaagtgaaatttcatctcaaagaaaagaaaagaaaatgcccatctgctgaagtagttgcagtgactgaaaagtttgccctctttggtcatttgaaaagtccaccagtctcccttttacattttacttttacccactcaaagcttgcttttcctcagcgacaggtcagaagtcaaggttagaataggttcatccaaatacagaggctgccccagtctacggcctcatcacaatccatccacaagcaagctttccagaatggcctcaggtccatcccaggactgtgactctcagccatctgcacattgcttactgcccaaagagttcctcctgaaacttcatcagcacactgttaagtgatagaaggaaactgcagaatagtgttatactgtagccagatctcattttagtaatgacatttttatgcctagaaataatgttttaaatgttcaaaaatatgagctaagtggtcagttccagcttttttccctgtagagacctgtctcctgcagccttgggtgggatgattccaaggcatgctcttcacacagttttctagggttttcccctaggattaagccctaaacatctattatagtagctggcttaatcttttattgagctccccttttcttccctgtattgcttcttcattactctgctggtgttccatgtacctctcaaataactacttgcattaattcttacctcaggatctggttctgaggcactcaagctgagacatcctctatgtaaaatcttcctccttcctgaggtggcattaggtggccaccttccttgagccataatggcagataggatccaggagaaatgaaacttaccaataaaggagagatctgaaaatattattcccattatacccataatccagtagtctttttgtgagcttaagcaaatacaagacttgcatttaggtattcctccttctaaaaaattaggaggtagttgcctctccaaaatggatttctcagccattgcgtcttcaccgcttaggttaggtaaagcttggctattatatgaggttcttaccttccagcacaaggggacgctacttttttaaaaaaatatttttatttccataggttattagggaactggtggtatttggttacatgagtaagttccttagaggagatttgtaagattttggtatacccatcacccgagcagtatacactgaacccaatttgtagtcttttatctctcactcccttcccattcttcccctctgagtccccaaagtccactgtgtcattcttatgtctttgcatcctcatagcatagctcccacttatgagaatataccatgtttggttttccattcccgagttacttcacttagaataacactctccaatctcatccagttgctgtgaatgccattaattcattccttttttcttgcctaggaaaccaggcttcctcctagaccaagctttagtcttcactacctcaggcagagaaagcttcccttgcatgaggaagtaattgcccagcctcttctctgctctctgtgtgcagcttctccctccctggcctagggccctgacccagaatgactcttcagcccacgattttaatcgaaggcctctaatcaacctgtggtactacatgctacacaagattctcagaaatccctaagctttctcatgagcctcccaccctgctgggaaataagctgacttatcaattaaagaatatccaaagatgttaagccacttaatcctccccaaaactcagtgcggtaggggttgttacctcccattatacgaaaggaaagtgaggcttgggaagtaaagagacttgtccaagatcaccttctggagccacattttacaccacaggtaagagaaaagggatccgagagggcacggacactgtgtcttcagactgagtggggaagtaccatttacctgggtacttattgggtgcaagttgcatgcccccggtgctaatacacaagggacaaatttatgggcctcctaaaactgtggacagtgcacccgtccagccaacttcatgggtgcaccgtgaggctctggtgatgtggacaggcttataaaacactctccatactaagatgaggttgtgttcctgtgtctaggaaacgctggaaattaagtgtacagcaatcaaaaaaccttgacatcatccttgatgtctctctttttcgcacactccaattcactccattaggaaactgtattggcagaatctagtgaatcttgtccttcaaggcctctctctgcaaggctcccatgagccctgggggcttatggagagttctgggtgggcagaggaagccagactgcgttagggaagcaaatttgggacctaaatttcctaagaaggttttaggggatagggaccccaatctctaagaccccaggattctgttaagatttattttctcattccaaataaatgttcactggcaagccctaattctgtcttctctttcttaagcagccctcccttccttctccccacacaactgtgtatgcttcaggccccagaaatccttccctgctttgaggtctggcgtttaccagggcagggcttgagaatagaggtgtaaatttgtcagaaggaaacaggggccgcgcagtaagagagtagatcctcatataacatggcagaaagtcaatggataaatcaagaaatcgctatgtaagtttctttttttatttttttattttatttatttattttttttttgcgacaagcgggtgaccactagaagaaattaacggaggaattgttaaaaagagctgtgatgggagggagaagtggcctgttgctttcattataagcaaatctagataattttattttctaataagtaagtgggcgttactttcatgtatttttttaaaagaaaattaaataaaaatacaaaacaaacagaatacaaaacaggagaataaaaaagcaaacacgcacgcaacacaaaagagccttggcggttgggagccagcgggcgggggcgggggcaggggagagggcggggcttagggaccctgggcggggccagggccgggtctccttagggcccgccccagcgaaggggcggggcgcagatctgtttccctcagactccatctgcccggggccgctaagggagcgcaaggtcaagttcgccttggccctgcctccagctcaggtactagggggtctagacctgaggctgcccgggccggaggcagccttgagtcccgagaccaaacgtcgtttccctctcggacctcgggcgccgggccgcgcgctgaccgacagcccctgctaggcccagcaggtcccctagtcccccgcagtcccccgagactcgccgagcgccgttgctgagccctgcaaatagcaggtaagcgcagcgtgggcccctcgtcagcccactaggacctggatcgcggctgaatgcccgggcccacgtgactcctggcccctamctgagtcctggragtccccgctggggcgacaggtggcggcggagtgcggagccatccggggtggcgcgaaccggggggacagctccgcgctgcctctgcgcgccggcggttctcgctgcagcgtgtcaacctaacccccagctcccctttggctatgaccagagtcccggagacgtgggttcggatcccacctttagcactcgtgcactcaaaggttaaaaatataagcacagtgtctaacaaatacttaacgtgttccactcagtgtccgctgctgggctaagtgctggggttacagtggcaggccaaaaaatgtggtgccctcccccgtgcagctcacagtccagtggggggagaccgacagcaaatggatatctatgcaaacaagtgtgaacgttaaaactgtggtcagagctatgaagattgaaattctagggtgctggagagattttatcagggcccccagctacaaaggctgctggaactaaaactttagagaattcccgggcggggaacaacagagcaaactcattttgttgggagagaatgtggcttgaggaaaggagggttggtggggctggcctgcagagagctggggggaaagcaagttccttaaccttaacgttctcctctgtaaaatgggattgttctacccattgagaatggaaatggtgaatgtaaatgacttagcactgcgtgatgggtgctggatgttactctgcactaaacatccaaggcttgatgttgttctggactaaacacagtgtgcctgcctctcagcaaagtcacttcccctctccttgagtcctgtttcttcctctatcaaataagtggttctgagtagaatctctcaaacagcctgttctctaaaatgatgactggtttagttgttcattcttgaaacatttaactggcgcccactttaccctggctctgaggattcagagagaaatcagacaggggccctgccctcctggagcccatgtcsggtgggccaggtgaaataaagtgacagttccaccctggcacaacccagagaaagggttcttacccactggccttgcaggggaaagcttctctgtttttctcagaaagccacccaggagcccctgaaggtatggttcacacagctccactgagcatcagttacttcttgaatttcattggtggttctcagcttwtggtgtcacctcytaaaactggacagaagacttcccagaagcagcaactatgctgggaccttgctaaggacgtgtcagaccttgagaccccatggatttgggagagcattttaggtttcaggaaacatctgtcagctgctcactgtattttattggctcaaatgatcccaatttcttatttggctctgttcacaacattgttgtagacaaagaaagtgctccatgaaaaccaactgagaggcccagagagtaggggaacccagatgaggcaggagtctggcaccatttgtggggagtggtaaaaaagaacaggtatgatgttaacagagggtgttggagggaagaggagagagagcagccattgtgcagcctctcttttcccctctcagaccactgcaggatgccagcccatgagaagggaagctccaggcttggtggtcacagacctggcacttctcagctctgtgactgaccctgggcagctcactcaccttgtgagtcgtgaggattgctcaggcttaacaggtgcttagcatatcgttggccctgaagaaatattaactcccaccctctccttctcctgaatgaactaaaatatacatagttgtagtgtctacctcagaaggttattatggggatttaatgaggacctaaaatacatagagcagtacctgacatgtgggaggatactactactataactattgatrtcgttccttagtctggacaaaaattgatgaaacaagacagggcagaggcgggagagggataggagtggaggcagtatgaggaattgtgcagggtgattagtcagggggttagattatctgttgcagtggttttgccataaagcaagagcctggcagcagagaggggtgttctgcatgataaagggcctcctgggcagctgcactgtcagaaagccccagaaagccccagtgtctttgtagactcaggccaaagaaagcgtagcaaaagttggagaaaactagggttgaaaagggtctaaaatggtctttttgatgatgtgtctctaactgatggctgagtgggggttccctgcagggggctgccacygcaccttgcagacccttgccatccctttgagcatggtaactgcctgagaccgttctggctctttgacctgggagctatggagtctaattttgcaaacttctcacccagcagagtaccaggccaaaaaggcatgaatcagtaatgaacaaataaatgaacataaacccaagaggcagatttttcatggtatatgtgcacgtgtgtgtgtgtgtgtgtgtgtgtgtgtatgtttaaaaggaatacgaaggtaaggaaagatgactaatgtatttaagcatttgctgagggccaaatattttcatgtatgtcgcagcttagtggtgaacaccatagtcttgtagtcagataaaattgctcgtgtgactttcccatgtatcaccaaagtgctctaaacctgtttttgcatctgtaaaatgagaatcactgtagctaattcatagggctgttaggagcattaagcaagataagcatatgaagcactgacctcagtrtacaacatgcagtatggtaagtgcccggtcaataatggctgccttattattatatttattaatcttcccaatgatctccacagtggtaaggaaactgaaggccctaggcacagaagggtggcatggattctgaactgagtcccatctggaagcaaaggcactctgcagacactaaccagacagcttgtgtgaaatgaaatcaactttatgtgcatttcattcgttacttawagcacttgactaagtgaaattttaaaaagaaaaaaacctgcaaaattataatttgtgtgcctttcaagttcaggtattttatcatctcgataaatcttccatacatctatgttaaaccactttgagctgtcaaagctcttaaataaagtggctcgtcctcaccagtgtctgtctttgctcgtttatcatggttccccagtaaagatggacagatcccattttgcggggcaggcctcaggatggcagctcctgccccattggtttagctgtgcagttctgcatgatggtatttaacaaaccacagtggactcatgattccttcatcattgtgtctcccacatacacatagacccatgtgccactctaggaattaggaatagaaaggcaatctattgctagagagaatctgagaaatcagctccagggaaatctaagattctctgtaataggttttgggtggaagtgcctgggatgagggtgaccatgcatctggaagtcagcactgtctgctctttccacccagaagtgctrtgtctgggctgccttcctgcccagtgaarkcctggtcttcatccctgtgcctctctgctgtccctgcctctggccagagctgcccctaaatccagaatccctggggcagcggcagaggcacactctgttgcagggaagccttcctgaatccctcctcagccttcccatagtaccagcgggtgcctgtcggcatgcccttctctggccacgctgaattacctcctctgcttggctgtgagcacttccacagctttggaccaagtgttccctgtacttagcaccatgcctggcacgttgtttctctctctctctctctattccttcctccctttctttcttctacacatacttcaggcagtgtcctggggattcaaacagtgagtcaaaatgacatagtcctgaccctcatggagtcygcacacatcatgagacagatttaacaatagaattaagcacatacacacatagcaacacattttaaactggcttaactctcctgaaggaggaggctggtgtcagggccgcatgtggaagggagaaagatagagaaatatagtcagtatcactatagacagaggggccraaagtgttggagggaggcttatgttccttttttcatatacacccttgaagaccgctggatgatatttttctataaatcctggtaagcagtggtgtatgctgccaaggtcatcctattgagaatgtacacttttaaaaacaactgtgcttcagcttccaaatgggagaataatgctgtgatccaattcacttacccctttatagtttccagagctcctcctcggatgttgtctggttgggtgctccagttctcagcgtcatacatctcatcttgggtagcagcagcaaacagggatccagctcacctgagggtaaatctagtggcgtgggcactggagccttttcccttctgagtgacagagtccacctgagagcctatttgtttcctccttctctgatactcctgggcacaccaggctgagtctccagcatagattttatcatgttgtggctagtggtctgctgtctgagaggaaagaagggcactgctgactgctgttgtccggaaagctgggcccaccaatctgtgtgcagctgtggcagggtgagctggcagtgatcctacccatgcagagccatgccatgccagcacagtccttcgtgaggaaccagcagttctccagaggggcaccatgcctgccttcgaaacccattcatttccactgagaacagggagaaagtcacactaaagacctgttcaaaataagatgtgatccaaacagcctcaggaaacattctctgtccatacttgaatattattagagagttactttggccagagctgttgacaaaatacatctccaatccctaccagtctcagatgtagaccttatcaccagakatgagctgccgtcttctctgcagcaaaggaaggatgcatcactgcacagagattgaaaaggcccccatgctactcttagtcgggtgagtttgcctgccttgcacagactggtggggaagggctatattctcaaggtacagctataataggattgtaattgtgtggctcttagccatggagaaaagaagtggttctggaaatctccctttcataaaggctgacacgctgacagtatttatgcctctygaaagtacatgttaagtggtggatatttatgaaaagggttttgaggagtaaatgtgtccatcagtcaacctggaactttttagagctcctaagatggttttaaattagagccaatcttcttcctgccttcccccttccatcagtacgcccccctttctttgctttctcttataaaaatgaagtgtcaaggcaggacagagcccggggatgaggttggaactgccttacagaagcagagttagcatattaaaggcaggtgtgtaggggttagagccttgattctggtccttcccccttgtcacagtgttctggaaagaggagagtacggagcaaggctgacaagcatggctcagcctaattgcatcctaaccactgccatcagcagccctgatatcagccaggctgctcgctgaaaggtttacaaccataaaggaaaagaatgatgaaaacatgtgatgcaaaccaaccygaatttgggctcaataagtggcaggtggaagtgaatgagtgtcagtgtcaatgagggaatcacaccaggtcaggtcaagagaaacctttagaaggctggaagtttctctgtgagccagtgatcattagaacagaatgcctgttacatgaattagtgtgtaggagtctaacttggaattattactcactttcaaatcttcattttaaagatcagtaataggtttattgcacaaaccttatacttagtaacaaagactgctttgcttttaatttccccatctggccttcttctatgtaacttatatggtgccgttgatcattcttgtcttaatgtttgtgtgtgtgtgtgtgtgagagagagagagaaaggataccactgtctgttactcatgttgtgttttgtaagtaatcaaaggaccgtcgatgataaaagtataggagctgcctgtttcaggtgtcactgaaatgctgctaccttttggcttcttctgaaattctgctttaagaaaataatctgaaaattagaaagagccactgtataaaaatgctctctgcaccattatttgccatggtgaraacttggaagtgatctgaatatacagtataggaggagaacaaattacagaacgacaggctgatggagtattatgtagtacttagaaatatgaagattagccacatgggaaaccttaacatgctctgggaacagaatgcggttacattacagacatatttagraaaacagtcttcaagggaaccctctaaggggacaagagttacatatgaaaaagggaattatggataacctttttcatatatcaagctttctatattattttattattcctataactattttaaaatcttaaaatcagccaaattaaacaatgatctttcttcagtttgtaattttaggccactacctttgtggcctcatcctgaattaaatcatccaatcaaaaagaatgttaaagccaggtttggctccctgtttccatgtttccagtccagagatacactctgggttcctggctgaatggcctgcagatgtgttcaccctgtccctgtagacttgaattctcagggtttttaagttaaagaaggccattgcctctcctggtccccagtactgtgggaggaaggaggaatttggaattgcagccttcagagcccttattggtgacatttcagcaaactctccccacaacccaacrcacacagttactaattgcctagggtagccctgtatcattctggcatcttgtcttgcaggcattgtattctagtacctcaggaactggatattatgtgtgtactgccaactctcactgtgatggcgttatatccgtgtattctttgctacctaatgctggccaaagcctagtgcattaaactcattcaattggctaaacattaggaaatcatgtcacaagacaaggacttgagtctgagtagtttatttgaaagtggaccccaggaagcactagcaaaaggtagggaaattagccggggaagtgtaccatcaagcagatgtccagcaggggcatctgggctttaatcctgatggggatctccagagccagcgcagaaccatctcagagttatcccgtcatggggctgggggctgggtatacacataccatttctgtcagtcattgctgagacaaagagatagagatgctgtcagtggaagtcaagctggcttgctctaagacgatgaggcctggggctcagggcatggcactgacagtgtctgctgtactgttcttccctttaacaccatgaacattatcagcgtactaaactgaagataaccaagtccacaattccctgctaaatcagacccagttacactacattgaagactgcattaagtataaccaaccccaaaagtttgagaaaaaaatcatggatggaaaactttaaataagaaaaacattaccatatttcttcctagtaaattggaatagactaccaaaatttgattttagtggcagaatgctagttttctgcaactgtacagtttaagacccaacactttaaaggaaggcttgagtgtgtaaggtttatctttattatggcaatgttttttcctctcttgtagcttgatgattcctgttatttttctggtagattaagatgatattaaaagaaaacttcattaggagaaaatatttaactttatttgtattaatccataattatatctccagtgccatgttttaatattaatattggatttacttgctgtactcactaatacaagaggatggcagaaaatttctgtagttatggctttaggtgctatgataaatattttgtagtcattgcctttatatagaaacacttcatctccaattaaagatttagtagctcttcatcaaagtatctattcacaaacgaggcatactctatggttgtgctgacatttcaacttaattcactctatagttttgtggatcccaaatcttttttttttttttttttttttttctgagacagggtctcactctgttgcccaggctggaatgcagtggcatgatcttggcactcacttcaacctccgcctcccaggttcaagcagtcctcccatctcagcctcaggagtagctgggactacaggcatgcaccaccacacctggctaatttttttttgtaccttgtagagatggggtttcaccatattgttcaggctggttttgaactccaaggctcaagtgatctgcctgccttggcctcccgaagtgctgagattacaggcatgagccactgcgcccagtgcccccgtccattttatatgcttttctccgccatgcatagaagaggaatagcagcagaaatttggggcataatgcagattctagaaacactctctatgtctttattaagtctattggaatatttgtcactacaaataaaggccatactccaagaaatgatttaaaattgtaaatcacgtagcaagttcaatagggtttagtgttaaaattcatatgctttcagttctgggcattttagatttgtgtagaaagaattcaagatcttagtgttttagatcaataaagtcatttccctttaagttatggtccaagatgcattccataaagactgagatgacaaatacctggtgtttatgtatttttccataccctatgcagatggcagacatcattgactgatacccaagcctgatttctcctcagcaaagttctctacgcagccagctgctgcagttaatcagaattagttccctagatgaagtctatggactctccatgctcttacatacctttgtacttgtccctgccatttctgtgaatggtcaacaaaggaagttttcatagtctcccttccaaaaaacattttttaaagatgaattcaagaggcagctggtttgctcacctagtgccttttgagccacctctctgttatgcagatggtaggtattctatttgtcaatgactgactgtctcccttccttttgtccttctatcatgtgcattttgattttctttcttcatttcctctaatgttgctaagaagataaaacaggaagccccaaattatttgctattttctctcttataaagtttgtttgaagtcatttgtattaatggaaatgcattgagattttgattttcttttcctcccctcaggaagactgctctgctataggtcaccagcgaccttcacattaccaaatcttacaggctttctctgtccatattttcagtgcaacatgtgacacctcagaccatgccccaccttttgaactgttctttcttggactttcttctctcttccctcattgtttcttctttgacttctctacctgctccctttcctctgctggcatttttagtggggcatccccaagattcttcccttgggttcctcttgcctgtacgttacacctggataatttcattcacacacctggtttgtaaccatcacctttatatggatacctcccatatccttatctctatcacatcctttccctataacccagacatctgtgtccagcagcctgttgaatgctttctcatgtggctcctataggcctctagagtcagcatgttttgtttgttctagactatttccttttgcacaaggctgactaaatacttgcccctctcagattgtttctgctacctccttgaagtcatacatacaccattatgggcttgtcagaaagcttctgtcttggaaaatcaagtgtaagacaagagcacaaaccaagaactggggcttaaaatttagaaacttgaaacaaaactataattttattgtctctcacmattctgggggttgactgggctcaaccaggcagttctcactctgggtctcattcagaggcagttagaagggggctgaggctggacccactccaaaggcttcctcagtaaagagaaacctagagaatgggagcaaatatttgcaaactgtccatctgacaaggaattaataacaagcctatatgaagaactcaactcaatagcaaaaaaaagcccaaatattttgatttttttaaatgtgcaaatgatccgaaggacatttcacaaaacaagacatgcaaatggccaacagacacatgaaaaatccccaacatcactaacatcagggaaatgcaaatcaaaaccacaatgagaggttatctcaccctatttaaaatgactattatcaaaaagacaaaaaacaacaaatgctggcaaggatgaagaaaaagaggaacactactacatcattgatgggaatgtattaaataacttagtacaaccattatgaagagcagtatggaagttcctcagaaaactaaaagtagatcaaccaaatgatccagcaatcccactgctgggtatgtacccaaaagaaaggaaatcagcatattgaggagatatctgcactcacatgtttattgtggtactattcataatagccaagacttggaatcaacctaaatgtccatcagcatgccaaccattctatcaatcaataaagaaaatgtggtattatatacataatgatacattatttggccataaaaaagaatgaaattctgtcatttgcagcaacatggatggaactggaggacattatgttaagtgaaataagccaggcacagaaagaaaattattgcatgttctcactcatgtgggagctaaaagagttgatctcatgaaggttgagtagaatgatcataaccagagggtagcaagggttggggaggggtgaggctggtacagtaaagggaggttggttaataggtacaaacatacagttaggagtaagttctagtgtctgatagcacagtagggtgacaatagttaacagtaatttattgtagatttttaaattgcaggaagaggagatttggaatrttcccaacataaagatggtaaatatttgaggttatgratttcttcatcattacacattgtatgcatgtagcaaaatatcacaagttaccctatcaatatgtacaattattatgtattaacacaaaacaaaataatttttaaaaggctttctcactcagtggctgacaattgatggtggctggcagctggggcctccactgggatgctggaatggcacatcaggtggcctagatttctgcacagcatggcagctgggtcctaagaacaggtatccctggaggaccaggtgggagctgagtcacctcttatggtctaccctcaaaagtctcatagtatcacttttgccatattttctggcctgcctatcttcagggggacaaaatagacccacctctctgtgggaggcatgtcactgtcccattgtaagaagagcatgtggacagcgcatgctgttgtgcgtgggttggaaaatacatcctgccacaggtctccaacatgtctgactactcctctgagaaccacctggaatgacacagaagctttctgttttatttattaaattttttgataggtaacatatttacatgattcaaaagttaagaaaaataaatatgaatatattcaatgaaaatattccctctcatctcatagcttctacctttgcctccccatagacaatcactgctatattttttatatgctttcagagtttatagatattttgatatttcactctttttatacaaaacaatatttcatactctctgttctacattttgctttttttttcacttaaaataattctggagatgacttatcaatacaaaaaggtctctctctctctctctctctctctctctctctctcctgttacaaatgaatagtattctattgtgggctttacttgagatcactaaattagttttctatgggtaggcactgagcagtttccaattttttaccgttacagacaacactgcagtgaataacatatgccatctttcatgggagataattaggaagccttcctcaagagctcaagccagcatggtcatcctcttcccacagtgccttatacctcattccatcatggcacttaccatgtctcctttcatcagaccatggctcctagagattatggactgtggctactgtaacttatttccatactgcctagcacagggccctctgtgtccacactttgccgaagacgtctgtgccaaggagggaagaaggagggagggaggcaaatgagtacaggtgtctcaggggcctgtgtttcgcctcctcttattgcatctgtaactgcatttcttagtggcaggtaccacttaaggcctgtgtggtttcttcctcaatctgtcactgaaactggaatctggttctaccctgtttggcctggcttcgtgtacagggtgtatcccagaagactccagcctgaagcctagtttctgtagagtctcccaggtcagcccagaactactccctgacagcttgtcctgttcaaaaatagcaccagcaggagtttattgtggaggagggtgtgggtagtggtcatcacataatagtactaagatatcattgaaaaattgctgtcctgataaaaatccagcaaartagaattctcctttgtcaaggaagtattcttaaatctcagactcttattgtttttgctaggttgtcaaggaagtattcttaaatctcagactcttattgtttttgctaggaaatgtattctttaaggaatataaattgtttttgttaaattaaggaggaaaaattctaattttcacaagaaagattgatagttgtgctcactgctttaaagaaggctttctgggggagcttatattcaagattctttctattgtaaggaagagaaacttcactgaagctaaattaagcaaaattaggagtatggctaacataatagaaatgttttggggaatcaacacagctgggtccaggttaccaaatagatgatggtgctaggaatctcaccttctccgtctttcagctcttattaccactgagttggcttcattctttaaggtagggaagataggagttccaggcttacatggagtttatagccccttatctcaaaacatactctttttttccagtatccctattgaaagaggaactgatttgttcttcaggaatcatagctcctggaccactcatttttcacagaaagttgaagttttctagccatcttgattgacagacttttcagaatcatgaggaatcgtagtctagcagttttgaaagcgaaggtgttgcaggaccacacaatggagctgcctaccatggatggtgattcaaaatttgaatttcagactgtgaagagtatctaacttggggatgctagacctaaattaagaaagggttcctatgttaatctctctactttcatatatgtttgatattttctgtaatataaagtgctttaaaaaagtgcattaaaaaatgtttaatgtcttggtttgggaactctcaacaaacaagtcttcacatttctatatgtttactgtctgattttctcaacttctgtttttcttttcattgcacaaagagaccttaatccttacttccctctaagctgggaattcaggggaaaaaacacagtagttgacttcagatttgtgtggtgtgcttggagggcattggggtgaagacagtcaggtgcccttaaatccatgtttccaagcttcccagaacaaaagcctcagaaaattccagccagggagagaaggaagtctgtgctgtgaccataagtctacatctccccctttcacgggcagtacttgagctggggtcagtgtggacagatcagttgagggctcagtaggtcctgacttcgggtcatgtgtatagttagagggaggcccagatgctcagagggtcatgaactagctgctggagggactcttagagagtgtttagactgcctttttattttacaggtgaggaagctgaggccagaggagttaagtggcccaaattcacacagtgaagtagcaggagcagagctaggtttgagatcccagaatctaactttggagtctagtactacttaatagctgtttgactttgagtaagcaccattgcttctctgagcaccttgagacaggcagaataatggccttccaaatgtctacatcctaattcccagaacctgtgaatgtgtttggttctgtggcatgggggcattaagattgcagatgaaattaaagttgccgattatctgaccctaaaataaggagaatatcctggaccatccaggtggacccaatctaatcacaaatatgcttatcagtgaaagatggaggcaggagagtcagagagatgtagcatgagaaaaactggactgcccattgctggcttggaagctggaagggaggcaggagccacagaatgtggcagcctctagaagctgggaaagacaagaatagattctcccccagagcctccagaaaggaacacagccctgctgacaccttaactgtagtcccttttggacttctgacttccagaactataagataataaatgtgtgttgttttaaaccactaagcttggagtagttgcaacagcaataggaaacgaatacacctgtaaaggggaatagtcgtacctccctcaaaagcctggcatttacagtcagggaaatcgtgtctgaaaattacccagaaaagatcctggaacacagtagatgcttcataaagagtaatattgattggggggtcattaaaagagagcaaagggagagtagctgatgggcaggtgtctgaagaaccaaagtctgtgcctctgtggcaaggcacaggactactaagaggccaatagaagacaccagatggcccaatgggtggccaaaggcacccttggagaacctctctgctcctagagtcagcgaggccttcctcctccaattcttcagtacttccatctccagcagcaccactgtacatcagaggaagcaggagctaggagcccaccttgaggacttggtaggatgtgggcctctctttgacccctgagcttctgcctggccatcaccctaatgctactgcctaccctcatggccttaaagattattactgctactcccagtgttagcagctgcacttttatgagcttactatgggccaggcactctgtgacactgtctcatttaatcttcataacagccctctgaggcaggtctttctcccccatattacagatgagcagatagaagctccaagaggtcaagctgtttgactgatgggtcaaacagcccatcagtgacagaaccaggattacaaattaggttcatctgactccagatccagcctcttagacaaagctggttaccaggtaggagaagagagacaaccggcattcactggctactggaaggaggcctgggagagttgtgtctggatattgtgaacctgtgggaatgagagcccccatatctccaagaggagtcccccgctagaggaagtgctccctcccatcctggtgcacttgtgggaatgatggagccctcagatgggacacacttgcttcttgaggattttgcggggacattcacacctaccattctgagtcaccatgactgtgtctgtgttttatttttctaaaaaaaaaatacactgatgttggattagatgatatcaaggaatttttgttaactgttaatttcaggtgtgatcatattgtggtaaagtaagacggtgtccttattttagaaagtggactttatttttgaagcattgaaaggtaaaataacatggtgtttataatgtgccttcatatacttaagaggggaaaaggtgaagtaaatatagaagtatgtcaataatttgggggggcgacctctatgtggcagtttattatactgttattgtttccaatttttctttttgtttttagagacagggcctcactctattgcccagctgagtgcagtggcacagtcatagctcactatcaccttgaactcctgggatcaaccaatcctcccacctggacttccaagtagctaaaactacaggcatacaccaacacacctggctacgttatttaaaatttcctgtagagataggtcttgctgtgttatgcagactgctctcaaactcctggctacaagtgatccttgcacttcagcctcccaaagtgctgggattacaggtatgagccaccacacctagccctctacttttctatatgtttgtgatttttcataacaaaattttttttaaagtcactgagtacaaggatgtacttagtcttasgctgagctagacgcagccctacactaggtgccttgcccgtggtaaggcaaatcttgggaacaggctccaagaaagccttatcaccagacktgattctgagttcgccccgttgcacaggtgcttttgttgagctctttatagtcaatctgcaatcaagtaaataagaaacagttggctgagtcttttatgatacctgatcattgaaarattgcttatggtatgcgactgtccttccacaaacagctgggtgggttttcctccatggtggcgtcattcctttactgtattatgatacaaaaaaaggaccatggtgttttgtgaaatatctcatggtacatactacttaataggcatcgcatatgtcacttcagatttcccggcacgttttctttagcaaattctaatctttttggttttacatgaaagttcatttttcaaacttagcattggaacagataatcagattttttttatctccccttagcctcctcttactttgtatttttccttatcaaaatagccagccggtgaaaaggagcagcccttggagtgtttgttgttaccttatcttctaactgtaaggtaacaatatttccaaggactttaccaaatgtgaagaactgtgttgagtatctttaatagagacatcactgctaatcaggaggccaggttttgcccaagttctggtttagctctctaaatacaatgttatccttcagataaaactccatttctttcctataagcctttgaacatatgaacgcataacaggtgaccttagtagtaatttcatgaattcttggtgaaatgaattgtataagatcaatgtatctgcaaactcatcacattttcttgagctgtgagggactttaagatgaatctggtacagctctgttagtggaggaaacattcattttaactgtgtagtcaattctcaattaacaagagtaatggagtggaaggaggtcactgataatcaaaaatcatagtgaaaataaaattgtagtgaacactcaattttctgagggctgattaactggtttgtagatttaggttaattcccggtggaccataggatgtcatccctttggtcactggccagcagctgctcaccgcttggcaccgacccaccctgtctgtactcaggaggagaggggcttcccaggagctggaccaggcagacctagttgacactggctggagtggtaccacagtagtggagaccttagtcttgggaggcagcagtggccttttggaattgtcccatccacctctaaagcaatgggtctcaaacttcaagaaatagaaccaccaagagggcttgttaagacccaagttgctgggccccagccctgatttctgattgcaaagatctggagtgggatctaaaaacgtgcatttctagaagcacccagatgatgctgatactgctggtctttgaaaattaccactttctaaaacgtttctcatcctgcgttgcacgctagaatcacctggggagttttaaagactatcgatgactggatgtactttgaccaattacatgaaaggcttgggttgtggggcccaggccaggaggatttttaaagctccccagctggttctaatgtgcatccaggattgacaaccattgctcaagaatgtttcccacacctcaaacacctgcatgcaagcctcatgaggtttttcttatctttactcccccctatatgtttgtttaatatttttctttaaatcagtttttctgttatgtaaacagatatatttagaaagcaaaccatgtatcccttgcatgtaggaaaactagtttcacaggccataaatggggcatagttgtaaaaacaaatatattatcatttggcatttttaagttctcacctgaagtcatcttgcattccatcacacttggggagtctctactctagaactgtgctttttgatcttctatcacaaaggtgataaaatgcactatttatgttcttcatacactctcgtgggccagagggctatgctaactttgagcacctctgatctccccagcaagacaaacaggtcctaatgctagtgagtgcaactgtgttacagaatagcctcgattcagtgataatccttattcacaaaaaaggtgcttcatcaataggagaacagataaactgtggtatagccaaataatggaacaccattcagcaatgaaaaggaacaagctgctgacacacagaacaatgtgagtgaacctcagaaacattgtgctgagtaaaacggacacagaagaccagacagtgtgattctatttatatttaaagttctaaaagaggtaaaatgtgtctgtggtggaaaaacttagaatagtggctgcttgagggaggggtgcagggggattgagagggaagggacacaaggggacgttcagggtaagggagatgttctatatgttgagaggggttggagttacacggtgcatgatttgttaaaatttattacatgatgccctcaagatttgtgcatttcattgtaagttcaaagaaacgaaaaaaaatgctaaacaaatactgaattctggttaataacatgcatgctgaagtgtatagaaataagtatgctgctgtctgcgacttcttttgaaaggcatcaaaaacagtaagcgagattgccaaatggatagaggagtaggtatatgataaaacaaacagtaaaaaattaatggtagaatctaggtggtgaatatccagatgttcactttaaaattcttttgactttgctgcatgtttgaaaatctttcacaataaagtttgggaagaaattgcatacattcaaaacaaacaagtwcttcatctgcatgtctgcacttttgagtttttgccaccccagagggtcttgataggggatggctcctcacagaagtcaaatgggcagaaggcttggagcaatgagctgggatcgcgagggcagggtccttaagagaagctgctgcactgggagacaggactctgagcctagactcttcagtgctgggccccactgcagggggagaatgccaagggtacttccttcctttcacttgtgctgtatcttggggagtcccagggtgggttagctgggcagtgagctctgggaaaggagcgctgtagaagctaggttagatgtggcctgcaaatactacctgagccttaccacagagaggggtgcttcccgagctccttcaaccagcagaaccccaaaacacgccacccctgatgtccactggctaccctgagaccagagaatgttaaggctgggggtagagtgtgttggggttcctggggcatgcacttaccattttggggattgggcaggtccaatgggcaagaatggcattctcaggcctggtaggagggagctctttagggagccccagagcacactcatgacatatctccacagcatgcccattgcaccccatgacacactcccacagcaccaccacaccacacccaccatgataccccccacagcaaaacccccaacaatgtaccctcatggcacattcccatgctatatcctccataccatacccctatgatccatcccccacaacatgacttccacaacacattgtgcagcatggctctcctgtcaccgaccctcacccaaccttcatgtcacacttccccatgagacacctataggcctatcctgcatcaaacccctccatggcagactccccaccacagaagaccccacagcaccccaccacagcatatgcttctgtatgacaaccgctgcaacacataccagcaacagccacagcacacaccccactacacacctcctaagatgcacctctgttgaaccttgagtggaggccccattgccttcgctagagaagaaagagtaatttctgacacctgcgcactaacctgtttttccttcctttgcttgggcaaagatcttgagatacacaggaagaagaacaatttactcttgagggaagaagttataattgatgtctaaaggatagttaatatgctgattacatttatttcctacaaaaatgaatgagcccatcttgaataccaaagatcttgtggcttggatggagggaccgaatgggctcagtcagggctcctgttagtttctgcccctctaaaggcagtgggaagtgaaatggcctggccggcccttcactacaggagcttgaacttgcctgtatttcctagtaccacaacttgggatggagcccggagtttctgtgtccccatcagaaagaagatgatagcacttctctgcaaatgtctgcagtatctgcaaatattaaagataaaagtgtagttacaggtacagtataggtactgccaaaatatgagttagtaggcctaaaaatcacctagtaaatagtatattaacttttagttaytagtgatttgttatgcttgatttattattgtcatccatgaaggttcaaaatgtgaaaataataagatttggaattcctgttttctaccacaaatagcattttggtctttgtttgtttttagagacagggtctcactctgtcacccagactggagtgcagtggcacaaccatggctcactgcaacctcaacctcgtgggctcaagagatcctcccatttcagcctcccaactagctgggactacaagcatgcaccactacatccagctatttttaaaaaacagttttgtagatatgggggtcttaytgtgttgcccaggctggtctcaaactcctaacctcaagcaatctgcctgcctcagcctcccaaagtgctggcattttgagtatttaagtagctgcttgtttttccatatttgactgccccgttaaaatgagttccgtgagagcagagtatattctccatgcctctttccccaggactgagcagtcacacatggaagatgttaagaatttggatggtcatcacaataacaaaactgttaagctcattcaagctgcactttagaaatgaagccaccaataggaccttcaaaaccatggttgtgatctcatttacatgctactctgtcaattaatgctacatgccaattaaatgggacattaagctgccaataggtctgcaactctgcatgatagaatcctttccacttcagccagtgacctgaattcattgcgtcctattcattaattaccagggtttgtcctcaactccatccccagccatccctaaccagggcagaaaggcagccagacagtcttgtttaggagagattgtgatgcaagttagcatggctggattccagtcatattaccaaacattgtagttgcttggatgcatctgagttagtgacattctaatcttttaaaattcctgctagaagcagaaaaagcaagatttagagccgaagagtgtgaggggatggccagtcacataaagcagcccagttttcaaggagctactcttggaaaaccctcaaaagcagcaattctgctaccagctcagctcacctctggtttgctgcaatccagccaggttttaggtaaataatcacaatgagcaaatgtgcccatctggaaggactggtctaacacatcccataagcttacattttagttttcaaactcttgctattatattgccattggcaaaagatgcagcagtgcttactacttccctccttctgtggctcgggcactttagtaatttagaaatgyttcttcttcatctagagaagtaaaaataattataatagaaaatgggtaatttgcagctacaatgccaggctgataatcaaaaccttgtaaatggaaacataagcatatgtttatcacttcttgaaattagaatgcaattgaaagtagctgtggcctcaaagagagggcattatggaagggaaggcagacttacttgttagttggagacctgcctgctaatgaggcttttacgttgctgttgtctcaggagcagtgaataaaggaaagcatccctgagagctgctcagcttgttcaggggaccctcaggtaatcacttatagactgatcactctcttgcataaaaccacgcagaggcttaccagccaccaccgtcaggatcaagtttgaccttgtcaacatagagcataaggcccttggcaggctggcgcaggcctcccatgcaccttagccactctgttgaccctgctactgcctcagcatgctccatggcctctcacattccaaggcctttgcaaatgctgttttctcttcccaactcatttacctgcctaactcgtagtcatccttcaaaactcaaaacatctgttacttcttcttagcatccccctcttaacctgaccgagcctagggctctcctctgcccacctaggctccctgtgtttccatttgtgccagctcttaccaccctgggctgtgaccgtccttagcctttctacctcccaccagcacaggcaggtgagcatctaagcatgactgtggtgtgtctttgtctcccttgttctggcatactgcctgactcatagctgctgtttgatgtttgctgaatgaagggattattaatggcagtcaaggactttggaaccattttaaagtttgtctttgaaaagcacagttatgacatagagtcattgataacataaatcctataatgcattccacagccagttgggctgcttgggtcctctgtgtctgtgttcatttttgtgataggcttaggttggatcatgagttagtcctgcccatttttcacatcaaaggcaaaattggccctagaaacataatagttttgcctctgtaccataatcaggacagcaatgtgtttgctgctttgcatcttatttttgtgatattgttataagtactgaagggcacacaaatgctttcggcatctgaaggaggtcagtttcattaatgaatcagttgtgagctcagaaagcaagttttcttacttttgcccttgctttgtaacccagcgtctggctctctctctccctggtgggcccacaggcctgctagtgaatgggcatgtctgccagtggcttagtttttcatcaccatccttattctgagtcagttccaggctcatggatcagtagggacacactgtttacatttaaatcagacccctggtttgaagttgactttatttttatctgcagattaattgccaaatgcttagcttttcagctaatcaggtacctctcatgctcctatccacagggaagtaaaggggagctaagtgcgaatcctgcctgaaggatcccattcataagacatagtgagcatgatggttttgggagctgtcccagtgtaagactgtgtgtgctctgtactctactagctcctggacactgagggacaagaggggggagcagaagcgctggtcagagggcactatttgcccttgaccagatctcatagcttgtctccaacctgctgatctacggaatgatgaggctaaactagaaaatgtctctggtcccttctaccttgctctgaaatgctgccacgccccaggttcgagttacaacgtgttgctgactgtgactcaagcagtgagtgaatggaagtaggggaagaaagtctaggcagctacggtttgcttgaggagtttctggggctggaatagggtggggctgtggggaagctcatttatccattcagccagaatttcgtaaacctggcttatgccccagctgggacagagctaggcacagagaccttgaaggcaacaaactgagccctctcgggcatcctcctgaccccaacacgtggctactacacttagcagtcagctgtttgtttccaaaagtgtcagtgctggctgtatttgctaatatagtcaaataactttattaaatattatataaactaatgagctatgagtataaaaggaaagagtaggttttgctgataaatgatctgtttgattgctcagaaaataatggcttcaactcacataagcattttataactcctgatttccattatttttaaatagaacagtttttttttaaattatgggggttttaacaatatcaccttttgcattattccatggcacattgagaggtgtaagatattttgcatttgaattaagaaacacacacacaccttagtcccatgttatttacaggatgacctcttaggagccatttaatccaaacataagtaattttataaaatggagtaggcacagaaaatgatagaataacaccaatacagtgacatttatgaagcaatgactccataaactgcaacttatggcaccaccaacacccctgcccccgctgccaatctatcctttcctttaacattttaactccattatttcaataaaatgagagtaaaatacttatcatgaaacccattttgtactttgaatctttttaatcctctcttaggtgaatgtgcctctcactggtgaggcgcatacctgcttttctctggtcacttttgcttctggacttctagaagtacagccaaaactgtttgctctcacagaggcagagctgcatttggttctgtggtgattcccagcttctctcgaggaagagaagatgcgtggtttattggatctcaataccctctcccaggggaagaggctgcaggacatctgtttgcttttgctttcaaaattaaagtggatgtaatttggttttgaaaattttgcaatttcacttaaaaacattgctgttgggaaccagggagtcaatgtagtaaagtcctcacaagggcctctcttgggcccactgagaagtgctgttgccccccataggctgctcttgctcatacccaggtcctgaggggccatgctacacagctcagcagagacacctggaacacctggcagggtggggtcgaatctcatctcagctcactcctccttgctgtgcaatcttgggcaaacaagttcagttctctaagtcccagtttcctcatctgcaaaggtggagtaatagcatctaattgaaatatgtgtgccccttaaatggttggaaatattagtcagtgcaaatgcttattctttakctttccttggattgttcacccggagccatttaacctcacttctgagtccccttacacacagtgatgttgatcatctgggtacccacaaaatgtaaggggacattacagccccgggctgctgcagggcagtgaagctgtgaatcttctggaatgccatgccaggcctgggcactggctggctgagggtaggactcagggcacgatggtcttccccaggcatggcttcctcccagcatcacctccagcctaggctttgggggcctctagacaagggcctagaattttctctggcaggcctgaagctgggtggaacagtgagggctggacacagatcaaggagtgggctccagatatgctgctcagtgaggaagggaggacttaggtccccaggctgtcagtttccctcctccagggcagggagcatggagcattcagaggaacactgactttggaatagcagagaaggcaggaaatggttggagcaggagcactgagttatggctgggagaagctttaataggccattaagggggtgggatagggtaggggaagtaattaaggaggccattttgcacccttgcccggagcctgggaccctgagaccaggagtctagggattcgctctgccctcagacctgccagctctgcacacagcctgagctgtaccacagatgtgggccaccttaattccagcagctacctttgagatacaccctttggttttcaggattctggaatctcatcatgtctgatggagaggcagttcaaagtcattggcagtgggtcagcagtattgtctgcagataaagcatagcttctcttctcttagtatcacagatgttaggcagccttcccctctcagaataacctctagcttttgaatcatttggcatgaatatatatggaatcattggtggagtttttagtctgttatttttccattcagattagttagaaatgtaccttcttgagctaaggcctaatacagaaactactttgcaaaaaaaaatggagacttgggaaacttaaaatgaaaatcatataatggaagccattatttagtctctaatccatgagtttttatgctgtgcgggtatttatatattatactttctaccaaagttcttcacacaaacaggcctgagtgggtctcttacttcttaccaattcttacaaaaattatggttaacatgtcatgccaactccatgctcttcttattttccaacacattttccttttacaatagaaatgttcatattgggttaaattagaaagttattttaaataatcacttctgaggtatcaaagtaaggaagattttatattttttattttataaatgatgtggtggttttctttgattacttcttggatcctactgttcagagaaaatcagwtattcctttttgtaagagaagttatgaatcttccctgaagagttttagaaagataaatacttctcccttggcatgatgtcagcaacttctgcctcgaggaagggaaatggagtagagaattgctccaggtccttttcagctttagatttctctgaatttatcgctttcacagaagggatctcctgcatcttccacatttgtcccagagtgtcaatctcattaggccgagggatgagggttatatgtcaggatgcattcctcaggtaaaacctaaaagtctccacagccaaagagcttggtttataaagcactgtcacagtgtgatagaaatctcagccctgagtccagagctctgactctagctctgttattaacttactgtataaccttggataagcaacatcacctctccagtactcaactacaagtgagtttcttcaattataacacagggggtttagaccacatgttaacattctgcaaatgggagcacaaaaccaacaaagttaaatattttggttaagcataagccttccagatagagcattccctctgcctaaggaaaaatccaactcccaatctatgtatttttgtaacagtatctttaaaatgcagaagatgaaaatctttcctgaaatttgtaataaggagtcataaaatgtcaacactttttatgatttgtggccaatcttggagaaatatgtcttgaaaaaataaacatttcatattatatggagaagagagagggattggttcctttcattcagcaaaaagcagtaattgcagtaagagccatcgcttaagaagtatttgtagagacctgtcacctgtaaagcactgcccctatgcagtctgtgtttgagatggaagttaccccatgcccttgcttttgtttatccaaaaggcaagtgggctcctggtttcttgttgtccagaaatcacatctttgctttggggtcttgagacacactcccattcatctcttcatggcccctaaattgaatgttgtgaagtcaatgcatgtttctcctagctgtattaatgcctttggggtgtgcagtttgtcagcctgactgcattaatccaaaacagtgtttcaaattggcaagtaaggtgggacccttttgatcaaagagttctccttttgtatgtgatgaagcgtggtttgggtgtgttttggggtgcactcagaggagtgaggctaggggtgtccttttcaaaggtatagtgcccccctccctggtgtgcaactcacaaacactaggagggctgcgtacaatagctaaccgtgcaggaactgactgctcactggggagaagctgcccttccaggaggtaaaacaacctttggaagcatcatcatatagaatttttcagaaggaaagtgytcaaaagacagattcccttggcttttgtgtgaaactgagtcaatgaatggtgactttgccccactcttgtagawgagacaaaagacgcacttgcctcagactttggctacttactgtgtgtcttttttttctttttttaaataaaaacatggaagaccaccagggagtttggtgtaaaagccagtttttttktttgtttgtttgtttgtttgttttctttgcttgccatcctgcaacattagctgggttacaggaaacttccagaarccacaggcaatctttaaagaccatctcctgcatagcccttcactgagcacacaattactgagggtcgccactgtttgccagacatcattcaaaacaaggttctcatagtgtatctttattgcattttcatcttttttgattcctaaaattacaaaaaagaatacatgcttagggaaaaagtgcattagtataaagtaatactaataaagcccaagtctgtccactcttcttaccaccccctcaacaaccctactccttcctttgaaagtaatgacttcttatttgatgtgtacccatccaacaaattcataaacatatctaggtgtacatatatatagtttctgtatattataacacagattgctttgtttaaaccatgtgagaaaatactataatattgtctgcaacttacatttttttaccagtatttactcaataatctcccacatcggtatatgtagaagtacgtcactctttttaatagctgcatagtattacatggaatgtaaccattcccttgttggtagacagtggggtctctaatttttcactattgcagataaaccttcagaggacagtctgatgacatatgtttgcaggtatctggccatgtttattaataattaaactatttgtttgaagatatgtttctccaacacatgtacatgcctacacatccctatcgaaactatgaggttaatttatagaaagtttcttaaatccttggttcccctctaattacctgccccttcatacttaatctgttcacatgtttgctttaagaactaagcatttttttctcatgccttcagcctcctgcttcaggaggggacgctgcccagaactgggagttggctgcctgcttttcttaacctacatatatcagtccattttcacactgctataaagaatacctgagactgggtaatttataaagaaaaggggtttaattgactcacagctccacatggctgaggaggcctcaggraacttacaatcatggcagaaggcaaaggggaagcaaggcacgtcttacatggcagcaggtgagagagaacacagaggaaacrgccacttttaaatgatcagatcttgtgagaactctcccactatcacaaggacaacgtagggaaaacccccccaggatccactcacctcccaccagatccctccctcaacatgtggtgattacaattcaagataagatgtgggtggggaccacagccaaaccatatcactacacttgcattcaaccctctcctattccacttgctgcaggcaggaagttgaattcagccaaatatcatcaaagaaccatagaatctgggggatagcttttgtacaaactgaaactcttccttccaacgtgtctgtgagtgtattagttttctgtggctgctgtaacaaattaccataaacttggtagtttaaaacaaaggaaatttattttctcacaattttggaggccaaaagttcgaaatcagtatccctgagccaaaaccaaggcatcagcagggctgcattcagttcagaggctcaagggagaaatttgttccttgctgagtccaggttctggtggctgccagcattccttgtcttgtcactgcacccctccaaacttcaaggccagcatcttcaaatttccctcttccatcttcaaatggcctctctgtgtgtcaaaactccccttacctcccttttataaggatacatgtgattgcatttagcactccctcttctcaagattcttaatcacatctgcaatgaccctttttccaagtaargtaacatttacaggttctagggattaggacctgacatctttgggggacattattcaacctagtttgatggagttgttgacctcctttccaatatattttactgctggggcacatttgatatttcctttgaaccatttgggagaatgtatttttattcataagggaggcagaaatagatgttattttgctctgtacattgaaaacttagctagaaaggtgaagtgccagagtcaaggtcagacagaaaatctctggcttacaagcttcttaaattggagactgtgtggcatgaattgcatgcacaactgtaatgagtgaaattacaaacgtgcccrtcttcatttttcaatttggaaatatttagctgtatgaaagtttatatgccctagctagaaggaaattgagaagctatctattataccttctttcctgcagatcaaaccaaacccatgccatacattttttaaatcttcccagatgtgcatacaggtgttccactcctgttcaaaataaagaattgtgctaggcaatattaagggcataaggccaggagaagtgcacactgcttaggcatttagcagcattcaaatacaaggataaggttcgtgagcgtacatttaactgacattatgtctcctgcttcaaactcttcagtcctccctgcaaaaagcctattacggttttggacttggccctccccttgccatgtgaatgctaatgtctaatacctccatttcccaatttcatagcaggcctgcatgctcataaattaaactgcatcgctcagcattatcatgtgcattctaggatttagtccaaaatggcccaaactgctgcctatttcagcagaactccctttggccattgcctgttaatatattatagagacattaggacagtgatttgagagtgcagaccaggcaggtagagaacatacttccctgcagagaggtctgtgggcaaatgggagtggctcaggggaatgattgtggggagatgttggttgcctcatttcagacagaggatggggcctacgtggactgccccacctgaaacagggggaatgcatctgccacagactgtcttataaaaaactattgaatgtgaatggctaaagtttaaaagataacaaatcaattgaaagaagtaaaataaatcccagaccatggctaagttttgtcactttctaagccagtgatggtggtttaaaaacataccaaaatgtccaccacagaaccagattgtaaaggaaacatagtggtgcttggcttctcaacataacactaaacactgatacttttaaatcacaaccaaatctgcacatggttttttaaaactcaagtagtatagaagagcattcaatgaaaagttgcagctctgtccctactgcccccaccccacctacatcccaaaggcaagttgctttagccttttgagtctttattttggaagttaaaagcaactttaaattgtatgccactgagtcccattatgaaaaaataaagatttaactcatttatattctctgcaccctacccttcctctttcctctcacttttgatgattctattacaatgtttattctttaattggatacatttttacttgaataatacatttttatcgcttgagtcacaaatggccagtttgcctatccaatatctgtttctcccttcttccttattaaaacaaacccaattttgttgagagcaacaatgtgccatcaaaaaaaactatactcctcagttttccttgtgatagtttgccttgttacagtgttctggccagtgagatgtaagcagaaattgttgggtaggaaaactccttataaaggggactgactcagcaggtaggttccctttacccttctcctctctttcttcttcttacctggagcacaggtatgatggctggagctgcaacagcggtcatgcgaccatgagataatcttgagggtagctggaagtcatgttctaagaataacagagaaaaaaatctagagggatcctggcaaattggtgayatcagagctgctgccctaaccctaaactgcctatcttcctcatcttcattttatgagagacaagtttaggccctgttttgtctaaggcattattttcccccacatttgttattcacaacaaatctgtgcctctcattcatcaactttaatcagtatctagactctccacgaggtgagaggaaactattggtgcttttgctgtccttcccatcattctccaactactgcttctggtagctgtatttttctttttttcttttttgagatggagtctcactctgtcacccaggctggagtgcagtggcatgatctcagctcactgcaaactctgcctcccaggttcaagcgattctcctgcctcagcctcctgagtagctgggattacaggcgtgtgccaccacacccagctaattttagtatttttagtagagatgaggtctcaccattttgttcaggctagtctcgaactcctgacctcatgatccatccacctcggcctcccaaagtactgggattacaggtgtgagccaccactcccggccgcgagctgtattcttacattgccaatgttgataacattacctttctattctgtgattacaagccttctgtgtcttttcactagattgactctaaaagttgaacaccattaaataggatttacattattatgaccacgtatgtgttcactcctgggtcaagtgtccctggatcactcaaagagaaattcctaatatgggagtcaaattaacttttttctcatattccatcaaggagttaaaattatgtcccattttaatttacattatttttggaccatgttatttatggtccttttttcttagagctccacattttcacactctgccctcagctcttactcctcagcctatacaactatcattctaggttcacctttctccagggttaaattacctctacttaggttgtttttcttccttgttttgctggaacacatcctcaaagaacttcttagagtgactgagtggtaaactttgggtcctttcatattttaaagtgtatttattctattcctgtacttaaatgatggtctagatttaaagttgttttctctcagtatgctggtattgttcattgtatttttgcatgcagtgttgcaaataagaggtcagatgcatgccagtcttatttgcattcttttgtgaattttttcctattccctagaaatctcagaggtcttttccttattgttagtgttcttttatttcaggccaaatgtgttatcaattaggttgatgttggttgcagctgtcacaccaactaaaattgacttaatgataaaaagggtatttgttggcttacataattgaaatgccctagatgggatgagatgggattgatgttaggaatatagttctatcagatctctggtactatttatgtgtgattctcttggtataggcaactgggtaaatctcaagacaatcctgatagaacagaaaacaaggaatcaaggcagaggttgacaagcaatgcaatggcattgaagcctggcatcagagaaggcttaacaaggagacctttaattttaaatgtttaattgtgataaaatacacataatataaaatttaccatcttcaccatttttaagtgtgtaataaatgcattgatgttgttgtgcaagcaatcttcagaacttacctcgcaaaactaaaagtctatacctattaaacaataagtgttccttccccctctcctcccacccccggcaccgccattctactttatcttattaatttaactgttgtaggtacctcatgtaagtggaattattcaatagttgttcttttgtgactggcttatttttacttagcatgatgtccttaagattcatctatatggtagcatatgtcagaattgccttccttgtaaggctaaataatattttattatatacatgcaacgtatattttgtttttccattcattttgttgatccattcttccgttaatggacacttggtttccttccaccttctggctactgtgaataatgctgctgtgaatatgggtgtacaaatatctgtttgtatcactgtttttaattcttttgagtatatacttagaagtggaattcctggatcatatggcaattctattttaatcttttaaggaacctccatactgttttctatagcagctgcagcattttacattcccaccaacaatgcacgggggttcccatttctccacattcttgcaacacttggtattttctatttttcagttaacagtcattctaacaggacgtggtttctcattgtggttttgaatttatttccctagttattagggatgttgagaatcttttcatgtgcttcttggccattcatatgttttctttaaagaaatgtctactcaagtcctttgcccactttttaattgggttgtttgtttttgttgttgagtaaagaagaccttttatggacagccttatataggctgagtgttggggggcaaaatttaatagacagaaatggatggaaaggacattctaggcagagggcccagcaggatcaaaggcatggaggtgtcagagtgcagggtacattcaggttttttaagtcaccaggctgtgtcagaccataaattacaggagggaagcagccagcactaatgcaggaaaagcagggcttcctcaccctctgaagagggggagtcaggacaccacaatgaaggaagccccactgtggagccatcaagaatgtggagaccattctaccagatgcagggctgccctcatcaatgtccccatggtgcccatgggacactggatgcagtccagaggggtctgttaagaggttctggaggcagcttaccctgaggttaagttctcaggtcacagtgccaaccaaaaataatgttcattcaaaagtgtttctgaaaagttcccagggcagcgccacagtggggctcaacatatcatcctttcctaggccccatacaccaaggcctcctcaggcacaggtgcagtctctcttcaactgcaacccacatgaagttgcttccttgattttagagaccayattatgcagaagatacttatctttgcacactaggatcacatttggcccatgaaagtgtacacaccattagagaaaggcaagaactgaggcctcttgaggtatatctctttggatgctttgggccacacgccactgaacacctgatcagcaggygctttagcaataaagatattttagcagtttatataataataagtctggagaaaagtaatactgcacaaggttaatatagttctctaggccttccctttgtagtcctaggagggctgtagcagccccaagcatcatatccctacaccacagtgtccaggggagggagggaaagaagagacagaaaaggggctttctcatcagtgctctttcatcatctgggagaatatttcctgatctccaggtactttcttttgcatctcattggccagaactagatcacatgcccatgcctaaccaatcactagcaaagagcttgagacttccatggtaggtgtggtgctatggttctcatgcctcttatcccctgaagcaaaataaaattggtgtttgttagccagaagaaaagggaattgctgtgctgcaagaaggaccagcagattctcctgggctatatcacacttgctctggaacatctgctcatggaagacagcgtaaatcatttcatgtcagcctacattttattttatatgtaaattattattttatttattgagtccagcacatacaggtgaattctcatgagttggatgtctgtgggctgaagcttcactgccttaattttggggttgttaccttcatatgtcctccttgggctttatcccaacctctgagaatggagtgttctttagttcctctggcctaactatattctagctctgcctgttgaccttgaggcccagggatatgactggtcccctggggccaggcccttgctttcctatcctctggacagcctctctgttccaactatagaaaatgctgtgcttgtggcatgcacactcgtagatcaacatgtatcacaatggcctagaaaaagagccatcagctaagacgtagcatagcagatcaatacgttagttctttggaaatcacagaagcaaattaagcttttgctgatttttaaattcacacacagtaaggaaaatcaacaagtcctcattttgtgggagggagcctggtatggggttagctggaggtttgtgtataacttgctggcaaatgtgtcaagcttcttgacacttgttaacctatgcataggctttggtgggaacatggacaggacatgttctgccagttgtagttgtggattctgaagcaataagtgcaggaagaaacaagacagtttgtcagcttaagaatcatagagactacagttgttacttatgaactgcctaccgttctggcctaatttctagccaacacaatagcgattatgcataccattaaatatatgttggatgaactcagttaaaatttttaattaatcacagcctcaaatctgactcaggcctgctctgacttcatagatccctgcctagatttgcagttatctgcttatcaccatggcagtctgctcatagctcagtaaagaagagaagctgggctgcttggcttataatttctaggaggaagttatattacacgaaattggagagaatggctctggacttggttatgttgtacccagtgaaagtatcaggtgaacagctcttcttgggcatcatgtctcttgcctgcacctcccaactgtgattcatagagcatccactggcctgttcagccttcatggagagcctggccaagtttccacccttcccagatatttcaggatcctrttgtcatcctattaccttgaggaagttggtagtaatggcagcttgttttctttttgagtgaatgaatgaacaaacaagctaaaacaaagtggccttttttattaggatttttagattacattttagggctggtcctaagaggatgtgagaacttaaggacaaggctgagtagcataggggagacaactgtcaccctatattcctcagcaatttttctttctcctttaccagaatcttcatttcttaaaaccagaaagcagcctggctgatctcctgagttttcccccaatcaggctgcttttgcccactcaggcacagggcagacactgggacactagccccttctgtgtgacctccttctgttgactggaatccaccacccatactgatggtcatggtaccatttctactagcatgttcctaggacccttatgcatgcacagtttcagaaaacctgtcctgctggtgcatgggactacagagtcccaccatgcactgtcccacctcactgggaaggggttcttctgattctgtttccatgtgaagacagctggactgtggccatgtagacagtcacttttatctgagtttctttctgatggaaataaattgtattatatatggaaggagtgtggtcagggcctcatgacctctagtatctcctcagcatctttctcttctcaattgtctgtccctctgtggtatttcctggttcactaggggaactccagaattgactctgctgtctgtaaagaaccataaagggtctgaaattttaccctacttgcaagctaacaagttaacctgccacagtttcatggatgctggcagaagacatgagacttctccctcggagacaaaagactttattactcatggcaacagcagtagccagatgtcagcattttcttgtgccattttctgagctacaattcccacaggaggatgtgaagatggccacatgatacccatacttgcagtggattgtgttatgggagaagatccctgggcttcaggaacccagatattttatcagggacaataaacatgcctgtcttttgctycaaagaaggacatcatcttcattatactggacagtaactctgcctgcctttgtcccagcaggagacaatatcagtcttccaaggctgckgttagctattcaaatatctgtgaaagaaagtccagaacaatcagcagccaatgccttacttgaaagacatgcagaaacataagcaacccatggagaactgcctcccaacgttgtctttgttttgacctcatccatacattcaatttgattattccacacacgttttacacctactctgagcaagaccctatgcttggagtgtaggatacaaaaataaaacacattctttgccctcaagaagctcactctccagtcagatggataggtgatgaatagagagtaaggtagaatgggatgagatgtaagagagaaagttctaaggggatgtggaaggcagaggagaagacccaacttagcttggaaggaataggcattgacagctttgtagaggaggtaaaagtctaaatgatgtagctattagcctggcataaataggtgagagtgagtgagcactcaggacaggatgaaaggcagtttgacagagcagccatagggagggggttggagggtaagtagcaaggcttgggagaaaaggtcatgaccagattaggggctctggatgacacctgaagaatttcaacattatccagagtgaaactggtggggaagggattaagcagggaatcagcatgttgatgtgtgtgttgacagatcccttgggcagctacgcagaggatggatcagaggtgagactggaaaaaagacaggctaggagtgcattcagatccaattgagaaataatgagtcccaatctaaggcagggactatggagtttgagagagggatgagcaataaagatattacagaggtgggactgacagactctcaagtcaagggacggagatgagccacatggctgccagttttgtgatttgggcactagaagggccatgatgctgtcccctgatgtcattacgaacaattgctcctgcattttcctgatacacagggaagcccccagggtagcagatggcataggatgctttcccaacactaaatgtggcatattgcccactgttagactggagtgggggccttgggatggaccccaggttgggtatgggcagaggcagggagagaatagaggaatcaaatattaccactaaggtgggaatcaggaatcagggtccttggatggggctcagccaaggcagcagatacaayttatggggttaaaacaaaatttaagtttggaagggaactgacaccccagattaggatgcagaaattctgaagaggtaaagcaaactgggcaaaggagaagtaccacattttgaaggcagtaatggggatgggagggtggacaaacctggggctctgctgttttgacttggggaatatttcttccacagctacctgcttcagcctagatcctgccatgaagcggactgctgctccctggctcccactctgatctgcttttcactcttgccttgtctcccaattaataaggtaaatatytcttttagtcaccttccactctgcattagayccagtgggatccctgccctcagggatttacagtgtgctatgcaaggaaagaatggaggctacaaaatatagactaaaaatatttatatatagacaactatactatgtcaccttttcaaggttagaggagggagctctgacttccaggtgggccttgcaggaagctctacaggagagttggcatggaagagaacattctagcactaggaaatggcataaacagaggcccaagaagcaggaacatgcagaagacacattagagaatggtagatgatcccagcttggcgatgatatggagtacttgtaaggaatagagaaggtgggtgggagacaagtaggagaggtagagtgaggccaaaatctccattttccatatggttcactaaggctgagactgaccaattaaatcatatagtaagcacaaggctatttgccagatatttctggctttccaccttcagcacatagagaccagttgtactttctagctcactatagttgtgtgggatctatagaggtgacatgtggcaatttggggccaagcgtaaagttgctggtgagggactttccagagccttctttttctctactattgctactaactgcattccatgtagtggctggtctatcatcttgagtcatggattgagggacaaagataacacagagcagagccctcaactggtgtggaatgggtatgaattattaacatgaaataaacctttattgttttaagccactaagattaaggttgtttgttagtgcagcttacctggcctctcctgactcatacacttaatcaaggtaactcggttagaaagtacttgttggctttgattccatgtctgtcttgtcatcaagccagtgtcaggcagacgtctgtgtacctttaggggcccataagcagggtcaagtctagagctgtagatttggacatcacctacacaaatgtagtaggacatggaaagaaagtaatagagatttagtctgtggactttgggagtgaggcttcttgccctcatgttctttctgtcccacaggtttgtagtcaattccacatggcctattgataagtaggacatcattgctgcctgcagggtctggaggttcagagatgctggcttgagtttgttgacagctgcacactcataacattgctaaaaacttcataaactctgatgcctggaaatagcccaagtsatttgaggttttgctcacttgtaaatgtttgagtattgtgtccacaaattgcaaattgagtaactcaatttcgaggcacagctgttatttggaaaagacccatctaggaacgcaagctccttgcaaaataattgtgcttcatttttgtcaagtatcagaaaatcattaaactgccaagccatatggcaaatgcccactagaagcagagtgcaacaacgagccataatgaatctgttttggggagaagtacataggacagcgtctggtttttgtgatctacagaaaagattcgctgctgcacatttcagccatccagagtcctgagtaagggtttttcctcccatgaaaaattcatataacaaatttagttatggtagtttttttttttccttaggtgtatttttttccctttcaaacaatgtccatttgagtttctgcatataaaatagacttaactgggacaatagaaacttctaaaagtttacatacttttccatttttatatactaacccaataaacattcattaaatattggcatagcagttagaattaggtttagctgtgtataatagaaaaatggaaaataatggtggctttgaagatcgtttctaccccaggtaaaagaaacctggaggtaggcagcccggggttggcatgacagcttcagggtcatcaagtcctggttttctcttgacctattctttgtcaaacctggagtaggtccttgtcctcagggtctaatacagctgccatgctccagctatcacattccaggtagcaagagtagaggagaggagaaaggtatgcctttcccttttaaggacagtgcctgacctaacacttctattcaaagatcactggccagaccttaggcatgtggcctcagcctactgccaaagacattgggaaaggtagcaatatgcccagctgaagacgcattctgtgactaaagaggatgggagaatggatattgaggagtcgccagcaaactttatcctaccagaggtccttgatgcttgttcttcctgctagattataaccttcttgaggacaggaacagattttatttactcctctatctccgaggcactagcacagtagctggtaggttgtgtttttaattttctgctatttgcattcctaacagcagacccaaaayactcctcaccttctaaccccctcttctgccttctttgtccatgttgacagatcagctatgattttaggcatatttatttttcatcagaaaattttacttctaccagaatgatattagactgtctgttcatgtgtttttcaatattgactctgaattccagggacaagagatgcttagaggagggttgttttcttggagctagacaaaagactacacagcattggtacttgggcttgaccttcctcatcagcacccttcagtggtgacatctcccaggctgagctggcctgagcaagctgcctaataggtagaaggatgccgaatgtgtgtccaagggctgccaggtcttaggtaactagaaaaatgggaggtctttttcaaacaaggtaaagaacctcctggaagctggtatagggagtgacaaattatgttttaaacacaatgaaagacaaaggagctaatatttctagagaaccctctatgggccaggtactgtgctagacaggtcacctccaataaccctcatgaaagttctaagaggtagatataattatctccactttctatgtggctcactgagccttagggaggttgattggactctttaccagaaagcaagcacaaacccttcccttccaggtgtgttgaaagaattagcattgatgtgtgtgaagtttttagcacagtgcctagcctattactcaataaacccagtagtagttactcagacgtactttattgyggcaattgaaactagtcccaaattatgagtatggcattgcaagagatctcattccaygccttgtgctccttcaaatcttttgaaatttctcgaaactaaagagtgggctgcctgctttcctgggagtctcataattaggatgaatgcttaattgacatgtttgtttcctccaaggggtggctggcagaggatccttacaccgacaaggaaggtatgctttgcttttgtttttagcagcattgtgtgcccgtagcaacagcgggttaaaaagaaaaagtactggagatcgcatgaaggttgattgccctagagaagtcgacacgctcacacagatggaaatgatttcaccgagtcctgaaaaatgtggtcgtcagccccacatacaaaccacgacttgtgttttctttaagatgaggagtctggtcaagaggtctgtgtaataaaagatgtttgtagaatccatttccattctgcctgaagccatctgctttatgtctataataaacagggatgttttcagccactttcccgggcctgggcccgttacaaatgctcaccgcagggaaaggtaaattgactgcctcccaagcgatgagcatttgcacgttacatctgcagtgacggcacttaaccttcccgggtcgccttccttactgtgcctccgcgacggcctgtgacaaatgggctgaggggtgcacactaggttagaacttaatacacatggagtattggccagcatcacattacgtggtgagccaagtgagatgtgagcaggcggaagaggccatattccaggaagatggaggccgtctgaccttctccagccagaaagacctgagggcagctggggccgtcctgagactttctgatgtacccactgtccctgaaacttgcggatgcacttgagtgctctttctgaaacacagactgagcaagtcacatccctgtttaaaatcgttcagaggcttcctccttgcccataggataaaatctaaactccataggcacccagggtccctcgtgatccttccactctctgcagcttcatcttgagccactcacacatcagctcctgcctacacgtgagccatactgacatctttcagctcacctcccaccttcagctgctgtgtctaggccttcgcagcgctgtgccttgtgcctgacacagtattcactatcttccccagcatctcaattccctctccattcttgctttagctggaaggtcccttctgacagcctgccgctaaaaagatgggtgttttaacttcctatggctgctgtaacaaatcactgcagccataggaaactaatgtgtggcttaaaacaacacaaatttggctgggcacagtggctcacgcctgtaatcccagcactttgggaggctgaggcaggcagatcacctgaggttgggagtttgagaccagcctgaccaacatggagaaaccccgtctctactaaaaatacaaaattagcagggcacagtgggacgtgcctgtaatcccagttactcaggaggaagaggcaggagaatcacttgaacctgggaggcagaggytgcggtgagttgagatcgtgccattgcactccagcctgggcaacaagagcaaaacgctatctcaaaaaaaaaaaaaaaatcaaacaaaaacacaaatgtattcccttcaagttttgtaggtcagaagtttaaaatgaaggggtccgcgttccttctagaggtcctggggacagtcatttcctygccttctccagcagctaggggccgtttgcattgcttggttcatggccccttcctagcacctctctcttctctgacgactgcttctttcacacatcttctttctctgtttagccccgttgctgccctctttatgggggccttcatgataaaactgagtaatccaggctaccctcctcatttcaagattctttatgtaatcacatctgtaaagtcccttttgccatgtaatataacatattcacaggttccaaggattaggacacggtcattttcaggagccaattattcagcctcttgcagtgaggtgttaagccctgagccctgatcccttaccctgggggttattgcctattgaattgtccttcccatagatgactggaagctctttgagggtgagggctgcatctgcattgcctcctattgcatcctactgtccagtagagggcctggccactagtagatgcttaataagcagttgtccactgagtagatggcagtcagggcagtgccagagaccaggctgttgtagagaaactggacggactctgaaaaccagtgcagtgagcaatgtctaggcagtaaaatctggaaggaattgtctggactgtcttggcaaatggacagccatcaacctccagttctgtagggcagagggatgaccttggtgtcaatgtgcaggaggccagcatatccctgttgacaggatcatggtggtaaagagggcccaayaggcaaggatgtcttttttaagtttcagattgagtcgggtgaagtggggctttggggagggatcttgtgtgccttcagggagccagaaagttcactttatatctctggaaggctcattccattgactgggacagaaccaaagagaggaggtagacatctgacaaaaatacttggtcagggatagacactgactctgttgttctttccacacacatttcctgagtacctattggtgccaggcacagtgctaggagttgaaaggaccaagatgaatttaaaaaccactctctaatcacttgagcccaggagtctgaggctgcagtgagctatgattatgccactgcactccaaactggacaacaaagtgggaccctgtctcttaaaaaaacaaataaaaaataaaaaacctctaagatattatcttccacttggagaagagcaacatgcattaaaaaaatgacagttctctggtgaagaaacaaaaaggtgataaaatrtgtaacaagtacagagttagcatggtggtgagggcagtagsggggaggtaaatattccagggagaaaaccttgaaggcagatcatcaggatggcgtttcaggtggtcatgactgcttttgcagaagcagcatgttgtgcttgaggagtgggatgaaatgctgtctagatgactatggagtgggaggcagtaagctggggagggggcgggagccaaaggtagaacctgtttgccttgtctccagtttaatgataaattccaacaagcctgtacaccacattctcaacttgttaaatccttcagctgcaattatcactctctggcctccattaaatgcttattgatgagaagccttccccaatagcagaagtctccctcacttgctccgtctcactagatattattagatgataagggcagatgggacacttttatagcatgcatcttgccttgtgtctgatgagatttgcactcaaattagagccagtttattgtcctggtggatccctggagtgattccattttagccctatcactgtatttcgctgggtttggcttgggagggtacttagttgaagcaaatttgagtgtacacatggtacaggtgcactgaccctgttactgatcctgggaatgtgcactcctgtgtccttcagcctgcgatatggcccagacatagcacagtcaccactagaacagtgtggctcagtatgcccacagcaaaaaaagaaagagaggcacttattaaaggtcatttattctccttctcagcatcacacttcattgctgttgatgccaccattcaaacaaattgttctaatttatagtttctgggaacttttggaaaaatggatgagagccccaggttacctgagatgctgttacatattttaatggtgctaacawtgtatattttgtcaaaatgaaacaggattttgaaagacttcataacagttgtaaaaaaaaaacagccaccttttcagatacagtcatcacgaggctgctcttgtgaatagcttggcacactttgcaaatatctcattaaaccatccaacctccctgggaaaaagctagcagcagcttgttgactgctttcttcccacacagttgggggtattcctgctgcctcaaaggaagtatggagagaccacggcccgcctaggctgagagcttttcatcttcacactgtagctcagagtacatgccctccagcctgccagtgccctgtttcagtcttcactgatccctactctgggccaggctctgtgcttcgagctgaaatcccaagaaggagaaaacaccacttcccttcctaaagggtttactgtccagtggataggaaagacacataagcaggctttttcaataaaatgtcgcttgtggtttattaaaggtaagtcagagatgagttaacctaagctagatgtcaaagaagccatctcagcagccttccaccctcccaagtcccagacacttgtatccccaactctgtggcagccacagtgaattagttaatccagtttccaatcccctttcccttactgttctcactggagaggctgtcaagctaaatagatgccttttctggcctctgttgtagctacagtggccatgtaacctagttctggccaatgagacagaagcaaaatctacaggaggttctaaaaaagctcttgtgttcttgattaagaggaatagccaatctagtacagcttcttgctcctccttcttgcctttattgaggttatgatgtgaccatgagacagaaactgaaagaattgtaggtcattgttgagcccatgatttcatgtcattaggtgcctacttccagactttttgtcatgttagaaacaaatgaacctctctttgtttagaccactgaggttaggcttctggtatttgcagctaatatatccctaactgatataggtacctagcaggtaattgataaatagtgatgaagtaataaataatgtgatcatatgaattggatcttaacatattgggatgtgccggggggttttctggttggaggaaaccaaaatagcctgtacagaaggttgaagcaggaagccatgaagatctcacaaagaagtcctaataggtagttcattgttgctagaatataaagtaggaaactggatgaaagcctggagaaggagataacatgggccaarttgaaacagtttcctttgatataagcagggtcccaggttcctgtgactgagcactctacatgttgcccccagaactgcaggattacagctaagaccatcacagcaagatgaataataaaggcaataaatgcattcctcccattggtttctgtattatctattactgcataaccaattacatcaaaatgtagcagcttaagataacacatttatttattatttttatttattatctcacagtttctgtgggtcgtgaattcagatataatttaacttataaagcctatcttataaagcttcagtcagtgttcgcagggctgcaatcacatctgaaaacttgactggggaaagatcacacccacactcatgcacatagtttttggcagatccagttcctcactggctgttggccaccagaggtctctctcacttcctgggcccatgggcatctccacggggcagctcacaacctgcctgctggctgcatcagggtgagcaagtaagaaagcaaaagaggtgagcaagagggaagccaggggcctttggtaaccttatctcagaagtggtaaccactactgctgtattctgtttgttgtaagcaagtttcagcctatacttaagggatgagattaccagtgaatactaaaaggatcattgggagccatcttaaacactgcctaccacagacacaccaccatctcctttctcctcctgctccattagggtcagcagtagcagcacctttctcaccattgtcatcatcatcaccacagccacagtgattatttattaaatgcttcttacgtatcaggcactttccatatgtaactatcctcactataaccttgtaagagtaagtaacattatccccatcttgcaggttagaaacctgaggctcagagagggtctgtgatttgccctaggcctcacagccagtgagaggtagaactaggggtcaaccaagtcccacctcgaggaggcagcatctcagaggcaagagagccgtgtctgccagcctgccctggagcctgggctgtttccttctcacctttaacctcaacagggtgagaccagagggtgggctgcaccctctcaaaatgcttgggccccagataaaggacaataggtgagatcagaatacagtctgcacattagataatagtccagtaacaatgttggtttcctgattttaatcattgttctgcagttatgtaacaaagtgtattcattctgagaaaacacatactgaagtatttagaagtaaagagattttatgtctatgacttactctcaaacatttcagaaaaaatatttataaacaggtatgtatgtgtgtggaaagagagtgataaagcaagtgtggtaaaatgttaacattggggaatctggataaagagtataaaacattttgtataaattttgtaacttttttccaataagtctgaaattgtttcaaaataaaaagtgttttaaaagtgctaatctactctaggaccttgtgagatctattaggactaccagagatggcactacgggagtcttctagccctccttctgaccccgtggtgatctgtcagagctcaaggaggatatagaggttcagaatagaacatgggttctgggatcaggctgccttggttccagtcctggcccagtagcttctaaggtccctgagctgtatgagtaaccactcagggtcgttaaaaaggacttggcaagagaaggatacgccttggcatagcacttggcatacttcatggcccatggccaaccctccttaaacgttgttttaatggcctcctcagtcatcttacaagtgagaagtaatggtctstgtgtggtttagagagactgatctggataattgtctcagtgctaactccctgacatgagcttttgtccccataaaagcagggtggccactgcaacaggtgtggatgtgcctgacaagatgaagagccgaatacctgtggtgctcctggcctgtggctcctttaaccccatcaccaacatgcacctgcgcatgtttgaggtggccagagatcacctacaccaaacaggtcagtcagggggccctgagtccaacagaagaactggtgggttaggcttcatggggcttttctggctgctggcatcactattattaaaacagctcaatttattcacagcataactagtggcatatttttttcatcatattcaaagggttgatgcttatagtcttgtgacatatgtacaagtcataccccttgccatagagctgaacacatctcaaggtctcccctccctgcccacctcacattggcaatgaacgacaacaggccctctacagaacctgtgccacaatcagggcatccttcctggtactcccaacatctacctacacagccagatgaataggtagcatgtgccttagaaagctcctgatactcttcagagggtaagaaaatgcttgataatgggcattttgacattttctcattttaaagaatagatcttagattattacaaattaataatcttgtatatagggcatttccaatacagatggcatgactttgacaggaatatttaatcagctggaaatatataatctgaggatatttcacctgcttgactttctatttcattattaaaggagtaaagtgacatttgtaatctgcatgattgtttctaaagaatataaataatgtatctgttgctatcgagtatatatgaaattatttacttgtatatttatgaatgtattatgtattcatatatgtattttgtgtttctatattgtttgtaaaaagtttgcctttaaggacattgtttttataccagaatccatccctatttacttttaacatagcaaaaagtatttgagtaacatggaaattatttcttcaaagaaataatgcacaagtattagttcattttaaaggaaatgtctttattttagaaacatatttttattgaaaaagtaaaagtgatatcctattactaccagtaggactgtactggtagtaataggataaattttgaggacaatttggtgttctgtgacaaaagatttaaagtctctacccatactcagaacaaagagaaaaatgaaccaatggaaaccaaaccagatttgatgcagatattagaattagcagacaaagacttgaaaacaattattataattatgtgctatatattcaagttaagtagagatatggacaatataaaaggacccaagtcaaacatctagaattaaatactacaacctgttagatgaaaaatacactataaagaataaaaaacagattagacattacagaagaaaakattagtgaacttgaagatgtaataataggaactatctaaaaatacaggaagaaaaaattttaaaaaagaaagaataacaatgagatacgggaaaacttgaagcagcttaatatacttggaattggaatcccagaaggggaaaacaaaggaagaactagaaaaaatatttgaagaaataataactgaaatttctccaaatttgatgaaaacccacagatccaactatctgaacaaactccaaacacaagaaacgttaagaaaacaacactgaaaaatataataatcaaatctctcaaaagcagtaatagtcaaaagcaaccacagaacaaaaataaagatgacagcagacatcttgttactgaatttaccaaaagagaatttagtgtaatagcattgttagagaactgaaagaaaatactgtcgacctagaattctatatccattccatatctggcaaaaatatctttcaaaaacgaaagcaaagtaaaggcattttcagatattcaaaagctgaaagaactcaccaccagcaaacctgcactacaaaaaatgctaaattcttcaggcagaaggaaaataataccaaacagaagcatggaccaacacaggaatacagagcactggaaatggtaacaacatagggcaattatataagatttcttattgattttctttaaaaggtaattaacagtttaaataaaaataacaatacattgtgggatttataacctatgtagaagtaaaatatatgataacactagaataaagctgagggggtaaaagggaagtatacataaagtggtataacatcacttaaagatagactgtaagaagttaaaggtatgttttaaactctaatgcaactgctaaaatgaagcagttatagttaataagcatacagaggaagtaaaatagaattggaatatactcagttaattcaaaagaagaaaaagaagaaacagggaacaaaaaacagatgagacaaatagaaaacaacataagagatttaaacctaactatatcaataatcacattaaatataagtagcctaacaacttctgcaaagaggcagactgccagattcaataaaataagcaagacccaactataaataagaagcatactttaaccatagtaacccaaataggttaaaagtaagagaacagaaaactgtcctatgctaacactaattaaaagaaagctgaagtggctatagtaatacagagaaagtagatttcagaggaatgaatattacgtgggataaataaggtcatttcataatcacaaaggggttaattctttaagcagaagtaatacgctttttgcacttagtaatataacttcaaaatacataagaagcaaaracttatagaattgcaaggagaaatagacaaacccacatttagagtcagctattttaatgctcttctcagtaattaatagaataagcacacagaaaattaatagaagacttgaacaacactattaaacaatttgacctaattgacatttatagaccactgcatcctacatcacagaatacacatccttcccaagggcacacagaacatttaccaaaataagccatattctgaaccataaaagaagtctccgcatggcgcggtggctcatgcccgtaatcccaacactttgggaggccaaggtgggtggatcacctgaggtcaggagtttgagaccagcctggccaacatggtgaaaccccgtctctactaagaatacaaaaatcagccaggtgtggtggcacacacctgtaatcccagctactcagaaggctgaggcaggataatcggcttgaatccgagaggcagaggttgcagtgagccgagatcgtgccactgcactccagcctggggagtgcagcgagactctgtctcaaaaaaaaaaaaaagtctcaataaatgtaaaagaactgaagtaatacaaagtgtattctctgaccacagtggaattacattagaaatcaataacagaaagatctccgaaagatccccaaatatggaaataaaataacatactttgaaaaactcatgggtcacagaagaaatcaaaatggaaattagaaaacattttgaactcaatgaaagtgaaaacaatatataaaaaatttaggatgccactgaaatagtacttaagaagagttttatagcacgaaatattatattaggaaaaaaaggtctcaaatcaatgatttcaacttccactttaataaacaaatgaacagatgaaaaacaaaataagcagaagaaaacaaatacaataatttgccacactatgacattttagcaaataacagaccatatgtatgacagtggtctgataagattgtaatggagttgaaaaattcctattgaccagtgacgttatagcatcrtggctcaaggcattacttgtgtttgtggtgacgctggtgtaaacaaacctactgcataactaatcatataaaagtctaaaaagtctagcataggccgggcatggtggttcacacctgtccagcactttgggaggccaatgcaggcagatcaggaggtcaagagttcaagaccagcctggccaagatggtgaaatcccatctctactaaaaatacaaaaattagccaggcctggtggcaygcacctgtaatcccagctacttgggaggctcaggcagggaattgcttgaacctgggaggcagaggttgcagtgagctgagattgagctactgcactccagcctgggcgacagagtgagactctgtctcaatcaatcaatcaatcgaccaattaagtctagcatatactattatatacagtacataataattgataatggtaataaatgactaagttactgatttatgtatttactatactatacttttatccttattttagagtctatttcttctgtttatttaaaaaaaaagttaactgtaaaagagcctcaggcagctccttcagaaagaattccagaagaaggcattgttatcatagatgacagctccatgcatgtttctgcccctgcagaccttctagtgggacaagatgtggaagtagaagatggtgatattgatgatcctgatcatgtgtaggccttggctaatctgtgtgtttgtatcttaatttctaacaaaatttacaaagtaaacatttaaaaataaaacttacaggataaggatatgaagaaaaatatttttatacatctgtacaatgtttgtgttttaagctaagtataattacaaaagaatccaaaagtttaaaaagttgtcaagtttataaagtaaaaaagttatagtaagctaaagttaatttattattgaagaaagaaaaatatttttaaaaatttagcgtagtttaaataaacagtgtttataaagtctataggagtctacagtaatattgtagtccttcacatttactcacgccttgattcacccagagcaacttccagtcctgcagctccattcatggtaagtgccctataaaagtatactgtttatatatatatatatataatatatataatatatattatatatcatatatacattttatatatatatcatatatatcatatatatatcatatatatgatatatatgatatatatacacacacactttttttttgagacagagtctcgctctgtcacccaggctggagtgcagtgccatgatctcagctcacagcaacctccacctcccatgttcaagcgattctcctgtctcagtctcccgagtagctgagactacaggcatgcatcaccatgcctggctgatttttttgtrtttttagtaaagatggggtttcatcatattggtcaggctggtcttgaactcctgaccttgtggtcagcctgcctcggcctcccaaagtgctgggattaaaggtgtgagccaccgtgcctggcgtgtttatcttttataccatgttttttactgtaccttttctgtgtttagatatgtttagaacacttcccaaaaaaaatatacaatcgtccatcaggtatatgaaaaactgctaaacattactaatcatcagagaaatgcaaatcaaaaccaacaagaaatatcatcttacccggtcagaatggctattattaaaataacaaaaaatagccaatgttggtgatgatgcagagaaaagggaactcttgtaaactattggtgagaatgtaaactagaacagccattatgaaaaacagtatggagatatctcaaaaaactaaaaatataactactatttgattcagcaatcccactacaaggtatctacccaaaggaaaagaaatcaatatataaaagggataccagtactcacatgtttattgcagcactattcacaatagcaaagatatggaatcaacctaagtgtccatcaatggatgaagagataatgaaaatgtggtatatatacataatggaatactattctgccacaaaaaagaatgaaatcatgtcatttacagcaacatggatggaactggagatcattatcttaagtgaaataagccagacacaaaaagatggatctcacttatatgtggaagctaaaaaatttgaacacatggaggtggagagtggaaagatagttaacggagactgggaagggtgagttagggaagaagcagaaggatgaagagaactaggttaaaaggtacaaacatgcagtaagacagaaggaaaaaattctggccaggcatggtgactcatgcctgtaatcccagcactttgggaggccaaggtgggtggatcacttgaggccaggagttgaagaccaacctggccaacatggcaaaaccctgtctctactaaaaatacaaaaattagctggacatggtggtacacacctgtaatcacagctactcgggaggcagaggcatgagaatcagttgaacctgggtggcttgcagtgagccgagatcatgtcactgcacttcagtccaggcaacagagcaaagccctgtctcgacaaacaraataaaacaaaataataacccagtgaaaaactgggccaaatatttgaacagacacttcaccaaagaagacatatggatgaamtattagtatatggaaagatgctcaatagcattagggaaatgcagatgaagatcacggtgagataccactggacccctattagaatgactaaaattaaaaattgattataccaagtatggctaaggacytgaagcaattggaattttcatacactgttggtggggatgtaaatagtggaatggctgtggaaaataacttcgcagtttcttaaaagttaaatatggccaattgcatggctcatgcctgtaatctcaacactttgggagtctgaggtgagaggatggcttgagcccaacctgggcgacatagcaagatcctatctctacaaaaattggaaaaaaaaatagccaagcattgcagtacatgcctgtggtcctagctactcaggatgctgaggcaagaggattacatgagtctaagagttcaaaaccatagtgagctatgattgcaccactgcacaatgtcatagatgacagctccatgcgtatttctgcccctacagaccttctagtgggacaagatgtggagttataagacggtgatatcaggacaacagagtgacatcctgtctcaaaaaaaaaaagttaaatgtgtgtttactatattactgyatgattcagccattctatttctatttacacaagagaaatgaaagcaaatgcaaatacttgtgcatgaatgttcagagcagctttaattatagtagcctcaaactggaaataagccaaatatccatcaacatgtgaatagttaaacagattgtggtttatgcatacaacggaatagtattcagcaataaaaaggaatgaaccagcagtagacatgaattttgaaataattatgctaagtgaaaaaagtcagaccaaaaagagtatatagtatatgaattctgtttacataaaattctagaaaatataaattaatctacagtaagtgcaaaaagagaggataatggttatgttcattatcttacttgtggtgtgggtttcaggggtatatacgtatgtcaaaacctatcaaatataccctttaaagatatgcactttattgtgtgtcagttatacctcagtaaaaaacatcaaactttaaaaaaaaaaaaaaaagactccacaaggttgcttcagttatacataagatacaatacattctttagggcaaaagacacaasaaataaatagtaagagaaattggaaactataaaattccacagagatttagaagacgtataaactaaataccatatatggaccttatctgaatcctgattcaaacaaatcaaatatcaaatgatattcatgagggagttggagaaatttgaagactggctggatattagatggtatttaaaaattattgtttaaatgttttcaggccaataatgktattgctgctgtgttaaaataaaatgtgtccttatctcttaggaaaaaattttgtacccttagtctagcagggggagaaaggatgtattccctgtatagctgaaaatagtgagcagaataacgttaaagttattttgagggtatataacttcctcttggcttgataaaacataggcttgactgttagccactgagtgccttttcctgccaaccttcacttgtcagaaaggcccctggcatcttgggtgttgtctttgttgtgagatttaccagggggcagggcttgtactctactttgtagaatgagctgcttctcagacaggtctacctacacactgtattaagacacttgatggacttgcaggctctcctttagcctcaggagaagctttggcatggcccagtgagatttcagagagtactcctggtccccaaaggccatgataaccacagcgtacatagataattgatcacactggatacattatatgtttatattatatataatttctgtcatttggaatactagtaggtagaggggttttggtcacatatgacctcaatcaccctcttgcctttattttcagtcctccctccctggaaagtacttggtcatttttgagagttcagaatggactcttctacctatgttagtgttgtacattgggttgccacctttcaacattccacagatatttactgcatcttccaagcactattgctgaaaatagagttggttaaattgcatcccctacccaaaaggattacacagcataggtggtgacagacctaccacatggtagcaggtgattgtggcgctaggtgcaaaggaagggcatcttccacctggagttagggaaaattccctggaggaggtttagccaggcacagtttaggcagcatatatgcacagaaagcagcatgggtaaaacccggcagtggaggagaatcacgttccagtgcacgggagaaacataaggctgacaagatggggaggactcaggcatagagatgaggttgataaaggagaatggacccacttgccaccatgagagtatgtggagtgaattttccttctctgcacagccaggcatcacccactgctacccacagccagctgatctgtgcaccgagccataacccgaaccatcttctttccaaggacagataatttaaacagtgcctttattctccatctgaatcaactcatgattaagtctgaatgaaactttggtcccaagctttcttttttcattaagaaaagtaaatctttcttccgtgggtgtattttcactaaaacaattcacaattttcattcaatattacttgcatataaatcaaattaagctgaaacagtttgtttagtaactttaaatagaaattaatagtatcttcctggtttgctgcagtagcactaactacttttgggccttgcacyctttcccctttcacaagcattccttcttcaaactacaattgtccttcctttgttgatttcttcctttttctcctgaaataacaacataaccttaaaagctgacagagacactataatatatcaaaacttttaactatctttagtcctgtgataacacacctctttatgaggaaaaaagtgtgcattatataaaaaggaacttacgtctgtagatttcattgttaataatacactgccaaagtcatccgtgctcaagagacaaaatgttgaacccagctgtttttttcacactcctttacttgaaagaatgtttgggaattagatataggctggtacaattgtgtgttatctgtggattttctctactttacagtgtggttctttaatcatgggtacatctttgccttgtgtcacgtgctatgcaagttgtcacagagaagattctcaaaggcttgatggatgaatttgtgtagtggatgtgggtggttttaaaaagttcatttggaatttttattcctattttgctgatttttgacagaaaatgattcagcacaacatatgactagtcagtagctttggacatacctaaagcattcattgaatatttaagaatttaagcctgcatttctcttaagatgttggatgtattcccagttgtaaatgcttgttttcccaacgtgtaagtaagtttcccaacaaacttactaatagagattgaattacatttaaattctgtttactgttattgagacagttagttacttctaatcaatataacttaattattggcctgtatttcagcaataatccacgtgtgtttattttaaatcgaactttgtcagttaatacttatttagttaacaactatttagcacttgtttattttctgtatttaacaaacacttatgtcatcctttctgtttgccacgtagtgctctaagtgccttacatgaactcatttaattttcataacagccctaccaggtgggtactgctattctccctattttacagatgaggaagctgaggctaaggctcagagagattgaataacttgcctgagatcacacagccagaaagtactagagccagtttgcctcagaatccatgcacataaccaccatgccatgcagcctccattcattcaccttatcttttattgcgtgtccacctgtgttgggtgttgtactcgatgcaaggatacatgggagcagaagtagcctctgtggttctggaatagacaaacactaactgaatcccacagagacaaaaattaccaaggtgacatatgccactcagggggacgctcccagtgccatcagtgtgaacagtgtgacattctaatgcagacagagggtccagagaaggtttttctgagaatgttaaggactgagctggaggagaatgatgaggtacttcttaagttaaaggtgaagttcgctggagtcaggggattcagaaaaagaacattcttggcttaagaaagtgcatatgcaaagactctgtattggaagagaacgtggccactgaggagtgaccaggaggcacagagcaaaaggacatgttgcagtaggtaaagcaagagacacagaaagaggcaaaccatgacagccttgcaggccatttgtgaaaaatgtgctttttaatcctagagctgtgagaggatgagaatatatgcgtccaccctgcagcacatacacacacacacagagagagagaagagtggatgaagagaaaccagttcagagggagttgaagcaatatttttgatgagagggtgacaatggcaataaacagaagttgacagtgaaggtataattagaaggtaaaattgacctggtaatggattgaatgtgaggaagagagagtgctacccactagaaagagagagtcctgaaggagggccagatctggggaacagacaagtttaccttcacacttgctgagtttgagagacctatcagaatacaagactggagagagacatttatgagtgacctgtaggtaataaatgaaggtatccttaggggtaaatgagatcacagagagagtgagagagacctgtaaggagagacgagccctgaggagccccaggctttgacagccttacaaaggagaatcggcttacaaagaagttcaagaagacccaagaaataggaggaaccagagtagtttctgtcacagaagacagaaaagatgaaggatccccagcattaagtgttaagaatttagtattggagttagatgaagactgaaaaatcacatctgtgcagttcagcaatgtagatgtctgggagaatggctttgttggtgatatctgggagaatggctttgttggtgatatctaggagaatggctytgttgaagcagtggtattgacaactggattggctatgcattcaggagagactaggagaagaggagatagaggtggctagtagcaacagtcctcttgtgaatggcaaggacccaggtaaagtgaggttgaatgtataagaacaaggagagattatttgtcataataacaaggggagacaattgagacaagcagccctgggggagcatacatgccctgtccagaagggagagtggccatgccttctaatttctcacaagaagctagaaataggaattttcatgtttgaaagattgttgatggctgcattgcttgcaactgcaaaatatggaaaacaaaatattaaactctaaacaaatattctactctaataagtagatttctttttcctgatacggtagcattctgaaactactttctgtgtatactagcattgagcaataagtacatatcttatagataatggaagtcacgcatctcactgttggagaaagaagctacaaatgtggacagagagaagttacaaatgtcctgtgatatgggattggaattaaaggtatcagggtgaactcatgaatagataagataaaaaggatagatacagtgggtgggtcggtgggtgggtagatggataaatggatggatgggtggatggatggatggatagatagatagatagatagatagatagatagatagatagatagaaaatgtgtgtggatatttatatagatacacatacaacgctatcttagccctgtctgctgagagagcctagaaatagttgtaccccagtagccataatataaaccagcatcctaattttggtttctaagtaccattttatactaaaagagctccttagaaaaatggttgaatctggggctggggatggaaaatacaagataaacttggaacattttgtggtaccaaaaagtaaggaagtgttcaaagaatggcacatgtcaaagggacactacagccaatgtaaggtctcccaccaataaaatctgaggacaacttgaacataaaaacaaataataagggattataactcatttaatacatttacagtctatgagtctaaactgatttaaaaccaataaatatattggttaattaaatgaacaaacaaatgcaaaaaaggggaaggctctttcttacagtagaatgccaatgcaggaggaatagtgtaatcagaaaaccaccatttagcaaccatccaaataattgatttatgcaagaatcactaatgaatcttaatactagcaggttgaaataacaagatatgtacacggtcaccaagtaactcctgacaatagactgattaattccacaggaaaaaatatctttacagmtgagaaatgtagcagatacaaccttaaccaagtgatcaaagctaacaccaccaatatgggacataatgacctcatgtatgttgtgatatgatgcacygaggagggtccaccccaacttctgtgctggttctgccagaagggcgtaccctgtacctcctcctgaggaaacatcagacaagcctaaagtgagggacattctgcaaaataattggcctatacaaaatgtcagtgtcatgaaagacaaactaaagagctattccagaagaaagcaagctaaagagaacccaggtctgtgggcccaaggccagtgtctctctcactgccttgtgctcagagaggcaacagtaggtttctatgaggcctcctcaatgggcaagtcccaaacacagatttggtgagagcagagagtctggtagactagcagaaagtagggaagtagtcagggtttgatcgtggagtctgaaatgcctgataaggaatggggactttaggtgaaagggacacattgaaagttttttttttttttagtaaaatatcataaatttatacatacacatctaaaggcaaattgatattttaaatttcatcagtctttacagttgctattctagcatctctttttattattattattatactttaagatttagggtacatgtgcacaacctgcaggttagttacatatgtatacatgtgccatgttggtatgctgcacccattaactcgtcatttacattaggtatatctcctaatgctatccctccccccttcccccaccccacaacaggccctggtgtgtgatgttccccttcctgtgtccaygtgttctcattgttcaattcccacctatgagtgagaacatgcgggtgtttggtttttttgtccttgcgatactttgctgagaatgatggtttccagcttcatccatgtccctacaaaggacatgaactcatcattttttatggctgcatagtattccatggtgtatatgtgccacattttcttaatctagtctatcattgttggacatttgggttggttccaagtctttgctattgtgaatagtgccgcaataaacatacgtgtgcatgtgtctttatagcagcatgatttataatcctttgggtatatacccagtaatgggatggctgggtcaaatggtatttctagttctagatccctgaggaatcaccacactgacttccacaatggttgaactagtttacagtcccaccaacagtgtaaaagtgtacgtatttctccacatcctctccagcacctgttgttccctgactttttaatgattgccatcctaactggtatgagatggtatctcattgtggttttgatttgcatttctctgatggccagtgatgatgagcattttttcatgtgtcttttggctgcataaatatcttcttttgagaagtgtctgttcatatccttcacccactttgtgatggggttgtttgattttttcttgtaaatttgtttgagttcattgtagattccgggtattagccctttgtcagatgagtagattgcaaaaattttatcccattctgtaggttgcccgttcactctgatggtagtttcttttgctgtgcggaagctctttagtttaattagatcccatttgtcaattttggcttttgttgccattgcttttggtgttttagacatgaagtccttgcccatgcctatgtcctgtatggtattgcctaggttttcttctagggtttttatggttttagatctaacatttaggtctttaatccatcttgaattgatttttgtataaggtgtaaggaagagatccagtttcagctttctacatatggcaagccagttttcccagcaccatttattaaatagggaatcctttccccatttcttgtttttgtcaggtttgtcaaagatcagatagttgtagatatgtggcattatttctgagggctctgttctgttccattggtctatatctctgttttggtaccagtaccatgctgttttggaaagtctttaaccaactcgctcaccatgtgcttactaggccatgggaggagccttagcaaggaatcttcagacaccctgtggaaaagcaactgctagaatctctcagcaacctgattctcagcccagatcctcatccagtgataggacttgctgactctgagcattcaggcccacttcaccagaagagggatgcatgcatttrgactacctgcctgcaacctggtccaaatgcatactggaatgcatgcagaatacagggagaatacaactccatttgcctgcagcctggtccagcatacmtttcccacctcattgccaaggtgatcttgtgacaccttgtcaaatgcctggataaggttctgtattcatggctgttgcttgcctgctcatctggaaactctaccgagtaggaaaatgacttattctgagtgaactcttgctagccatgagcagtcctctctttttcgaagcaatcagaaactatcagttttagacttggttccctgattttgctctagttcacgttcagagtyccaaactatggtctccagaatgtatcctctatgcatttttttttttttttttgagacggagttttgctcttgttgcccaagctggagtgcaatggcacagtctcggctcaccgcaacctctgccttccggattcaagcaatcctcctgcctcagcctcccaagtagatgggattacaggcatgtgccaccacacctggctaattttgtatttttagtagagacagggtttctgcatgttggtcagtctggtctcgaactcccgacctcaggtgatccgcccgcctcagccccacaaagtgctgggattacaggcgtaagccaccacgtccagccctcctctattgtttttttatgatcgactcaacagatacccccagaaagaagagtactagttctcttgayttgtggagcagaaatgggcacagatgtgctgtcagccaaatctctgtcctgtcacgggcaggayacaggaggccatgcctggcagcctgccaacacaaagccccccacccagccctggctcactgcccagctaagcttagctctcacttggttgctcctgggtcttgggattctcttctctatctctgctttcccttagatgccacaacccacaaaagaaagaactgcagaattttggtgaacttcagagggcgcatgctcccctccttgtgaccatggtgtcacagaaagagatcactaggtttggagtcaaattttggtgtcaaactcacttgctgtatgaccttgaacaatttaccccatctctctagcttgtgtttcctcaattgtgaattaggaataatatatcctcatcatacagggttatttattttaaggattaaatatgatgatctacataaactgtctagcccatgcaatatatgtttggtctcttttcttgcatcctgagtgggccccaactcaacacttcgttaaagcatctcctattcctgtggccatgaccagacaggttaacataatactcttataactatgcatggaagaaagaaagcctcaagacmgtttctcctgttttcttttagacctttcttgattctttatgatgttatttcctaacgatcctgccccacgtgcttgtggcatcccagattaaattgcatcgtaaagataacaacccagtccaaagccttgtccttttcttaacaccmccacccccatcctcaccaactttggacaaccttgaggagaggaaaggtattttatggctcccagtttttcctctcagtgacttgcattttaaattgaagtatatttattgtaatatcatttacaccagcaattttctgtgttaaataaaaatgtcttatcagtgtccaatgtgatgtatatcacttttgctaccttggtgattttaatttgaattctctattrcacagtgaatatggagagaattaaatgcatatgataaggtggtgcagtacaatctgrgataagggggaaattaagctatgatrattctatttaaggcagtgacagccccagttctgggtcttctgggctttaggagataccacaagagcatgagtaaatrttatataagctcagcatgttgctttaatcttgggctcacacggatgtttattaaycaaatatagtgattttaatatatattcatggaaaattctccagcctggtctgaaaaactattcattttcacatttctaacttaaaagatttttctggagaagatagwtttaagaatgttgaattactccaacaattgttttgaaccaagataattttttttcatatcatgtgaggcttcaaggatttgaggctacacatgttagattccaaattcttttaaaatgctttcctgatttaataacaaacagcattttccttctttttaatatgtctatcttgagatatggtttaaatgaaacagatcttgaaagggtctctgagaaggaaattttcatggcatgtcctctagcaccagacttgactgcaccaggtcaggggataaacagcactttgcagatgagtgtgctttattttgaggccctcagacacttcatgagacccctgtattctggaattcactgcctcactactgctgatatacacaatgctatgaaaaatggggaaccattactcatatatttgctaattatgatacctctcacctcttcccctcttttcccatcctcttctcttttcccccaaccaaataaaaaactaaaacaaatacatatatttgttttattttttgcttatttagttttactgtcttattccttaatgtgtgcacctgtagtctcagctactctggaggtttaggcaggaggatcrcttgagcccaggagttctgggctgtagtgcactgtgctgatccactaagttctgcatcagtatggtgacctcctgggagtgggggaccaccaggttgcctaaggagtggtgaacaggtcctggttagaaacagagcaggtgaaaactcctgggctgattaatagtgggatagcacttgtgaatagccactgcacttcagcctgggcaacatagcaagattttgtctcttraaaaaaaaaacaagtaagttgcaaaccacatatcygacaagggactagtgtttagaatatctaaagaactttaaaaatttaacaattaaaacacaatcaggaaatgaacaaaatacatgaagaacaatttcacgaagaggatacacagatagcggataagcacatgagaaaatatttaacaacattaacaattagggaaatgcaacgtaaaacccacaataagatattactacacacctgccaaaatggctaagataaaaaatggcaacaccatcaaattttggaaagaatgccgagaaactgcacctcttataattgctggagggaatttaaaatggcacagccactctggaaagcagtttggcagtttcttgtaaaactaaacatgcaattgccatatgacccagcagttgcactcacaggcatttatcccagagaaatgaaaacttgtgttcacacagaaacctgtacacaaacgttcatcacagtttcatttacaatagccagaaactagaaaccacccaaatgtccttcaaggggcgaataattaaactgtgatacatccataccatagactactccccagcaataaaagaaacaaatcattcgtgcaacaacttggatgatctccagggaataatgctgagtgaaaaacaccaatcctaaaaggttacatactatgtgattcaatatctgtaactttcttgaaatgataaaattgtgtaagtaaggaacatatcagtggttaacagggattagagatggagtttgggagagaggagagaagtgggtgtggttataaaagggcaacacaagggttccttatagtgatggaagtgaagcattctgtgccttgactgtggcgatgattacatgaaaactacagatgggatgaaatttcacagaactaccacacaatcaaaggactgtatggaaaatgagtgaattttgagtaagatcagtggatgacatctatctgaatatcctggttgtgacattgtggtataatattgcaagatgttaccattgggggtaactaggtaaggggtacacgggataattctgtattatttctacaactatatgtaaatctacatttatctcagttaaaaaaatacaaaaagaaacaacatatttgattaattaaatgttaattaagcatgaaagggtgaacagcggaagtgacactgtccttcactggacttcttccagtgcccaagttttcaaatagccaattcatcctcaaaacagtcgtgtgaagtaagttttaacattcctattctataggtacaaggaaacttgaggactggaggggtaataagttttgcaagtgttaggtaaagccccagtctcaaagagtgcaaagccagtgccctcatccttggcaactagggcgccccttctgagcaggccatgctgtctctgctgctgtcgctgctgctataccagccagccaagcccaactcttcacttcctgaggaggcagctccagggttaatatgccaaggccagtaaccatctttgtcttccaaatgggaagcgatgatcattcagagtggagaaccagcagttggcttctttgctaaacagaccataaagagaaaccatgcaaagagcattcagaaaacccaggatgcctcagataaaacagagtgaggtaaaattcccagcagcacaaagacattaattaaagtgaattgaatagatgtgtctgtataaatattcctaaagatggggttgtcaagacggagttaggccttggggaaatttatgagttactgataattatagggaaaataaatcttaaaaggacaaaatcatttaagaatagattttataaactaatgaaattggtggcttacaacgggtagatgggaacagaatagaaagaatggggaaatggcaaaggggtagaagataggatgagggcagagagacccttctctgagtgttcctctttatatagctctgactattggaacaatgggatcacatgccagaaaaactaaatatacaatgaaagccartcaggaggcaaggggaacccaagatgaaatgcaaatagtaacaaatgagcctggctctattacaaatgaatacatagccacactgagggcagtaggaaagaaaataacctcagtaatatggaaagcagcattgtgattggatactgcaaggctaaggacaagaaaaggtgtacacaagtcctgttcactagttagtaatttgttttccacaggggtgtggatgagcaattttgaaactattttatgtaagtactaagattgagtaaatgattgtagataatggagccaggtttcttaagttgaagaaaggaattatgaataaaggagtggaggctaaaataaactctttggtgttgtattggaattggaggtttcagtatgaacagttttcaatatgtatacagatggatagttttagaaataagtrcagagtggtgtgtgtacacatttgaggatagatatagatagttgcagatataattaatataattatatatttatataaaattttctagctttgccttctaagagggcctagaaaccatgaaaccccagtagcaatgagtacagctagtccccttggtttctaaatgccattcttcaataaaagaaaccagggctccttggagaaatggttgattccagggctggggcagggagcttacaagataagcctgaacatcttgcagttctgaaagcaaggaaatgcttaaatgatgggagaatgtaaaaaagccacaggagccaacttaaaggagctttcattgggcaaatctgggataatttgaggaacaaaatacataatgagaagggattacaccccacagaataaaataagtacccatgaatccatattgacaaaaataaatgattagatgaatacagaaatgcaggagaaaggtcaatccttccttacggtagaatactaattaatattgtagaaagaatgtcagaaatagaaaataactattttacaaactaatttaacagtaataattgttacagagcagaatcatcaatgatgctaaaattagtaggtgaaatatgatgggaatcaggatatttacataatctcaaagtgttttcttacaggacacatattatttacagatacgcagggggaaatactaacttatgtggagaaatctagaatataccactcaaccaagtatcaaagttaatatgaccaaaatgaagacaaatcaacatcatgtaccctctgatgtaggatgtattgagaagagcacagcatcagttctgaggtattcttgcctaaggtgaataagcttaatctaatcatgagaaaacaccaaccaaactgagggatgttctacaaaataactgaccagtgctctttgtaaaagcccaggtgctgaagactgaggagctgtccttgattagcagagactgtagatacaggacaactatgtgcaatgtgagatcctcgattgaactgtggaacaatagggaaatagaaatgatgtctctagatcagtgttgaattaatgttagtttcctggttcagatcactgtaccatggttatttaagttattaacattagtagaagctgaataaaggatatatgggaactctttgtactatctttaaaacactcataagtctaaaattatttaaaaataaaatatgtagaattacaaaggaagacaattttcttgaagtcattatctagatatttaagtaaatttgttacagaaaaaaaaaaatcacatgaagccaaaataatagtaatgttatatgtgcatggctctttaaattttacaaaaagaattttacattgttatttaattgccaaaacaatcccatgaggttggcattattgccccctcccccattttagggacaaagaatttaagagatgcgtagtatggtaaaaacaagcaccaaaaacataaaaaaaaaacttcaaagccaggcaaatgggcctgctttcaaatccaagcactaccatttccagcttgtgccaaaccaattaagaaactttagagaaattctggcaattggcttttgagatttttgtgagaatataaaccctgtaaacagcacagagcctggcacattctgggcacttaagagaaaaggaagatgaggatgaagatgatgatggtactttagagctgaaaagcatctttgagttcagcccagaactcccctgctcccagcatagagttgatcacctcaaaagcggttttggccccactgtggacattgtgaagtgggtttataccctcacagattaattctgtttgagggagcccaacataaaaaaaaatctgtgcctgtccatatatgtagaatatacatatgtttgcatgtatttgtatattgaaagagttaacaataggtgcattcacaaaccaataatttctaatatcaagatgtctaaggaatgaataaggatgaggaggaaggactggtgatcacctggtagcaccctttgtgccgccctcagactcatcgctgatctgcctccagtgggtcttgctatcggtggatgtgcttgaaaaactttgcagcaattcgaacctgagatattttttcttgagacgcactaagaacttgaacacacctgataagttatgggataaggatcaggagggctggcatcgccccacccagtgccctgcatactgcagttcctcattgcatacttactggcatgaattaatgaggattttgctgagagtggttgttgctctgccaccacattytgcaccacactgctttgcacttgttggtttttcgtgtcttttttccccccttagatttcagtgaacttgcatttcctctgggactaggcttaaaaatcagcacatgagataaattgcatataatcaacaatatccttgaacatcccttaaattacttcatgcaagatgatrtatttatacaactgatgtacacacactgcatctgtgtgtagacaatgtgcagacagtgtgttaaaakgtagagtgttggttaagatcatgggccctggaaccagactacctgggtttagatcttagtcttacaattaattagctttgtaagcttaggctaattatttaacctcttcatgccacagtttgttcattaggaaaatgagaatgacagtcacactcctttcatacaggagttaaaaggattaaagagagtatatgtaaagcctttggcacaattcctgagactcatatatgccactctttattattattgtacatttatatatgtgcaatatatacagcaatgcatacataaaatgtaattttaaaatagctcagttacataaacttgagcatatagttgagtaaattaaacacttgtctgctgtaatcccctcccaccaacctgaacattcctcaaagcagcaataaaacttaattttgtgctgattttaaagcccctctagttgctacgtggcttgcaccaggggctgctcccttacaactagctgaagcccagtgtctacatttatgaaggcagaaatgaatcttccaatgagtttagctgacatgcagtcgtgtgtgacatctttgcctcctgtcatagaggtaattgagggacccctaccttggatcagaagtcttatttaaactagaccttagacctcaggattctgctatgataccatgtctggttccacttgatggctattgggatgccatagtaactaggggaacatatgtgcaattatatctagtgaccaacctttgaatatgacctagaataatgaaactatgctttctatctcttcttctttcttcatctggatgtggaaaggacagtggcgacagtgggtgcagtggtggtggctgctttaacagcagtagtggtgatgtttgcactagtggcagtggtggtagtacagatcatggcagtaatgatggcagcagcattggttagttggagtgtggtggtaatgctgttagtgattattggcatagcaatgaggcatattagtggcagcggtggtaatatggtgttggtcatagtgaccgtgatggcagttgtctcgctgggcacggtaggatggtagtggtgctattaatgtgatagtggtagtgggaatcatcgtgttggtcgatgctgatcatgatttgatgatggtggcactgttggtgatggtgaaggasattgtgatttccgtaatttaggtcagtgttttaacctgaatttcagaagcaggaagttgatattggagaaaatgcccccaaatatctcatatacaccccaaattgtaaaatattttcctaagtctgggtaacatgggcaaagcatccaaatgaaagtaaccaattcccgtgatataatttgctgatagagctgactgagtatttcacaaagtgtggtcctgtgaacactcatccagcagagggatccataaaaactaaacaagcatgggaagcccagggacttctgtccccttcttggagaattactgtgcacattaagggctctcaaaggatccgcaatctgcagtaaaagtctgtttcactttgtttgccctcgtgtttcccaaacatatttgatcacttaaccctttttctttggggaaggtaggtgcctatcaatcattaggtagaacagttagagaaacaatataaacaacacttgaaataaaaagaaaaataaaacttgaaaaaagtttccccacagggactaattttcaggtgcttagtgagaatgggcaactttaggttattttaaatgtcttgtattgcaaagtggaaaagatcatcttaaatttacatratcagaattgtgtacaaggaatccattagacatgtaaattaagagtattattagaaacaaacctcaaaaatgaaattgcattaactacatcaaacatttacaatctaagaaacccatatccttttattctatacttataaaattagtaatttgatcattatagaaaagtagcccttgtttacgttggagcccagtgctaagttaataaaataaccttggatgactgaaaggaagtggtctctctatagccaatgccaatctgtggttctccactagcacataagaattgcctgggatgcttgtgaataattaaagtgcctaaacctcactgccagtaagcagatttggttacaatctggaatttgcatttttgtcaatgacatcaatgcagacttcactttgaaaaataccagaaggaactgacattaatatattgtcttctatcctgttcattctacccaatgtcaattttaggaaaaaatcttgtttcaagtttcctgttcctgtagcagtttcaggagcagcccaggcaagggaggttgactggtgggccaagcaggtctcttccctaatacaatgctgttaacctcaagggcagagtccacagctccatcagatgtgcttaaagaattaagaaaatggcttcctgatttctacagtgattccttcccatttagtgagtaatcattagtcttaacatgaataatgcaaaaaaggcagctaagcagtttaaattttatccataaaattaagccctgtgtttcaccacagcatttaactccatgacctattttattgaatcccccgcatatcttggacagcttccttgagtgtaaattaccatgaaggtaaattgaaaatgtatcaagaaatgggcaaggatgttaatgcagaatcaaggcatcatcgagcttcagttgttatgaagattttttaaagtatctttccaatacagttaaagtgaaaagaattgatttgattaacaaggctttacctttcttaggttaccatctgccttcaacattgtaggtgattcagtttcaatgtcccatcctccagaaaacgtgttccaacctgttcagagcttctttygggctcctgacacttccctcatgtgtttctgcccagcagtgactacccatctggagactgtccaactcccttgggactttatcccccacccccaaccccatcctgtgagagcagggctcccatcatatttatttctgaatccacattgctggtacactctctggcttgaagtgtgtgctaaactgtctgctaaagaatcagtgtgttcccctcttgacttaaaagcaggaaaggaaatgttatttgtagtgaaaacaaggaggcaggtaggggaaaattcagattctactgatatttctagtgtgctttccaaccgtgtatctgcccctgaactatccctatattagtcatttgagtcttacgccatgcctccgaagtgtgtggtattatttattcttattgcacaagtgaagggaatagggtatagagaggttaagtaatttgccccaggtcacacagctcataagtagcagaggctcacacttaggtctgtctctgcatgctggacctcaaattcctgttactgcaaagcctggcttgaaaggacagttgaagtaacagattgcccaggctcagttatttgttaatagaggacagagctgctttgcctagattccacacatggaggatgtccagtgcagtgttgagcagcttgccttcagcaggagcagactttatgcccagccagaactgcctgattacaacctgtcctcactgcctgctccctggctgcctttcttcctatgtgaggttcctgccaggtctgaggatcccaaagagaaggtaatgagtttttgaggggccatgagaccctagcatttgggagttctggtgagtgctttttaaaacccacctactgcgaaaagattctggtcagtgggcagagagacacagctgggtgttaaatgatgggagacagaggcttgcaaaaaaggagattctaatgctccaaaagcaggcaggaccccaacggagcaccccttcctctggaagctatgtaasggctcagacacacagaaggtgctgccagccaaccagtgccacatgtctgagactcagagagatgattgcagagaaaggaacaggaaaaagaagaaacaaaaacatcctttctgccaggtgtggtggcaggcatcaatttcaaaggcctctttgtgactggattgaaaaagccaggagcagggagaagaatagatccaggtggcaggcctataatcccagcactttgggaagccaaggtgggtggatcacctgaggtcaggagttcgagaccagcctgaccaacatggtgaaatgctgtctctcctgagaaatacaaaaaaaatagccagcgtggtggtgggtgcctgtaatcccagctactcggaaggctgaggcaggagaatcccttgaacccaggaggcagaggttgcagtgagccaagattgcgccattgcactctagccagtgctacaagagcaaaactccgtctcaaaaaaaaaaaaaaaatcctttctatccaggaccaaagggaagtttaaaccctatgaaatattgctgctttgttgtttactttgccaaattcttaagaagttgcacacaaagaaagcaggacatttggaaataaagaaagagaaacctcatactgacaagctcaggcactgaaagattctgaagaccaaagtgggctttatagtgtgcaggaagagtttgctgattgaaaggaagactcttcacacacaaagaagtaagagaaattgaagccagacagaagagcacatattccaagggcactgaggagagagggcagatgatcacacttccagtaatggccaccgtggtcccagctggccgactgtgctgccagagggctaggctccattttggagtaatgggaagacctggatctattcttctccctgctcttggcttcctcaatccagtcacacagaggcctttgaaattgatgggcacttctggccagcaggacacagggcggagcagtaaataggtgttctcaaattcatttggatcacacagttgaagagctctctggagaaacaaaaaaagatgcaaaacattaaataagcttgaagactgataaggaaaataaagacaatggtgctaaaatggcctcaaagtctcagtagccacagccagatcatattttccaagcttcacttagaggcgaggtttaatcacaacagtctgtttgtaaaggcatgcataaccatttagttgagattctggtcttttttatgttttttcttaacatgctacattaccccaagcttctttgttacttgattcttaacaccacttgtgacagttgctcctgatctcttagatttttgtctttcaaggcctttgtttcccagggtgcacttcagccaacacaaccaagggaagaagaaaawgggcaaaagtgtgcatgaggtggtaggggccagactgtgcttgtgcccacagaaacaccaagcttctcccagcaaaagccccagaactgaagtctgcaaaagggaagaggcaaattagtaatcattctgtgctacagagcagccacgtctgagcattacctaatgcttttctcaattgttttgacacatgtagttttgttttaaatatgtatggtaatttttaataaaatgctgataagtgtgccaagccattctctgtggaaataatgaagtctttacagtttggaatgctattaagtctttgcttcacggtttgtgaggctgctagcattttaagcagcaataacattttattgaggcccagtcttgctgagggggatggtcagctctagaaggggcagtttttccatcacaccttagagtgacctggtttggggctacacatagatggaggtggagctacttagtggtacccttcttagccctgcctggcttagctactacctctccaaaattcactgtccatcatcagtacagtgcagtagaaaaaaaaatatgggcaaacctgggtttgaatctcaagcctaccattttcaggtagtataaccatgggaaaaatcacataaactttttgaatctccattcctgttccagttatcagtatataacaaaccaccccaaacttactggtgtaaattgaccattctgttatgctcatagattcagtgggtcaggaatttcaccagagcacaactgggtggcttgtccctgctccatgatacctggggactcagctgagaagtcttgaagactgtgaccgagtggagtccctgcagtcatccagggactcttcattcatgtgtctggcagttggtgctgggtgttggacattgactacagcacatgcatgtggccacactgtggggtctttctgagtaggctagtttgggcgttttttagaacccattcatggcagctgggttctaaaaccaagtgccccaagaccataagatgtaagtgcatggcatttttatgacctaacctcagaagtcacaaagtatcacttctgccattgagtaaagcagtcacaaatacctaccccagccccctaggaggaacacagacttcacctctcaatggaagagtggccaggttctagaagagcatgtaaaccaggagatgagatgatcctgtggccatgttttgaaaagaccatctgtcacaattctctcctctagtgagcctaccaggccagagaatggagggagtgatgattgccaagcacaagctaagtgccatgagctgttcatctgttatctaattctatttatttaagtcttaaaatagtatccacacttttttgtttgttttcagataagacattatattggtcagcttcagctgcataaaaactacaaattatcaacggcatacaagaataagcagtttatttcttgatcacagatcttgagtcagctgagacagatgtgttcctcctctcctattctgaggtttaagagagttagcagaggaagtggctgccttatgtattcttctcatgtagatagcacaggcagaggattgcaagccccaccaagcaagcaagctttaagtttctgtttatgtcccatctgctactatcccattggtcaaagcaagtctcatagccaattccaaagtcaaggggcagggaaatacattctggcctttgtgaggctgtggcagagatgtgggtgtataatactataatggcagagtgaggaattgggagcaataattcaatctaccatagctattttctagcacaaagaaaattgaataaggatattgtggcgttacagctagtgtttaacaatataatcttaggtgcaaaatacccatataaagtagtaggttatcaaattgctaataaaagaataattcaacaagaccaggtagcatttatcctaggtattcaaggacaatataccataaagatatctattaatataccacattactaagacaatatatttttatgaaacttaaatcatcatctcaatacacacttgagtcattcaataaaatccagcacctacttggggattttttttatgctctcagtaaattagaactgtaaggatccttccttagcatgatgcataatggcataacacttcaaaagcatccccacagaagcaagggaatagaaaagaatgcctrctcaccaccattattttccaatggtatcagtcaaaaataagaaatatagttatagaaaggagattcagttttcattacttgcaggtggtgttactgtgtccttagaaagtccaggagaagcatttgaaaaactattagaactaataagttcagtaaggtagcccagattcaaaataaaccaatcaaagtatgggatttcctatataatggttgtaatgcaatgtaataaaaatatatatatatatatatatatatatatatatatatatatatatatacacacatgacaaaaatatagtggaaaaaagatcccattcacaagatgaacagccaaggacatttgttactaggactaacctgaaccatatacatgaagggcaccaagggcagcaggcagcagctcggcctgctctgaggctggactaaatggaaacatgaccagctcctcacaaaaacagtcatttattgattggctttccggtgaaaatgccaatgggtggatatttttctttatttgttaacttgagaaaagtatccagaggctctcccagaagactaaccaggtgctcagaaagctttcagagatatcaaaaggyaattgtttttgaaagtgattaaatgagtgtgatactgactccagacagcataatggaacatgactctatataaaaagataatataaggtaaaaacaaaaaataagtgggagtcagggaggttatttagtaaaagaaaacaacatagtcacttaagtatttggaagggaaaaaaaagcagtttgatttcctaccacatatatktcacttagtaaaatactaaacataaaacctaaatgtggagaattccctgtcaatggctgtttcctttgacctgcacctacctcctggaactacacaggcagtatatttccaggggtagagaaaaaaattatggtaggcctaaatgttgcctttatcctttctccgtgagcaaagtaattaaacagaacctccccaggctctgacagggccacccagcagcccataagggacagatagacctttctggaaaaggctgactcgtcagagaaaaaccataggtcatacgaaaagggactgcagttccaaagtagggaccaggtggcagattcagggcaagtggctctccatttaagaatataaaattttgtaggttgcctgttcagtctgatggtagtttcttttgctgtgcagaagctttttaatttaattagatcccatttgtcaattttggcttttgttgccattgcttttggtgttttggacatgaagtccttgcccatgcctatgtcctgaatggtaatgcctaggttttcttctagggtttttatggttttagctctaacgtttaactctttaatccatcttgaattgatatttgtataaggtgtaaggaagggatccagtttcagctttctacatatggctagccagttttcccagcaccatttattaaatagggaatcctttccccattgcttgtttttctcaggtttgtcaaagatcagatagttgtagatatgcggcgttatttctgagggctctcttccgttccattgatctatatctctgttttggtaccagtaccatgctgttttggttactgtagccttatagtatagtttgaagtcaggtagcatgatgcctccagatttcttcttttggcttaggattgacttcgcaatgcgggctcttttttggttccatatgaactttaaagtagtttttccaattctgtgaagaaagtcattggtaggttgatggggatggcattgaatctgtaaattaccttgggcagtatggccattttcgcgatattgattcttcctacccatgagcatggaatgttcttccatttgtttgtatcctctttcatttccttgagcagtggtttgtagttctccttgaagaggtccttcacatcccttgtaagttggattcctaggtattttattctctttgaagcaattgtgaatgggaattcactcatgatttggctctctgtttgtctgttgctggtgtataagaatgcttgttatttttgtacattgattttgtatcctgagacttgctgaagttgtttatcagcttaaggagattttgggctgaaacaatggggttttctagatacacaatcatgtcgtctgcaaacagggacaatttgacttcctcttttcctaaytgaataccctttatttccttctcctgcctaattgccctggccagaacttccaacactatgttgaataggagtggtgagagagggcatccctgtcttgtgcccgttttcaaaggaaatgcttccagtttttgcccattcagtatgatatcggctgtgggtttgtcatagatagctcttattattttgagatacgtctcatcaatacctaatttattgagmgtttttagcatgaagggttgttgaatttttcaaaggccttttctgcatctattgagataatcatgtggtttttgtctttggttctgtttatatgctggattacatttactgatttgcgtatattgaaccagtcttgcatcccagggatgaagcccacttgatcatggtggataagctttttgatgtgctgctggattcggtttgccagtattttattgaggatttttgcatcaatgttcatcaaggatactggtctaaaattctctttttttgttgtgtctctgtcaggctttggtatcaggatgatgctggcctcataaactgagttagggaggattccctctttttctattgattggaatagtttcagaaggaatggtacgagttcctccttgtacctctggtagaattcaggtgtgaatccatcaggtcctggactcttttcggttggtaagctattgattattgccacattttcagctcctgttattggtctattcagagattcaacttcttccttgtttagtcttgggagagtgtatgtgtcgaggaatttatccatttcttctagattttctagtttatttgcatagagttgtttgtagtattctctgatggtagtttgtatttctgtaggatcggtggtgatatcccctttatcattttttattgcgtctatttgattattctctctttttttctttattagtcttgctagtgrtctatcaattttgttgatcytttcaaaaaaccagctcctggattcgttaattttttgaagggttttttgtgtctctatttccttcagttctgctctgattttagttatttcttgccttctgctagcttttgaatgtgtttgctcttgcttttctagttcttttaattgtgatgttagggtgtcaattttggatctttcctgctttctcttgtgggcatttagtgctataaatttccctctacacactgctttgaatgtgtcccagagattctggtatgttgtgtctttgttctcrttggtttcaaagaacatctttatttctgccttcatttcgttatgtacccagtagtcattcaggagcaggttgttcagtttccatgtagttgagcggttttgagtgagattcttaatcctgagttctagtttgattgcactgtggtctgagagatagtttgttataatttctgttattttacatttgctgaggagtgctttacttccaactatgtggtcaatgttggaataggtggggtgtggtgctgaaaaaaatgtatattctgttgatttggggtagagacttctgtagatgtctattaggtccgcttggtgmagagctgagttcaattcctgggtatccttgttaactttctgtctcgttgatctgtctaatgttgacagtggggtgttaaagtctcccattattattgtgtgggagtctaagtctctttgtaggtcactaaggactttatgaatctgggtgctcctgtattgggtgcatacatatttaggatagttagctcttcttgttgatccctttaccatgatgtaatggccttctttgtctcttttgatctttgttggtttaaagtctgttttgtcagagactaggattgcaacccctgcctttttttgttttccatttgcttggtagatcttcctccatccttttattttgagcctatgtgtgtctctgcacatgagatgggtttcctgaatacagcacattgatgggtcttgactctttatccaatttgccagtctgtgtcttttaattggagcatttagtccatttacatttaaagttaatattgttatgtgtgaatttgatcctgtcattatgatgttagctggttattttgctcgttagttgatgcagtttcctcctagtctcaatggtctttatattttggcatgattttgcagtggctggtacccgttgttcctttccatgtttagtgcttccttcaggagctcttttagggcaggcctggtagtgacaaaatctctcagcatttgcttgtctgtaaaggattttatttctccttcacttatgaagcttagtttggctggatatgaaattctgggttgaaaattcttttctttaagaatgttgaatattggcccccactctcttctggcttgtagagtttctgctgagagatctgctgttagtctgatgggcttccctttgagggtaacccaacctttctctctggctgcccttaacattttttccttcatttcaactttggtgaatctgacaattatgtgtcttggagttgctcttctcgaggagtatctttgtggagttctctgtatttcctgaatttgaatgttggcctgccttgctagattggggaagttctcctggataatatcctgcagagtgttttccaacttggttccattctccccgtcactttcaggtacaccaatcagacgtagatttggtcttttcacatagtcccatatttcttggacactttgctcatttctttttattcttttttctctaaacttcccttctcacttcatttcattcatttcatcttccatcgctgataccctttcttccacttgatcgcatcggctcctgaggcttctgcattcttcacatagttctcgwgccttggttttcagctccatcagctcctttaagcacttctctgtattggttagtctagttatacattcttctaaatttttttcaaagttttcaacttctttgcctttggtttgaatttcctcccgtagcttggagtaatttgattgtctgaagccttcttctctcagctcgtcaaagtcattctccatccagctttgttccattgctggtgaggaactgcgttcctttggaggaggagaggcgctctgatttttagagtttccagtttttctgctctgttttttcyccatctttgtggttttatctacttttggtctttgatgatggtgaagtacagatgggtttttggtgtggatgtcctttctgtttgttagttttccttctaacagacaggaccctcagctgcaggtctgttggagtacccggccttgtgaggtgtcagtctgcccctgctggggggtgcctcccagttaggctgctcgggggtcaggggtcagggacccacttaaggaggcagtctgcccgttctcagatctccagctgcgtggtgggagaaccactgctctcttcaaagctgtcagacagggacatttaagtctgcagaggttactgctgtctttttgtttgtctgtaccctgcccccagaggtggagcctacagaggcaggcaggcctccttgagctgtggtgggctccacccagttcgagcttcccggctgctttgtttacctaagcaagcctgggcaatggcgggcgccccttcccgagcctcgttgccgccttgcagtttgatctcagactgctgtgctagcaatcagcgcgattccgtgggcgtaggaccctctgagccaggtgtgggatatagtctcgtcgtgcgccgtttcttaagccggtctgaaaagcgcaatattcgggtgggagtgacccgattttccaggtgcgtccgtcacccctttctttgactcggaaagggaactccctgaccccttgcgcttcccaggtgaggcaatgcctcgccctgcttcggctcgcgcacggtgcgcacacacactggcctgcgcccactgtctggcactccctagtgagatgaacccggtacctcagatggaaatgcagaaatcacccgtcttctgcgtcgctctcactgggagctgtagaccggagctgttcctattcggccatcttggctcctcctctgagtaaattctttttttatatatttttaatctatatcattatgcagctattaaaagtgatgttttcaagagtgctaatgaccaagaaaaacccttatgatataatctaaataaagaagaattaaaagtgaatttacgtggtttgaagaaaagtataaaaaaatacaaaatgaactataatataaaccatattaacatcttagatacgttttattaactttttatccttcacacttttcagtagactgtaatatttctacagcacgcattaatttttaagcttattttatatatcatatttataaatttattagataataaaagttgttactctaaggcttatagtgttatttgttccatcctcatttctgattcctggttcccagagcaatcacttatgactctttcagatgttttctctggtacttgactccccatttctaaataacaagcttatactgttatatcttgttttttcagatttagataatatatcttggcttccttcaggaaaaatgaagatttcactctctcacacctccaccctcccattcacacctcgcctccaccacatgctcccaaattgattagctcataactttgggtttgattcatattattgttcacatttatgtctatgtaaatagtgtcaagaaaaccatgcagtgcactatgattccactgcctcccatataaacttkgggttttttcctagagttagtaattgttcatgtatttgttgccttagtttcctatgcctatcattaattcagtcccaattttaccaaaagatctctaaaactcttcttagtacagacaaattcatcagatgatctgtctgttccgttttgtgtctgcccatatccctcctgaagccctccaggtcctagctggacatccagctctctgtacccactataytgtcatcctgggattgcctttcactgtctccctggggattctctgtgcctgtttcctgattcaaaacccctgtttcttggatcccatgccttctgcttttgggtttactctcttatttgggtggtggagttcgtcttctggcatctttgtgagaaagggtatagaggaggtaaattttctgagacctagcatgtatgaacacaacttcatgccatacttcagagggcagtaaactacagcccatgggccaaatctgatccatagcctattttcattcatgttgtgagctatgggatggtttgcttacattttttaaatggcttttaaaattatgcaacaaagcttgtatgtggcccataaaaactgtatgtggcctgcaaagcctaaactatttactatctgtccaataatggaaaaagcctgctgacacctgttctaattgattggtagtttggccaaatgtagaattaaggttggaaatgattttcctttaacattttgaagacttcactccactgtctcctggattcaagacttgctgttgagaaatccaatgctatcctgctttccagttctgtatgttaaacctctggttttctcttttgaaactttcaggaccttctctttaaacctactcatctaaaatcttataatgttttgccattgtgtgaatcttcttttatgccaaatgttgattctcagaggaccattgattctgaaaatgtatgtccttctagtctgggaaaatagaatgtcttatttatttgataatttcttctgttttcctgttctctttcagaaatttctattagttcactgtgtacctcctatattaaacctctagtcttttcttctattttacaattcctgcatacaattcctgcaaatcctgcatacaatttctgcattgcctttgtatcctccaagttcctttgctcctggtggctgttttagtctctgtctttcatggtgagcacctttccaaaatttgtctcttcctagactgtccactcatgtttgcagatcaggccctaaatgcaggctagaagctctggatgtgaatgtaaagctgatagacctcatggttatatggtcaggccctaggttcaagacccccaaatgtgtgtaggtgttggtgtcttttcctaggtaggtctgttccccagagagacattctgggaaacatacttaatccttctgtcttaaagatgttacttcccctccctcagctgtgcctatatttgagaataaaggttctctctggtccaacccaggcagaaagtagatatgcgcccttctgccacaatgggaggataacgtaggcgattagaggctggggtggatccaaggactcttcatacaaactctcaactggccctcctgttttcaggccctctggcacccccacctggagaggttcttggctcctccgattcctgagccactctgggcctctgctactgcacagcttgcctcttactgccttccctgcatgcagaagactctgcttggtttattatcaatttttatcagctctccagtgtccaaaatgttttgcattttcccaactattgtctccttttgcactctctttgcccttatgatttcatactttatttattcctttattatcattttcttagttttcagagagggtagagataaacaaggaattctgtctgtagggatggtatatcttcattctaactaatgtgctygtcgtgttacccagaacgaaaagacaagttcacgtccttaaggagcgctcagtgtcatgggaaaggcacaggcagatgaatcattttcatacaggtgctgtaatggagatgtgtctgagcagcagagggtcacaggagaagtatctgcatctagtgggggagggcctgagagggtcactgggattgtgacctagagcagtggggaagggaaaaggcttggacttatgaccatttggagggcaagaaggagttttagatcaaattgttatttttattgactctcctctcctgggtgctataaaaaagcattgatttctcaatgcagggcctgycctatcaagatgagctaaaccatcacaggtgacacctgggtatccaacatgcccagcagagctgcctggagagagccctgtccttccaccattttcttctataaaacagaaattaatgtgaaggttaaatgtatgtaaattgctcaagaaagtcagcacccagcaggagttagtcctcccaacccccatttcttttaaacaggaagagaaaaagaaggagcatgtatgtcccatgtataacatgagctcagakgcgcagaaagataacttactttgctttctataacattcaacttgatcttaagccaccatttccatgaattgtgaaaaaatatgtcacttcaagggattcctgaagtggtaaactttttaattttcagcttagtcttttacaggttagttattaatcaagtgcattttttcctgcctacctccccaagagtgcattaagcatcctggatggcttagcatcctggcttccaaaacagggcagctgccctcactactttctagccgagggatctgtccttaatcttaggcactggcatctatccactctcgctccactattgaagcctcctcagcttctcttgtctcaggcattatatccctgttgtctggacctgtgccttggctccccatggtactgtcaatgccatagtccctggctttggactgtactccctataccctgtatctacccgctagtagcccaggcacctgctgactgctaattctcagcctccttcactattcctctcaaggagacttagaattgctgtggatctgtgccataccttgccaaagctgaaggaggctgttctgaagctctctctgctatacacgccacatgccatttctattctgtcagtgccgttgtgtattggcacagggcaatgcaaggtggtcttccagaattccagatgggaagcaaaatataaactccactgctctaacattgtcagatttaactgggcatcttaactatgccctcccaaaccccaatacaaattaggtttatctctgcagggtatgagagtatagggagcaggcctaatacctgtctaaactgtcaccacagacattgtctatcaggcttttctctgcccttctgcccattcttccacctcacctcaccctcaggccaaaaagggccttttgttttcattttcactttcttttctttttactgctctgtgggctttagtgaaactgtgcactctgattccccgggttttctggttcttgattattttaagagtaacttttggaacttaaataaaccttttctctctcaatatagcctggctcttttaaatgaaagctttaaccttcacaagcattacctctgaaatgagtttcaagagccagttgtgggagtcaaaaactgaatatgacctccttgctctcagctgggttctgccatccccttgaaggagggggtacctcagccctcaggaaggagagcctgggcctgccaggattaccatggaaggaaaatgcttccagtttccaggggggcagcctacactcttaggatcaacttttccattaaaacaacaaaaagtggtgggtagcacgttttccacacttcaccttttttaaacttttattttgggttcgagggtacatgtgaaggtttgttatgtagataaactcatgtctcaggggtctattgcacagattatttcatcacccaggtattaagcttggtgcccattagttattttctctgcttctctcactctccaccctccaccctcaagtagaccccagtgtgtattggtcccttctttgtgatcatgagttctcatcattagcttccacttagaagtgagaacatgcggtattggttttctgttctgcttctctttagcaaacttcactattaaagctaaaaagctgagagataaacacctggaaccagagaggttagcaggctatgggagcaccagagccactggtgccctgttgagcacttgccagaacggctcacttaagctttgaatcagcagccatgcaagtcgggaagaacagaattcagagactggatcccttccaagctgagaagcctcagagttgacttcccctacattcagctgaacccacaaggagctataccctccggggtaaggtaaactagatcttaattcaccttttccccctaatcctagagaacttctgagaagccttagtgctttagtgctgaggcaaaagaggaaaagtgaaagaataaaatatccctaggaagaagcagccacacatgagtccttgctcagatttgaaactcccatcctggattagccaaaaaaactcaagccaggaatttgatttcaggttattcatgagttttaggtgcctggcaaaagcaaatatgaagtgtctctggaatatctatcttagatctggaggatctttcacaaataactgctcaggagcattcascagaaaacattgaaaaataactaggcacaaaagaaaacaatatgactaagaactatcagaaaaaacagacaacagaaataacctgtacagactttgaaactggcattgtatgatacagattttaaaagtagtatttatatctaaagaaaaaagaaactatagaaagtcaccagatttgatgaaaaactcatcagaatttctagaaattatgaccaaaataaacaaaattaaaagttcattgaaagctcattaaatgtgtgcacaccaaaaacaggatcccaaaatacatggagtagaaactgatagagctgaaaggcaaaatagacaaattcgcaattataggtagagatttcaacaccccrcaattgccaattactactgctagacagaactactggacagaaaatcagcaaggatatagaaataaagacactcaacaacarcatcaaattgatgtgtaacagaactctccatcatccaacaacagcagaatatatatttttttcaagcacctatggaatattcactaagataggtcatattctgagctataaaacaatcctgaaaatgtatgaaacaaaagttgaaagtactaaaaagaaaaacggaaaatccacaatcatagtgagagattttaacatgcctctgtttataactaataaaagaggcagacaaaaaaatcagaacatagatttaagcaaaacaattagtaatcttgactgaatggacagaacattacatttgacaaccatagaatatgcattctttttaagcacacgtaggacatttaccaaaactcaccatatactaggacatcaaatatcaacacatttcacaagattgaatcaatatagagtatattctctgactgcagtgcaactaagctagaaatcaataacaaaagataaccaaaaatcacaatatgtttggtaattaagaaaaatacttctaaataagtcatggatcaaaacagacatcataatggaaattagaaaatgctttgaactgaatgatcatgaaaacactacatatcaaaatttgtgggattgtttagagggcaattttatagcctgaactgtatatagtaggaaataaggatgtgagggtgatctggctgagacatctgtcaccccaytgattgccagagttgattcggctgatctggctgcctagacgggttccccttcctccctcaccgctccatgtgcatccctcccaaagctgcgtgctcggctgaagaggatgaccatccccgatagaggaggaccggtcttcagtcaagggtatacaagtagctgcactcctctgctagaacctccaaacaagttctcaaggaaagaaggcagactgcaaattaattagttaggcatacatcacaagaagttagaaaaagaatagcaaaataacaccaatagagtagaaggatagaattatttaaaataagaccagaaattagtgaaacagaaagcaaagcttcagtagagaaaactaatatgccagaagttggttctttgaaaagaaccaactaatgaaatgacaagcctctagcaatattgcccaaggaaaaagaaagaagtcacaaccaacattaggaatgaaaatgggcatcactgcagatggtgcagataaaagacattaaacagataaaagaatatcataccgtctggtccgtgcgcgatcacagcccgtcgcgtggctcgggcttgggcagagctggagacgcgtggagctgttcgaggactcgcagtgcacatatgatatgtgttttagaaatagctgttaaacttttgtttgaatgaagaatgtctctcaatccacctatatttctcaaatgaagtgaagaaaataattcaaactttgtggaaacaaaacagtcacaaactacttccatagcttcagatgatatgtgttttagaaatagctgttaaacttttgtttgaatgaagaatgtctctcaatccacctatatttctcaaatgaagtgaagaaaataattcaaactttgtggaaacaaaacagtcacaaactacttccatagcttcagaagatccccttcaaaacttatgtttagcatctcaagaagttcttcaaaaagctcagcaaagtgggagatcaaaatgtctcaaatgtggtggttccagaatgttctactgctctacatgttacattccagttgaaaatgtacctattgaacagattccacttgtgaaacttccattgaagattgacatcattaaacatccaaatgaaacagatggtaaaagtactgctatacatgcaaaactcttagcacctgaatttgcaaacatttacacgttttcttgtattccagaatatgaagaaaaggaccatgaagttgcacttgtttttcctggacctcagtctatctcaataaaagatatttcttttcatctgcaaaaaaggattcaaaataatgttagcagcaaaaatgatgaccctgacaagtcatcttttaaacgcaaaagaactgaagaacaagcgttctgtgatttgaatgacagcaagtgcaaaggcacaacactgaaaaaaattatatttatagatagcacctggaaccaaacaaacaaaatattcactgatgagcgacttcaaggtaaaaaatatatatatatttttttggactgctcctccctccaacttattttgaaaaaacttcaaacttacagataatttgaaagaagagttgcattgaatacctatatattttgccacatttactttatttctctatttctctttattatatatgtgagcttgtatttatatattatatatattttttgttgaccaattgaaagtaagtttcaggctttgtaacacttcacccttaaatattaagtgkacattttcttttcttttttttttttttttttttttttttgagacagtcccactctgttgcccaggctggagtgcaatggtgcaatcttgactcactgcaacctcctcctcctgggttcaagtgatccacccacctcagcctcccaagtagctgggattacaggtgcccaccaccacacctgcctaaattttgtatttttagcagagacagggatttgccacgttggccaggctgctctcaaattcctgacctcaggtgatcctcctgccttggcctcccaaagtgctgggattacaggcatgagctatcatgtccggcctaagtgtacattttctaagaatamgaatattctcttatattaataaagaatgacatctcttttataaacaccccaatggtgaacacatttactaagaagttagatcttctcttttgttttttgccttacatgtggtttttttttcttttttttttttttttttttttttgagagggagtcttgctctgttgcctaggctcacagtggcgtaatctcggctcactgcaacctctgcctcctgggctcaggcgattctcctgcctcagccttgctagcagctgggattacaggcacacaccattatgcccagctaatttttttgtattttcatagagacaggtttcaccatgttggccaagctggtttcaaactcctgacctcaggtgatccccccaccccggcctcccaaagtgctgggattacaggcatgagccaccgcacccagcctgccttacagtttttaaaaataactttattgaggaagaattaacatataataaactacgtatgtttcaagagtattaaagttgtctcatatgtgtacagccgtgagaccatcactacaagttagaaaatgaacatatccaacccctgccaaagtttctgcctgacttttatcatctttctcatccagctttccccacagcacacttccacgctctccaaccccatctctaatcaatgatctatatctacttattatagattaggtacattttctggaatattatataaattgaatcatatagtatgtactcttttcctttttttggtttggctttctcacacaaaataaataacttgacactcatttttgttgtagcatgtatccataggtcatacatttattgccaagtagtatttcgttgtatggatatgctacaattagtgttatctgtttatctgttgatggacatttacactacttgtttcccattttctactatttcaaataaagttgctatgacacttgtgtaaaaamaaaaaaaagatgttctcctgtataataaatacagtaccattatcactcctaagaaaattaatgaaaattacataatatcatctaatatactgtccatattcaaatttccctaattgacccaaaaatacctcttgtagcttccccccatatagcatttaaactcatcacaatttggttattctgtatctttagtctcttttaatctagagtagtcctgtttttgtttttcatgacttagacttttgtgaagaggacaggtcaattgtctgaatgtttcattgtgattagttccagtctaaatatgttggctaggatacttacaggtaaggataaatccagagttgtctatgtctagtttatatctattgtttgggtataattattaataacatgtaatttcactctcagaaatgaaccttttagctgataaattgtatggttaaccaattcataggtgaattcatactttattgttgtatcaaattaggatgcacacaatgcaaattgttctattatttgtgataactttcattgcttgattaaagcggtgattgccaaaaaaaaaagaatatcacaactaactttatgccagtaaatttcaaattttagatatgatgaataaaatcctggaaaatgtaagttgccaaaatcataatgaagaagtgaaattctgaattataatcattaaggaaattaaatcagtagtcaaaaatttsactactgagtctactcccactcaggatgaggcactggagatatttagcaccygcctgaattcgggctgccaggtggcgagcgtctgtctgtatgtgcaacaccactgctctctcttatgtaggaatgtaccaggtcatccagggtatcatctctcctgtcagtgacaacacaaattaaactctagcctcacaaaacttcactggtgagttctacaaaacactcagaaaaaaatgttatttcaggctgggcacggtggctcatggctgtaatcccagcactttgggaggccgagatgggtggatcacttgaggtcaggggttggagaccagcctagccaacatggcaaaaccctgtctctactaaaaatttaaaaattggtcgggcatggtggtgcatgcctgtagtctcagctactcgggaggctgagattgcaccactgcactccagcctgggtgacagagcaagactctgtctcaaaaagaaagttatttcagtcctaacacacaagatctcttacagcatagaaagagagaactctccaacgctttttatgaggctagcacaaccttgataccaaaatctgattaggacagtgagagaaaggaaaattatagacctgtcttactacctaaaaaacaaattagcaaagtgaacccaccagtacacaagaaaggtaatatatcttggccaaatagggcttatctcaggaatgcagtgttagtttaggattagaaaattaatcaatgcaatttaccmtattaactaagtaaaggagaaaaaaaatcacacaatcaagagttgcagaaaaatcatttaataaaattcaaygttcatttatggcaggcactcttaaactaggmataacagggaatgtctcaaaataacatatttgtcaagatagactaggctagctgcaataataaatcctccagttttagmagcttaacacacaaaaatttctctctccccagatgaatcccatgtggtttagacgatctacagggcagttatcatggttagtgagcacagtccatggctatttcaaagtacgctttcccactccatcagcagcacattcctcccaggtcagtggtggcctgtgcgactagtccatctacagccaatacccaccaaccctggttcacgctaaaatcccatccctttgtccttcatcctcaaaatccccatttgggctaagaaactatatataattttcatcctcacatagagggcaaaaatagtgcccctgttaattcctatagaaggggaagtcatgctgttcctcaactatatcctgatcctaactrtcctcactgctgtatggsacccttgcctgagcgccaccctcacagcctttgtctcagcagagaagcctttctctcagtgctacccgggttgtagaaggctctagaggagaagcacatgttcactaaggtagtgcctttacccttgcctaagggagctaccctttctcccccatgagagaatgccagagtctactaccactcaggatgaggcactggagacatttagcacctgcctgaattcaggctgccaggtggtgagcatctgtctgtatgtgcaacaccactgctctctcttacctaggaatgyaccaggtcatccagggtatcatctctcctgtcaacgacacctatgggaagaaagacctygcagcttctcatcaccgagtggccatggcccggctggccctgcagacatccgactggatccgggtggacccttgggagagtgagcaggcacagtggatggagacagtgaaggtgctgaggtaatggtagtcrctctcctgtgtgatgaccaggggccacgggagatgtctgcagagcytacagggtaaaaggtagggcagattgtggggctgggtttctgccagaccttctcagcaaatatccaagaagcagtttctacttagcaggagagagatcaacagattcacattctcagagaggtccctgagcagaaaaattacaaaacactgtactttcaaatgcactttgtggaaacacccaaccttatttcagatgacggtagcactggggtctagtgccaccacttagtagctgtgtgactttgagcaagtgatctgaagcctctgagacatatttctcacttgcaaaatggagacaacaaaaccgaatgaggattttttatatgtaaataactttcctgacccagaactacataataatattcagtaggtgggaccttttgttatttttatcattgtctaagttgaaaactacatctatagaataagctgtcttttttaattgtacaattcctgggttctgtaaacccagacttttatgtgaaatagaaaaaaaagactataaatctagaaacagttactctggattattttttcttctggaatttctatttgtattcagcataagtaataaaactgtttaaaaccccaagccagccctgcatgttagggcagtgggtcactagcttgtgtctgcagactttaagggggaattgccagagaagcaggaagtcccacctctcctggctgttgggattgtgagtatggcctgcctcatcactaatgacaaccagctctgctggaagggattgcaaattgctgtgtcttttgtctatttagaaccactaggattggcaggaaatgggaggcaaagggacaaggtggaatgactgacaggcctgttcataatgtgttttagttttcatttttaacttrtcttcaaaatcacttgggagaaaaagatttacctttttagtagaggtaatcatttagtttttatawcctggttcttattacttaccttttactgtggaaagaagcagccagaagcattcagcagttacagtgttgcttcagaacctgttgccaaattaaaaggaaagccattataaaataattgttatgacacatgctcttctttattttttaatgacccattagtataaacaaagacccttatattgaaaattatataaggaataaattgacacctagatcatccttttagaatgagtcatgcagtcatttctcatttatctaggctaagagagggggaatagaagcaagagaatagatcatccaacaagtaatttagctttaatatgtaggcagaaacagacgcttgctcctccacccagtgagaagcactgtagcctaggacacaggttttagagcaaaatttactagctgaattacttgatataagtgatttagcctccctgagtctcaatttctcacctaataaaatggaaatgacatcacccacttcactaggattccgtgtgaattaaatgagatgatgtaggcaaaacacctggtttatggtaggtacttaataatgttagctaccttccctgaatccctaatgctggcccataatttgtcctcaaaacagataagccattcatggataaataggagttgaccatagtactatttacgattacttgtgcttctgctgcaaaatacaggagtgagctaagattgtactgaacgcattcattttctttttaattttttttttttgagatagggtctcaaaaaaagctccatggtgattccaatacatggctagcccaccacttcagctgccaagtttattaattaagctctgttgcccaggctggagtgcagtggcatgatctcggctcactgcaacctccacctcctgggttcaagcaattctcctgcctcagcctcccaagtagctgggattacaggcacacaccaccatgcccagctaattttttgtatttttagtagagacgggggttcaccatgttggccaggctggtctccaactccgacctcaggcgatccacctacctcagcctcccaaagtgctgggattacaggcatgagtcaccacaccaggcctctttttaattttttttaaataactcctttattcttgtgttgctcagtgttagtttgcacackggaatcacccagggagcttttaaaagtacccatgtcattggtctgggttggggcatcaggatttttaaaagctacctggtgattctaatatatggctagctcacagcttcagctgccaagtatatgaattaagcttatgatcagtaccaagatgcatccaaaccagtggtctcaactctggctgcagaaatcacttaataagcttttttaaatgctcacctcctcccacccaccccagagattttgatttgtcaggggtgggctctaaacattgctattttcataaaggttcccatatgtattttgtgcaaccaaaattgagaatcactgttacagtcaacacagttttatcaaatgctgattaagatttttaaaattattatttggagtaagtttcatctccaaaatgtaccaaytgcatttgtgtttgattactaacactttccgaaaattatcaaaatcaaagttttttaagactgaaaatccagttataattgtaaagtcaggtggttttagaagcatggtagaaatccaccccatcttttgctccatttagtgtcctcttgataaagtccgtagtgaatctgcatcatagtgacatagtaacaaacatctctatgatgtaaattcactgtagagcttactgaggattccttctttccctataagatagtttgttctttgcagacatgatcttgtgttgtcctcattttacagataaagaaactgaggctcagagaggctacgttaatcacggtcacacacaaataggacgtggagctcccatctgtggagctctgaagccatgcttatggccatcttcaaaacagggatctgcaggctgggaacatgatgtggctggctttacacctcccacagttgccctccaatctttcctgaagaccagtgggactgctgaggacaccaagaacatgcccccagggtcaatccacaggcccaaggtaccactcaggcaggcagcaagaagcagttaatggtcatgccccatagaggcgcagtggaagtccctggcaaatrcatgttgtattggaagtaattatttccacaacaaagttcagagatccagctaatattcaaagtagggtcaacctgaactaggaccttcaaggtaagtaaaatgagaatcaccaccaccttttactaatcaccctctatgtgtgccaagctctttcatgtatatctagtaagctcagcaactccaagaggtaggtgggtttagccctattttatatataaggacatggagattcagaaagggttgtaaaatacttcaagtcctacagttagaaagtggaggtgagactcaatctacttcagtctgatgtgagagcccatgccaatccaagggtgaatcctcagaaataaagtttaccaaaatcaaagcagtaaaacgataatgaaaacactgagtccagccaggctytaagaagactctgctgagtctctgagatgatctagaagggctttgaaccaggttaaatgtattcattcatccactccttccaacattcctgaattcagcagacttaaggagcattttcatgggtgctaggaatataaagatgaattccgtggggtcccttttcacaatctggtgggaagatagactaagagtaatgataataacagctaacacttattgggctctttctgtatatgggctggtgctaagcgtttcaattaatcctcacaccagctctctggggcaggttctgccgttatccctcattctctagatgaggaaactagagacaccaagactccagagctaccagttagagccagaattccaacccagtctaattctagaacttaacactgagctgcctcccaattataatcagcagcaggccacttccccagcatttggcaaggtggaagcaatttttcattcatgatcttttgatactcagtgtagataagcccagcattaactttcatgaccaatttacagatgaggtccacgtggctctgagagtatcaatgctacagggtgtcagggtcattcagcaaaaaagcctgaacttaaacccacccactctggctgaaaagcatatgcttttcccaccaggcactactgccccctaaatacagttctagtaaatgcataatacaggaagtggaagttggaagatcaaattgatacaagaaggggtgtataatggttgcctgtgtttgacaaaagcatatataagtatctcatgatttgcagaagatagattgctaaagaaggcaggcatgccaaatttgtgaaagtctaatcatatttgaaatgcccagtgcactttgtgtgtattaacccctttaatcttcataaccacccatcagaggtgggcactgtcataattcctcactggcagatgcagcaccatccacataragacttgaaatcacccacccagggtcacacagccagctggtggaggagctgagattcaacccaggccatctggctgcaagccctggctcttggccatcaccctattgccttctaaagtactagtttctaatgagagcaggcagcttttctgggagctagctgtgggccatgcactgtgccagtgcttcatgtgcatggctcattcaccttcacaagagcctaaaagtaggtgttgttatccctgcttctcaaatgaaaatgtgtcttgaattcaagtctgtctgattctaatagcccatgtccttaacccctactcagcagtgcctccttttttttttgagaaatattgaagaaaatgttaaaagaatagaaatgtactaatttccctgccttcacccatgtcacatggaaagtagtggactgtcttggacaggactctccatgaagacccacatggctttctgtcccagctcctggcaatgcctgccacagagtaggccctcaacagatatttgtggaatgagtgaactaaagtagataaaagcaggctgagacaaaatctgaaaatccctgggtggctttgagggctggaggacagacataccctgagcccatatgtttacaacacaggcatcatcacagcaaactgctcagatctcyaccccagatggaaggcccagaccatggcaaggcactcttctcgacccctgcaggtgggtgctgatcctcttgtctgtaggagaatgagatgtcagggattctgtgagaactgaagggggtaggggtggtcacagctgcagaggacttgagtccaaccctctgggcacagataaggaatttaaggcctgcctggttgggatgacacttctgaggttgaagttcagattagacaatctgccaccaccccctgtaaattgctctgctaatttgggattttttgccccaaagaagtttacctacccttgtgacttgttctaatgacatggattatagtcagggtcacacagggataaactgatgagtgctgctgggtttcttttaaaagccttagcctttttgaatgtaaaatatgccattataaaacttgaacaaagagactaagactttatttatagcagaattactcaatggttcactcaaaagaggaaacctatttttaagggaatttaaagttggtttggattatcctcttaatttgtaagcctagatgtgtaagccaggaagtgttgtaatttcctggtgttcgagaaaaccttgttggctgtgatttcacagtatgagctgccctggtgtcaagggcaaaatgcataatgctctcatgcaaataagcagaagcaccatgcagcggtgggcgtgcagattccagcaggtcatctgcagaatttcctacggcagggtctcccgactttggttggtggaacactgcttccagaatagaagagtttaggaatgctggggtttagcacacctaatgtggttyctctactgaaggactttttagagcctttactatgtccatgtgcattgtgattctacaagaaagagaaataccttgcagtcattcttaccatttttttaagtatggaactctttgtttaatatctgttagtatttttcagaactagtgcttcctagagcaagattgggaaacactcttctaaaaagacttggaaatgctaccaggccctaaaggtgccatgcaacagtccccaaatactggccagaggatccctcacagcagtatcccctgtgcggcttgttaaaagcactaattcccaggtgtcttcccttctgagtgggagtagagcccaggaatctggatatttaataagcactctgaggatttgctttacagccagtctggggggctgtgcatgagagtaagaatctaagaaggagttacaatacctcctatataatcatcttatataatgtttattgtattcctctggtctttctgtctgcctgtcctctccgttacctgcatgggctccttcccacccatccccgataagcacagtgcccagtattcattatcagcctctcccttctttctgcatcatctctggctcagcaggtattcttaaaaggattctacagacactttttgagcacctcactggaacagactctgggctcaggctgagaacagagacagccagccccagcccccacctcaagctggagacagggtatgaatggaggtgagtccaggcatgaattaggaaggctgcatggaggagggggcacctgcactgagacttgcaggatgactggattattgaggttggagacatttctgggccaaggggcagactaaggaaagcacaagggcaggagayagcataagtgtgargcactccatgccactagggcagactggagcctccagtgagaggcaggggcagccagagtgactcaggagggacaacacactgaggccaccatcctcgcacacttcacctctctgcatatgcttccagaatccctgtctcagctttttgcctggcctcccctccttcctcttaattcttggttcccctattgaaaacctatctgtctgtgaggcccagttcagaattcaccttccctgtggaaccagccccagctgctctcattaatatgaactctctccctctgccaaagcccactccaggttctttccagaatcatttttctagggrctaccaacttaatctgcttggccctatattgttgagggcctctttctctctgttcagaccctaaatcccactcacttgttctattctaaagtaactatttaaaaaaaaaggaagtttacatgaaatgaaaactatgttttgaagatggccgaataggaacagctccagtctacagctcccagcaagagcgatacagaagacgggtgatttctgcatttccaactgaggtaccaggttcatctcactggggagtgtcagagagtaggtgcaggacagtggaagcagcgtaccgtgcacgagccgaagcagggcgaggcattgcctcacccgggaagcacaaggggtcagggaattccctttcctagtcaaagaaagcagtgacagacggcacctggaaaatcgggtcactcccaccctaatactgcgcttttccaatgggcttaaaaaacggcacaccaggagattatatcccacacatggctcggagggtcctacacccacagagtcttgctcattgctagcacagcagtccgagatcaaactgcaaggtggcagcgaggctgggggaggggtgcccgccattgccgagttagttgtttcattaggtaaacaaagcgtccaggaagctccaactgggtggagcccaccacagctcaaggaggcctgcctgmctctgaaggctccacctctgggggcaggacacagacaaacaaaaagacagcagtaacctctgcagacttaaaatgtccctctctgacgctttgaagagagtagtggttctcccagcacgcagcttgagatctgagaacgggcagactgcctcctcaagtaggtccctgacccccgagtarcctaactgggaggcatcccccagtggggcggactgacacctcacacggccgagtactcctctgagacaaaacttccagaggaaygatcaggcagcagcatctgcggttcaccaatatctgctgttctgcagccaccactgctgatacccaggcaaacggggtctggagkggacctctagcaaactccagcagacatgcagctgagggtcctgtctgttagaaggaaaactaacaaacagaaaggacatccacaccaaaaacccatctatacgtcaccatcatcaaagaccaaaggtagataaaaccacaaagatgggaaaaaaacagagcagaaaaactggaaactctaaaaatcagagtgcctctcctcctccaaaggaacgcagctcctcaccagcaatggaacaaagttggacagagaatgactttgacgagttgagagaagaaggcttcagamgatcaaactactccgagctacaggaggaaatctgaaccaatggcaaagaagttaaaatctttgaaaaaaatttagacgaatggataactagaataaccaatgcacagaagtccttaaaggacctgatggagctgaaaaccaaggcacgagagctacctgacgaatgtagaagcctcrggagccgatgcgatcaactggaagaaagggtatcagtgatggaagatgaaatgaatgaaatgaaatgataagagaagtttagaggaaaaagagtaaaaagaaacgaacaaagcctccaagaaatatgggactatatgaaaagaccaaatctacgtctgattggtgtgcctgaaagtgacrgggagaatggaaccaacttggaaaacactctgcaggatattatccaggagaacttccccagtctagcaaggcaggccaacattcaaattcaggaaatacagagaataccacaaagatacttctcgagaagagcaactccaagacacataattgtcagattcaccaaagttaaaatgaaggaaaaaatgttaagggcagccagagagaaaggtcgggttaccctcaaagggaagcccatcagactaacagcggacctctcggcagaaactctacaagccagaagagagtggagaccaatattcaacattcttaaagaaaagaattttcaacccagaatttcatatccagccaaactaagcttcataagtgaaggagaaataaaaccctttacagacaagcaaatgctgagagattttgtcaccaccaggcctgccctaaaagagctcctgaaggaagcactaaacatggaaaggaacaactggtaccagccactgcaaaatcatgccaaattgtaaagatcatcaaggctaggaagaaactgcatcaactaacgagcaaaataaccagctaacatcataatgacaggatcaaattcacacataacaatattaactttaaatgtaaattggctaaatgctccaattaaaagacacagactggtaaattggataaagagtcaagacccatcagtgtgctgtattcaggaaacccatctcacgggcagagacacacataggctcaaaataaagggatggaggaasatctaccaagcaaatggaacaaaaaaaggcaggggttgcaatcctagtctctgataaaacagactttaaaccaacaaagatcaaaagagacaaagaaggccattacatcatggtaaagggatcaattcaacaggaagagctaactatcctaaatatatatgcacccaatacaggagcacccacattcataaagcaagtccttagtgacctacaaagagacttagactcccacacaataataatgggagactttaacactccactgtcaacattagacagatcaacaagacagaaagttaacaaggatacccaggaattgaactgagctctgcaccaagcagacttaatagacatctacagaactctccacctgaaatcaacagaatatacattcttttcagcaccacaccacacctactccaaaattgaccacatagttggaagtaaagcactcctcagcaaatgtaaaagaacagaaattataacaaactgtccctcagaccacagtgcaatcaaactagaactcaggattaagaaactcactcaaaaccgctcagctacatggaaacggaacaacctgctcctgaatgactactgggtaaataatgaaatgaaggcaaaaataaagatgttctttgaaaccaaykagaacaaagacacaacataccagaatctctgggacacattcaaagcagtgtgtagagggaaatttatagcactaaaggccacaagacaaagcaggaaagatccaaaattgacaccctaacatcacaattaaaagaactagaaaagcaagagcaaacacattcaaaagctagcagaaggcaagaaataactaaaatcagagcagaactgaaggaaatagagacacaaaaacacccttcaaaaaagtaatgaatccaggagctggttttttgaaaggatcaacaaaattgatagaccactagcaagactaataaagaagaaaagagagaagaatcaaatagacgcaataaaaaatgataaaggggatatcaccaccaatcccacagaaatacaaactaccatcagagaatactataaacacctctatgcaaataaactagaaaatccagaagaaatggataaattcctggacacatacaccctcccaagactaaaccaggaagaagttgaatctctgaatagaccaataataggctctgaaattgaggcaataatcaatagcttaccaaccaaaaaaagtccaggaccagatggattcacagccaaattctatcagaggtacaaagaggagctggtaccattccttctgaaactattgcaatcaatagaaaaagagggaatcctccctaactcattttatgaggccagcatcatcctgataccaaagcctggcagagacacaacaaaaaaagagaattttagaccaatatccttgatgaacatcgatgcaaaaatcctcaataaaatactggcaaaccgaatccagcagcacatcaaaaagcatatccaccatgatcaagtgggcttcatccctgggatgcaaggctggttcaacatatgcaaatcaataaatgtaatccagcatataaacagaaccaaatctcaatagatgcagaaaaggcctttgacaaaattcaacaacacttcatgctaaaaactctcaataaattaggtattgatgggatgtatctcaaaataataagagctatctatgacaaacccacagccaatatcatactgaatgggcaaaaactggaagcattccctttgaaaacgggcacaagacagggatgccctctctcaccactcctattcaacatagtgttggaagttctggtcagggcaatcaggcaggagaaggaaataaagggtattcagttaggaaaagaggaagtcaaattgtccctgtttgcagatgacatgattgtatatctagaaaaccccatygtctcagcccaaaatctcctcaagctgataagcaacttcagcaaagtctcaggatacaaaatcaatgtacaaaaatcacaagcattcttatacaccaataacagacaaacagccaaatcgtgagtgaactcccattcacaattgcttcaaagagaataaaatacctaggaatccaacktacaagggatgtgaaggacctcttcaaggagaactacaaaccactgctcaatgaaataaaagaggatacaaacaaatggaagaacattccatgctcatgggtaggaagaatcaatatcatgaaaatggccatactgcccaaggtaatttatagattcaatgccatctccatcaacctaccaatgactttcttcacagaaytggaaaaaactactttaaagttcatatggaaccaaaaaagagcccgcattgccaagtcaatcctaagccaaaagaacaaatctggaggcatcatgctacctgacttcaaactatactacaaggctacagtaaccaaaacagcatggtactggtaccaaaacagagatatagaccaatggaacagaacagagccctcagaaataatgccacctatctacaactatctgatctttgacaaacctgagaaaaacaagcaatggggaaaggattccctatttaataaatggtgctgggaaaactggctagccatatgtagaaagctgaaactggatcccttccttacaccttatataaaaattaattcaagatggattaaagacttaaatgttagacctaaaaccataaaaaccctagaagaaaacctaggcattaccattcaggacataggcatgggcaaggacttcatgtctaaaacaccaaaagcaatggcaatgaaagccaaaattgacaaatgggatctaattaaactaaagagcttctgcacagcaaaagaaactaccatcagagtgaacaggtaacytacagaatgggagaaaatttttgcaacctactcatctgacaaagggctaatatccagaatctacaatgaactcaaacaaatttacaagaaaaaaacaaacaactccatcagaaagtgggcaaaggatatgaacagacacttctcaaaagaagacatttatgcagccaaaaaacacatgaaaaaatgctcatcatcactggccatcagagaaatgcaaatcaaaaccacaatgagataccatctcacaccagttagaatggcgatcattaaaaagtcaggaaacaacaggtgctggagaggaggtggagaaatagggagaattttacactttggtgggactgtaaactagttcaaccattgtggaattcagtgtggcgattcctcagggatctagaactagaaataccatttgacccagccatcccattactgggtatatacccaaaggattataaatcatgctgctataaagacacatgcacacgtatgtttattgcagcactattcacaatagcgaagacttggaaccaacccaaatgtccaacaacgatagactggattaagaaaatgtggcacatatacaccatggaatwctatgcagccatagaaaatgatgagttcatgtcctttgtagggacatggatgaaactggaarccatcattctcagcaaactatcacaaggacaaaaaaccaaacaccgcatgttctcactcgtaggtgggaattgaacaatgagaacacatggacacaggaaggggaacatcacacagtagggactgttgtggggtgggggaaggggggagggatagcattaggagatatacctaatgctaaatgacgagttaatgggtgcagcacaccaacatggcatatgtatacrtatgtaacaaacctgcacgttgtgcacatgtaccctaaaacttaaagtacaataataataaaatttttaaaaaaagaaaactatgtttttcagtttaccaaaatatatcagggactttaaaaatctttgcactctttgcttgataaattcccattctaggaatctggctaaggaaataattagagattgggacaaagatttatgcagaaagatgtttatcacaacagtttttacaatggcaggaagtaaaagcaatatcaatgttyaaatataaaggaaagtatacctaaattatactgtatacatagcataaagaaactacataaaaggttttgatgatgtggagaaacacttatgaaggaagtggaaaaaaatcaggatacaatactgcatataatcttaagtatataaaaatatgactatacttcccatctgttagcatgtctaaatagaaaagactaaggaaatacactaaaaactgatggtgttttgtagaaagcagaattaatattgttgttgttatttctgctttaaatacttacatattttccatacattccataatgaacacagtttgatgtttgtaattggggtaaaatgtagagcaattaaaaacaggaaggtggaatttttctcagcataagtttggcttttgatgagatggcatgtgtgttactagtgacatatttctaaaggaccattttgtgtgctgcgtattttattggtgtgctgttatactctggggttgcaaattacgtgatgagctcggcaatttctggctgccagagccttgctttgcccatcactkctatgatttgcaggcctccttgggctcacccagagtcatatggattgctacattctgggctgcttgggtgtgacactttgggatggatgatgccttcagttctttaacagctgactctgtctgtcttttgtgaaggtggcgcccacccatggctgatggaaccaagcacagctcagccacattcagaggattccctctcccaacagagcaggccctttatctgtttccgttttatactgaatgttccaaggtggccttgtatggtaaatttaggtgctgcctgtcagatgcttcatctctcatgtcctgtttagacccagaagtcccacatttctgagtgtgtctgtgaggtaccatgacagacatcactgttggtggcagtgttcacatgctgcgccagacaggaaatttacattgcattctctccatcactcaattcccataacttccaaagaaagctttactatccccattttatggctgaagaaacaggcccataggctaagtaattttcctgagggtaccagcagatttaaagttgaacccagagctgactgacctcaagattggtgttctttgatctcacagacttaggacaaccaaactttcaaagatcctagtggcacttccctcacagtctatgtaaatttcagytttatctacctttcaaagcccttagctactcaaaggtagagcacactgcccccagaatgcctatggacatcccatttgtttatgtatctgtatcactgttaggakaaatcgtattgatttctttatactacaccctggagttacatacttaggacttggatagagtcactcggtctaaaaattttgtaacagtgttgtaaatggatttggaagagatgtgtgaatgygtttgtgagcsctgaagacaggactgccaggaattagaagtctgaggcccatgttgcccgagaagtgatctatcacatggtattgtcgtcatgaaataacaggcaccaccagcctcacagacatgcctttgatttggggggcaggggaggtgtgggcccttgttccttctaggcaaggctcaaagtgaatagtattccttrctgtcattgttaatgaatcaaacggtacccaatgttgaaactgacatgcagaaattgtccccacaaaaaaatctattggaaaaaggaggtggtatcttctctgttctctgacctgtaggaagagagggggtgtgtcccaggtcccagcaaatcctggaatgaaatgcacatcatagtacctcccccataggaakaccacataaaactacctaattgtttgaaagaccaaacactgttctcctttatactacactggttggatagataagaaattggagtaaaacttcacagatgcagaaccgttcaaatatacatatgtgttgtgagcaatgggaccagcccaaattagtgaaaagtgtgagttactgaataattgttaaatgctgttttattggtttaaaaaggccagacactgggagacaattcataaatgttgagtgggtgtttctatgaatagagtggtagataaatgagtaaatggataagtgaatgaatgaataaatgaagggtaatatcctcattttaaagttgagatcacatgaggtattgaacgtcagaaccagaatttgggtgtaaggtgtctggctctagagtcttagtttgtaaccactaagagttcatacatgcatgaatgaaggaatgtttgaatatcgtttactagaccagtattatgccgctagagcatttgaaaagtgtgtttctgtgattgcatatgttgctttaaatgagtctagagctcatcatctcatggatggggaaactgatacccagagaaaggtcttggctcyggccgcacagcagcctgtgcccagttgaggccaggactcagacttctccatgacacctccagtctctcactttccattccacagttgctccagtgcttttgtgtgaactcatctctctggtccacatttggattcctttaaaggttccaccttagaggatcctaaactgaccatttacacaagtttttctccagtatggtagccctggagcctctctttactcagactttgtggtgactgacaggggccagtactctgggaccccagtctttgccatttactgaagctgggatcagcttctggaagaatcagagaccctgcagcttgtttctagcatagacttggatttcctttgctgattagctcaccaagagggacacggatagtgccaggaaaatcastctggaactctaggaagggcttctccagtataatgcargtacagatttccaccagcaggcagcagcagaacccagcagttacaaatgccacacctggaggatggctgcctgggtttgacacctgacttatctgcctaactgagtgacctcaggcaagtcacttatctctctctgcctcagttgccccctccataaaatgggcmcaatactcacctcataaattgttctggggtgcatatggtattatacacataaagagcttagtagtagtgcccacagtaatctcccaataaatgttatgtattatttcattatcacaattagcattctgttagaacacattccaaaggattatccacattaagcattgttctagagctttgttttattggaaactgcaatgaaaaggccaccagctggagtcttagagaccttttgtttatccaaagagcctttataattaatctttatagtgagattgttatataaaagtgccaggtactagytcctagtaacacaagggctgaaatggatttcaaataaggcagtgacttgtccaaggcccatggcttgttggtctcagagctttcagaaccttaccttctatcagaagacacagtactgggtacagcacagccacctttagagcactctgccttggtccaaagcaaccacagacagacttctgttagaacactgaaaagaaaaaaaatcgtattccttggcactttyccaatattaaacaaaaggtgtattgattaaatcattacttacaactgtattccctgaaatggctgcagattcatttacatgctttttcttttcaagtcatgaacatggagacactgagttctcgatacattccaagaaaagcattttgtgagactttccaatgatgttgtctttcctggcagtgacctctctctaactttactgggtccatccttgtttttgcagctgtgcytgagctgaagcttctctgtggggcagacgtcttgaagaccttccagacccccaacctctggaaggatgcgcacatccaggaaatagtggagaagtttggcttggtgtgcgtgggccgagtaggtcacgacccaaaaggttacatcgcagaatctcccatcctacggatgcaccagcacaacattcacctggccaaggagcctgtgcagaatgagatcagtgccacatacatcaggcgagccttgggccaagggcagagcgtaaagtacctgattcccgatgctgtcatcacrtacatcaaggaccatggcctctacaccaagggcagtacctggaaaggcaaaagcacccagagcactgagggcaagacaagctagggaggggggactcagcacccacacctcctccaacaagctcctgctggggagagggctgttaaggtttctgttttactttggtttttgcttctccatttttcatttgctttatttctacagtgattctacttctgaggagtcttctgtcccaggaagagataccttctttacaggagaggaaaggtctaaatcacaaggatagacatttatcaaagaagttaaaatggtgtggcaggtcattaggattaggcagaatctctcagagctgctggacaaggaggtctacttattttgtgtggatggtaattatggcatgcacgctgaatgcagttctgagcatggcagcggcccctgagggtcagatcagaattgcccacaatgtgttttttaactaggaccaggtgcagcatgctagtcttgattggaaagatttgacaggatgctaattactgaacagtgggttttgtcaacgccctggtttcagaatatgaactgaggagtcaaacagttggaaacagcacattgctgatttacactggatcttgccttagaaaccattgtctgcctgcctaaccagcytttcataaaatttaaacaaaactctttctacgtagtgatcctcaagcaatatttttgatacagcaagtgtcaaacttgctatagcataaaagccggggctcctgatttccaggtttctaaaawkgaactgaggtaaaacagatgcctgaccgttttaaaggatcttttttaatgttttatgactgcctgtctgtttgaatactggcaaagggataaataataaattgacatcaaaaagtactaatgaaaaatttctcttttttcttcctttgttatattattaatgcctgatgtaccagctgttgctcttctttttagctgcttcatgaaatttgctactgttccaattgaactggcatgaatttaaaagtttgtgtttccaggtagtaggaatggaggaagcaattgctttttggtgccacacaaacggccttctaaaagaaaccactgggccgatagctcttttcaggtaggtctctgaaatattagaacaggggcctcatgtgcatgtaggatttgtcattccgttaccaaattagggaaaggttttgattggcctaattatgtttgggtttactcattatacttgctgaccacatgactgaatgcattcagaatttacgtctccatggttttactctggttcatccttgctacaggtttagtcatgcagaaaaacaaagggcccgttaggaagaatctattttctcccccsccgcaaaacatctcagtgtttgcatatgtgtcatgaagtgaagtaggaaatcaggattttctggatccagcaaggtcagggtggggagcagattttgatccctgcaaccactgaagctgccagccattcctcaccctaaatgaactctgcactccaagaggtccctaaggaccctgagaatccagggggataggaatcagacagccttgtccaaaagctgccacagcaagctgtgtgactttgactaactcccttcccccactgtgagcctccatttccctgcctctaaaatgggaggtttaatcagacacctctaaattatcttctagttctggttttctaagactctgagtgcctctgacttcagcctacccagccttctttggatccagtgcatgtctagccagactggaagctccccaggggcagagaatctttgtttccagggtcccagaaagggccctaattatatggatctctaatttcaaatcaataatttttattcttatttctggaaaagggccttcaaaattatacaaggttttgactctacaaaatggatttgccatttgccctgatgacagtgtagacagaagggaagtgacaatgtatttgagacctgaagggtgagttcacaagatctggggatgggtggaggcagctggctttcaggaagagggaacatcacatgcaaaggccttgaggaagaagaggccaaaatgtgcagcatgctgagctggattcatcatcacttcctggagaaggggtaccttattgcatcatgcacctgacagcaggtgtctgaagcccccatgcccctgtccaggctttccataggctcagggcaccaagtccaaccagtctggaggtgatgtcatcatctccctgatccatgtgtgcatcatgcagcccctaccaggcaaaacatccatttctgagcctttatgttgtctctttctaaaataaaacaacaaaacctacttcattaaatacatatataaataaaacattatatgtcttaatttctgtactctcactttatctcattgattcatgtagcctcctttttttagcatcagaagagaaatatgtatcactgctgtgctcctgacttattgtgttaacactgacctgcatacctgattccacattcctttccgttccctcgggtcttttctgcatctgctttgccagggtgttttgtttattttgcaagaacagaaaaacagtggtttgggctcctgagtaaatagaatttccagccttaaataaaggttctcctgtgatagcatgtagtgcccaaatgagaggagctctgtatcctakcctgaggaaaggatttttcatttataatactgtctgtgtcacttgggacggaatgatgtgaaatcccatgttaaaccaacagcgctccagatttgcaaggtacatttggtaattgggttaatacatgaatatgaatttccttatccccatcctcacactttstaggctaacagtatttctgccctccctttctgcaaggatcttcatgcacagattgtgttcagtttcagtcatgaagttattttcctggatcaaaaattggcattatagatatacatgtgtgactaataaacaatctgtaataatgcatctaggcacacgcctcagagtattttagtattgttgaaataacctcatagaggattgttcatggcaccacagactgtgaggactagagggaatcttcaaattcatcttgtcctacatttccaaattatcaaatatgtaaatcccacaaatgaatggagtttcactactagaaagaataataataatgtgttctgtgcatgagtttggggaggcctcctttctgttcccctgttgaaaatctataatgtgtggagtgcgtgccctctcagtcctaccttctatacaccccctgtatggagctgcttttctccatcccttctgttgcttctccatccaaactgccatcatctctcacttggatcacccaacagcctcctaacaggatgccccaatccagtcctgacccctccagtccattctccacatagcaggtagggcagctgtatgtgtgtgcaaatctggtcatattacttcccttcccaaactccttctgagggacattaagaaaatgaaaagataagccacagactggggaaaaaattgcaaaatgtatatctaataaacaatttaaattcaggatatctaaagaactctgatgacaaaaataagaagactaacaactcaattaaaaaatgaccaaaagatttgactagacatgtgcgggagacgggaacacagcaggcctgatgttgctctgtagaagggtctgcctgtggagctggcctttgcctggcatctgagaacctggcttttggaatgttacctatgtttccagctgataaggctgttttgccttcccagggcactgaatcctacagtaccagcttgcctaaactgtttgtacaaacagtatgattaatggtgcacacctgcttttctcctaggagtttggaatttcagtaatcaccattggttgtgtggcagaagagtgcctacatcactaggccacaaaaaactctggatgtcgagtctcaagcaaggcccccaggcagaaacagcatgcactgttgctgcatttcactgctggggagagaagcatgttcagtgcaaaccccaccctagaagacagaactttaaaagcctgcaygtggacacctccagactctaccttatgtgcctttcctcctgttgtgtggtgtttcactatggtaaccattgcatggatgcaactgcctctgaggtctgtgagtccctcaagcaagtccccaaacaagatgtttcaccaaagaagataacatagatgaatataattagcacatgaaaaggtgctcaacaccattagtcattagagaaatacaaaccagaaccacactgagataccattttatgcccactaaaatagttcaaatcaatctagcatccactcttagatatctattaaaaggaggtaaaaacatatgtccactcagacttataggcaaacatctgtagcaccataattcactatagtaaacacaggaagcaattcaggtgcccctcaactgacaaatatataaacaaatgtattatatccatgcaatgggatactgttcagcaattttacaaaggactagtgatgcctgcaacaacatggatgaacctcaaaatgagctaagtgaaagaaaccagacacagaagatacatattaaatgattccattcacatgaaatttctagaaaaggcaaaactatagaagcaaaagcaggtcagtgcctgggaatggcattgacagcaagtgggcacaagaaaattttgggggtgataaaaatgttctaaaactagattgtgatgatagttgcacaactgtgtacatttactaaggctcatcaaactgtgcccataaaatgggtagatattgtgttatttaaatgacaccttaattaaggtgtttaaaagaaaaattcccctgagtttctcctgcttgcatttgaagtgaaaacccagctcctcatggggtggccacctccccccggcagctctttctgtctctgcttcatccatggggctttctccagtttctcaccccaccctccttcccatgagtgctccagcaggtgctgttccctctgcctggcacgctttcttgcttctccacttccttggagtaactcagagtcttcttcaactctctacctcaagtcacgtctcgcaggaagcctctctggctctgcccactgcagtcctacctccctgcccttctccttggggacactcatcactcctgaaactgttgactcttctcctaagtacagcttctggctcatagtgggtgctcaataaatatttcataaaataatgtctgaataatcatctgaattgttctgagaagcccatgataaacaaacctgtttaactttgtgtaaaccagtgtttctgaggcatgttttcacaaagaacccccaccttttttttttttaaatggagtctcactctgtcacccaggctggagtgcagtggcgcgatcttggctcactgcaacctctgcctcctgggaagaacccctttttatacacatatacttgatagtatgtgcaacacaatatttagaagaacagtttagtaagttactgtctaaagtttttttctagttttttttttcctgctacaaacaatgctgcaacaaacactcttatgcataaacccttagaagccagtgcttttgttggatagattcccaggagtgtttattgctatgttaaatggtatgtgtacattttattctaatagatcttaccagattgtagacagtagattttaagtaagttgatttttaaaaaaataaaaagcagaatcccatagagctgctaaaattctcatttccttattcctttccagagaatctccttcattatctttgagacaaacatgagcaaaatccatttatttatttcaacagataatctatgatgaagaatttcaggaatttatttgccacaaagagatagcaattcacgggcaaacattgttcctagcatttgctgggtgcctaagtcaaggattatttttaattattggcaaaaaggaactcttcaaactgcctaaataaaggaggtgggagcatcaggtatcataagaatgtcaagaatggaaggacccaatgacaggacatatgataggtttcaggagaactgggaaaaaaagaagaaattgaagttccctcctctcccctctctctctccctcctcctcctcttcctttctctctcccttctctctccctgtccttccctctctccctcctcttcccctctttctccctcttcttccctctgtccatctctttcttcctctctctctccttcctcctctctctcctttctctctccttttctctccctctctctccctccttctctctcttccctatcttctctctttctcttcttctctctccttctctctccctatccagcagccttaacatctatggccagatgaccctcccccttcacccctcatctcagtgtcatgattccaaattcccagagacatgcgctgtccctgaatggacttgttcatccttgcccatgtggccatgactggcaggtcggggccatatgtttcttcttcaaactgtggcagtgacatttctgtaaaggggaagagtaagtaggaagaaggaaatgataggcaccccaaacagttgagtaagtgccccttaaatcacaaagtaacccaagtaacctggcattttgtgcatatatcctcttactcctgttttgctagaggcagtagactagggtggcatgctggtggccaaaccacaccactggagggagaaaggaaagctggcggggatggcacctacatgtcagcccctcttcactgttctccttccactgtgggcatccagcacctgagcctggctggttgggcagaagctgggcctggatgagcctgacttccacaggggagggca

SEQ ID NO: 94685 - DNA, 126876 bp, Homo sapiens
  misc_feature (1)...(126876): n = A,T,C or G
ctggccgaaagtgtagatggtggtgcataggccacacaaagacagcttctgtttgtccctgagatattcctccgaggagggggcagctgtgagttatcaaccaacayggcagccaggggtcgggtcaaacaaccagtaaaagggatctgggaagggcagtatcataaactgtaaatgtctgtttgtaaaaagatggttaaaagactaaaaggtgggaattctgcttctgggacgatgaagtagatatgctttcccccgttcctcctgagaagtggaactaaaagccctgaccattatatgtaaacaaacatatgaagattctgaaggcagaccaggcaaggacctgcggaaccaaaaaactaaacttttgtgaattgcttgggttttgtttttttgttttatatattctaaacgggacactggagaggccagcaacctggaaatgccaatgaacacaaaccaaaaccaaaaccaaaacaaaacaaaacaacaacaacaacaacaagaagtcacaagaaaatcctagttttctctagtccagggacaaaggaaggtcagccaagcaagagagacaagacagaaaacatatttttttttttttttaagatggagtctcactgtgtcacccacgctggagtgcagtggtgcgattttccccactgcaacctctgcctcctgagttcaagtgattctcctgcctcagactccagagtaactgggattacaggcacacaccactacgcctggctaattttgtattttttgtagagatagggtttcaccatgtgggccaggctggtctcaaacttctgacctcaagtgatccacccgcctcagcctcccgaagtgctggggttacagggatgagccactgcccccagccaacaatacatttcagttgtttataaattatgcagtcaaaggaattttactatagcagccaaactaagacaggactatgtatgaatctggaagttatgggtttgtgttcttacatgttcaagtaatttagtctttttattgggattcattctttagttttactaccttcaagttggctttctgatgttttaacttagacttttgaagttatttcagttgtgctttcatctgcatctacaagtaagctatttcaactagttctttgaggcattgtggaaaaataggtctttgtcagagttccttgttaatttaagcctcttattaaaactttctcactgaagccacctgaattcaagtcagcctcatcccttgtgtgcactggtggttttcttttcttttctttttttttgagatggagtctcgctctgtcacccagggtggagtgtagtggcgcgaacccagctcactgcaacctctgacttccgggttcaagcgattctcctgcctcagcctcccaagtagctggtattacaggtgcgcgccaccaggcctggctaattttttttgtatttttagtagagacagggtttcactgtgttagccaggatggtcttgatctcctgacctcgtgatccacccgcctcggcctcccaaagtgctggggttacaggcatgagacaccatgcccggcctttcttttcttcttttctttttttttagtagagacagggtttctccatgttggtcaggctggtctcgaactctcgacaacctcacgtgatccgcccgcctcggcctcccaaagtgctgggattacaggtgtgagccatcgcccccggccgcactggtagttttcaattccagcatgtcagaatacctggggagcttttaagacatgtcagtgcctgcactccatcccagatcaattaactcagaatctccaggggtattataatattttaaaagctccctagggattctaatgtgtaccactggacttgttttagctgagagtcactggatttcaaacacaaaatctccttaattagcatctcctttgttctgagtacctcagacctaatcagtactacccttattccacgttcgttgtttattttccagctcctttctttctttgcctttttgtaaatcacttccactcacatcacatgagaaacagagttttcagtctgggtagataattctgttttagtcaattcacaaatgtagtttgagtaatttttgtttttgtttttatttttatttttgaaaccgggtcactcgggggattgcagtggtgccatcacaactcactgcagcctcaatctcctgggttcaagcaatcctctctcctcaacctccctagtagctggggctacaggcatgggccaccactcctggctgatttttaaattttttgtagaaatagggtttcactatgttgtgcaggctaggctcaaactcctgggctcaagtgatcttcccgccttggcctcccaaagtgctaggtttataggtgtcagccactgtgcctggcctaatttgggtaaaattttatttttccatataacttctgaaatttccatgggaaatcactcttgataatttatgtaaagttaaaaaaaatcagatgatgtttttgaatgtacatcaattattgttatttgggggctttttttcttctgtttttagcaatattaaactgaaaaaaaaaaccacttcgagtatggcacatcttccttaaaattctaaatattatattttaaaaacttttaaaattcataactaagttgattaaaatcagggaatcctttgtaggacagaaatgtcaaacatattctagaggattaagaaaagcactagacccaaagttttccatagtgatgcctgctgttccccctggagtctagagcatggattatgggctctgggggataggaatctgttgttcccagcagggtgagaagtaagatctaaaattctttgcataggccaggtgtggtggctcacacctgtaatcacagcactttgggaggccaagaggggtggatcacttgaggtcaggagttcaagactagcctggccaacatggtgaaaccccatctctaccaaaaaatacaaaagtgagctgggcgtggtgatgcccacctgtggtcccagctactcgggaggctgaggcacaagaatcgcttgaacctgggaggcggaggttgcagtgagctgagatcgcaccgctgcactccagcctgggcaacagagtgagactctgtctcaaaaaaaaaaaaaaaaaatttctgcagaaagccaaaacccaagaaaggcagcactctcagtgaatgaagcagagaaatatctgtcctgcagattgagacaataaggatgcaagcctgcacaaacctgactctgggtatctagcataattctactacttacatattttttaaaaagccaaagattaaatttaaagtgatccacaattggtatgtctcccaggtaactggcagaagtatgtgtaaattttatttggaggggtttgctcagaccttgaagaatttttttttttttttgagactgagtcttgctctatcacccaggctggagtgcaatggtgttgtagcaggatgagctgcagacaaaacttctcagacaccgagttgtagaaggaagggctttattcagctgggagtatcagtgagctactatctcaaaatccaagctccccaaatgcacagtttctgtcctttttaagggctcacgacactaaagttttcgtacgaaaggatcgtggttgactgagcagtctaggggatacgtaacaggggtttcatgcactggtattcagaaagaaacagaacagggcaaggagtttcacgatgttcttctatacaatgtgtggaatctatgaataacatcagtttctaagttatgagttgatttttaactactgggttgaggcctggcaggcccaggcctggtttcgggcgtggcgccgggctgctggtctttggttttacttccttgtttttttttttttttttaaaaaaaacaagtactgagtataatacaatataaaacaatatgagagggtctctctcttcccaatatgagagggtctctctcttccctcagtgtgatcctggctcactgcaacctctacctcctagattcaagccattctcctgccttagccttccaagtagctgggaccacaggtgcaccactaggcctggctaatttttgtatttttagtagagatggggtttcaccatgttggccaggctggtctcgaactcctaacctcaaatgattcggcctgccttggcctcccaaagtgctgggattacaggtgtgagccactgcaccctgcctccttgaggaattatcacagacaaaattccaaggaacacgagtttagacacaatacagatggaaaatgcttctggtattttaatattagttattatgataactgttagcataaacatctttaatatttttgagaaatagccttctattctccattttcagagtttttctgaaaaaattagaaatgttgaacatttaaaataaattatatattttaaaatattctctaggcttttggtaggatgacataaaactttcaattcctttctaattatttttctgatttgatcatagttcacctaataataaaaacagaatagctttgtaagagatttttctagtttagccttttcccagcaaaatgctgaatttaaattgggggctatattagaacatctaaatattttctctgaatagtatttattatgtgccggcactattctaagtactttacacatattgacttactcagtcctcaaaataaccaaataggttgttacaattattatctctatcatacagatgaggacatggaggcacaaaagggttacgctgtaatcccagcactttgggaggcggaggtggacgggtcatttgaggtcaggagttcgagaccagcttgaccaacatggtgaaaccctgtctgtactaaaaatacaaaaattagccaggtgtggtggtgcaggcctgtaatcccagctacttgggaggctgaggcaggagaaacgcttgaacctgggaggcagaggttgcagtcagcagagatcaagccactgcactccagcctgggcgacagagtgggacactccgtctcaaaacaaacaaacaaacaaaaaatgggttaagcaagttgcccaagatctcacagctactaagtttcaaacctagactgactgactccagagttgcactgttaacccttaagttacactgcatctgagaaagttctttcttggctgcaatctaggggtctctctctcttttttttttttttctttttttgagacggagtctttctttgtcgcacaggttggagtgcagtggtgcgatctcggctcactacaaccaccgcctcccaggttcaagcaattctcccgcctcagcctccagagtagctgggattacaggcacccgccatcatacccggctaattttttgtatttttgtagagacggggtttcaccatgttggccaggctggtctagagctcctgacctcaggtgatgcactcatctcggcctcccaaagtgctgggattacaggcgtgagccaccacggccggcgagatctcttttatttctttaatagtactcttcatttctgcccgagcatatggcacacttcattaactgacttgtttaatgtctgccttattctctagactctttctctttgagagcaggaaccattttatgccatttcactgccatttacccagtggctagcttacagtagatactcagtaaatagttgttgattgcgtaaaaggccaagagaaaaatgtttcattcacggagtaatgtcgccatctcgtggaactttagaatattgtcatttaaatcaaaaaaatgttttcacggaaggaattgatggttcgaatgctattttccagattgtattcgagtgttttttttttttttaattggactggaccttttgagatttttagtgctctagaactgcacagcctcttcaggtcaggcttagggcctactagttttgcttggtgaaatgaattatgcaactaggtaatgaatggycaccgttttacgttcagaactcgttcgcttctacctttacaaaagggacaacacagatgcattactaagctcttggctcataacgatccctggggtatattcagagccccttcctcgcggcgttcatatagtgtctcaggggtctgtcagccagcaatccccaattcctcattacatattcctcacaatgcatgctggctaaaatggaaattgtgttcagaaatagccctgccctaccatcatatactaggagaaaggaggaaattatgctctattagaaaccctaggctatcttgcataatgyttctcaatctgaaataattttttacagaataccaatacgttaagaagagctacttccctgatctacctattatgggcagcccattttatgaagttagcatggccttcctattcaaaccagaaatggacaaaaggagaaggaaggcttttaggtcagtatggttataactgtagattctgtattcttcctctttaatctatctctcatattaaccaaccaggaggttggaggccggaagtcttagacgccagcgagagccgctccttccccacgagtctatggctttcggsttacttaagccacggagaactctatggttccggggcgggccgggaggtttgagtttgaagactggcgggaagatgtccgcagctgttgccaggccagggttctcccgagagggaggacgctgggactstggcttgccctgatcggccgagaagagtttgccatgaatcttctgcgtcggagtgggaaacggcggcgttcagaatcaggctcagattcgttctcgggaagcggcggtgacagcagtgccagcccccagttcctctccgggtccgtgctgagcccgccgcccggccttggtcgctgcctgaaggccgcagctgcaggtgctccaggaacccgggaggccgcgggcaacgggggcagctccgccgggccatgggtcgggaggtgtcctcaccccacgggacttgcttcgttgcataccccattgggcttctactccccttctctgtgactggggcctggtgtggcaggtcactttctgttcagacatacgcgtgttttcagtgatcgcctggtattaatgttcacgtggcttctggatctttcgacctttagagaaacaacttcctagttagcttcatcccatcatctgttgggcggctcgttcctggtagtacccagtactccttacagacccttaagacaggattgttgggcctggagtacggcacaggctgttcggcgtccaggggaaggctggaagggattcgtaatgagattggttgggtgtcccgtggatgtcgacccagttttttaaaatcgttagttgtgcagtcgtcatggaactaaaacttactataaatagaaactcacctaacttagctttgtaatgcttgcatattgccctcctcccccaactacacccgtaattccaacactctttatctactgtgtattgcacgcttttttgttcgtttgaggcttttaaggaatttttattatatgcagtaaataacaatttattacttttctatacatggtcaatttctcataagattcttgaagtcaggatgtgctttaaagagcttcatttcaacacataggaattccaacacacggtgaagggctaactgtaaaactcatatattagaagtaaattaaattttaattttttctttttcctaaaaggagaatgcaagcctacagttcctgactacgaaakagacaagctactattggcaaactggggacttcctaaagcagttctggaaaaataccacagttttggtgtaaaaaagatgtttgaatggcaggcagagtgccttttgcttggacaagtcctggaaggaaagaatttagtttattcaggtatccaaatttatgtaaactaattactatttttaagatatgaatgtaaagaatactctattgaggtagttgtggttcgtttaaaaggtgaatgaggcagtgctttataactagagaaaatcgtacaatatgtgtgaaaagtggagttttatttatatttaaattacaaaagttttattgtttgactggggtggagggaagcaagaaaaatgacaatttaaagagtgggcaattctgcctgccattattctcaacaaacatatatcccagtgagtgtgcaatgggagatgtaaatctgcccttcccctgtttgatcctggttgcttttcagggtatgagcattatcattacatgtttgttaatttaccttttttttttcttgagatagagtttgtctccaggctggagtgcagtggcgctatgtgggcttactgcaacttccacctcccaggttcaagtgattctcctgcctcagcctcccaagtagctggaattacaggtgtgcgccaccaggcccagctacttttttgtatttttagtagagatgggatttcactgtgttggccagactggtcttgagcttctgacaagtgatctgcctaccttagcctcccaaagtgctgggattataggtgtgagtcaccgtgcccagctatagattgacctgtttgtacagggttgtatatacaaacaacaagtaatatactttatataaaatttttatgggttttcttttttttttttgagatggagtcttgctctgtcgcccagactggagtgcaatggagttgtctcggctcacggcascctctgcctcccgggttcaagtgattcacctgcctcagcctcctgagtacctaggattacagatgcccgctgccatgcctagctaatttttgtatttttagtagagacggggtttcacatcttggtcaggctggtctcgaactcctgacctcaggtgatccacgcacctcagcctcccaaagtcctgggattacaggcatgagccaccatgcccggccctatatgggttttcatgggcaactatggcatacacaatttttaacgcatgcttactacactgactttaaatctaatcatttggtaagatgcaattcctttgtgtcagttttctccgaaattatgagtcacacagatttttcattatggctgtaaggacgaattaaataattatcagcagatataagttcaggcagtggaattagactggttggatttgaaaactatcacttactggctatgcagcctcacagattacttaggaagagtgagagagtgtatatgtgtttgtgagtatgtgtgcctcggtagtacttagagttgattaaattatttcatatataaaagctcagaacagtttttggcacatagaaagtacttgtattgtgaaaaggcattacaaaaaataaaatacttgtaaatgctaagaagtcatagttagtggcagtggcataattgcttgaccatttcaattgcttgaaactgaaacttgggtatcattcagaactctggtcaccagcttatacaattaatcaccaagtcctggtgtctgttacctcatatatctcttgcttctgactcctttctgtttttaggtccattacctggtacagctcattatcatctttcttctagattatgcaatagctttgaaactagttcattcttttcctctgatcttgccctgctcctgcagccaaagtggtcttttttttttgatggagttttgctcttgttgcccaggctggagtacaatggcacaatctcagctcactgcaacctctgcctcccgggttcaagtgattctcctgcctcagcctccggagtagctggaattacatacaggcgcccgccaccacgcccggccccaaagtggtctttttaaaaaaaatttttgtttaaattttttgtagagatgggggtggcactgtgttgtccaggctggtcttgaactcctgggctcaagtgattctcccaaagttttgagattacaggcatgattcactgtgcccagtccaaagtgatctttataaagtacaaatatgatcttgtcactccttttcataaaactcatcagtcacactgcattgctttcaggacaaggtttaaactccttaaatggtgggattataaacctttcttgtggcactttcatatctcttcttttatacccctggggtactttatactccatgcttactaaattaccttctgtgtcatctgaacatgccaggctttcttctaggcctttgtaccatatgctgtttcttaggcatggcattcctttcctcttcctttcttttttctttttttggaacagagtctcactgtatcacccatgctagagtgcaatggcgtgactgcaactcactgcagcctcctcttcctgggttcatgtgattctcaggcctcagcctcccaagatgctgggattacagacatacaacaccttgcccatcgtggcctcctcttgctttcttccttaccttctcataaattctgtttcatttccataagattccttgcaacttttttccttccacttcttttttttttttttcctttttgagacggagtctctcactgtcgcccaggctggagtgcagtggggtgatctcggctcactgcaacctctgcctcccaggatcaagcaattcttgtgcctcagcctcctgagtaactgggattacaggtgcccgccaccacgcccagctatttttttttttgttatttttatagtaatagagatggggttttaccatgttgtccaggatggtttcaaactcctgacctcaagtgatcccccggccttggcctcctaaaatgctgggattacaggcatgagccaccatgcccagcccttttcttcaacttcgatcatagctcctatcataataaaattgttcatctacttcctcaaagcaggccttttacccatttggtacttaaaggaaaggatctttaggtataaactaggtactcagtagtattcatcatattgctgatataaagatttatttactctgtttttagttgagactattaagacaggtggtttaaagtaaagggcatttcagggtataaagattttaagtgctattgggcccttagtgattggttagccttaggctctgtagtactacacatggcttaaaacatttattaatgaattgtaccraatattacttttttcttataatcttgtggaataatcatgttttagctcctacaagtgctgggaagactcttgtggcagaattacttattttgaagcgggttttggaaatgcggaagaaagctttgtttattcttccctttgtttctgtggctaaagagaagaaatactacctccaggtaatgttttttactaagtttgaaatagtgaaaggctcattattggcagtcttggtttcattcatttgaaatagaattataaaagcaagtggaaaacaaagtttcttcattgtgccctatgtagctttaagaggctactgccaaaagcattaaaaatttacagcaaggggctgggtgtggtagctcaygcctgtaatcccagcacttkgggaggccaaggtgggyggatcatctgaggtcaggagwtcgagaycagcctggccaacatggggaaaccccatctctactaaaaatayaaaaattagctgggtgttgtggcgcacacctgtaattccagctactcgggagactgaggcttgaacctgggaggtggaggttgcagtgagccgagatcacgctattgcactccagcctgggcaacagagtaagactctgtctcaaaaaaaaaaaaattaaaaaaatttacagaaggaaattaaaagaaaattattattgcattaaggagaaggggccatcaaatcaaaagaataattggtgaaaattgtgtaaaaatttgtaaaccttttcttaggaaataaacagaatatttaaactagcatataaacacgcacattaagaatcagcatttaactgaacagtaggactagactgaagcatagaaaggaaagagtgtttaaggaagtgtatcctgccctaattgaggactatttaggaatatttaggggatgaaggtcaagatccattggtgcttaggtaaagctccaggtatgtgatctgttcctctgttctgcaaaaatgactaatagtagtttacatcaatatgatgctcacagtttttagggcattttcacaaatacaatattttattaaatggaataaatttactgttgtgatttctgcagtgaaaaatatgtgcttttgaaatggaaagattgttatactgattgttaaagaaatgtgggttctagtcccagttttgccactaactatgtctttaggccgggcatataactggctgggcctcagtttttttatttgtaaaattaggatgttaacccttagccctgtgggttaacttagtaaacactcaggaaaattttattgaatgaatagctctaaatttctatggttctataaatctttttaatagttatttcagaggcacagtagccaacaaagctggtcatacatggtaacatcactcaacttagacccaaagtaacgaaatgatgaaaggatcctttttattgaaaggtatgttagttaaaagttaaactaaaaaaaaaaaaattattattaaagtcccactgaatttgacttttaaaaacttttcttccaattacattaaaaaattggtcattagtaggataatgagactattttcctcatgaagtataaatttgtttctttaagtgttatagctagtttcttgctatttattagattaaaaatgttagtgcttaaggtagtttttctccaattttaattcctctaaatagctcttagaagtttttagattattatgctgtcattaaaatggcataattttatttgactcttaacagttttgtcagttctaaactttatatttttagtatatgatctaaaaagaaccagtgtgtcctggccagaaacaactgatgacagtaatctggtagatgtctttagatacttatgtctatgttctgggatagaaccagtttataactcttgaatttcaagttttttcacctgtattgttcctttttactcaattcagagtctgtttcaggaagtaggaataaaagtagacggttatatgggcagcacctctccatcaaggcatttytcttcattggatattgcagtctgcacaattgagagagccaatggtctgatcaatcgcctcatagaggaaaataagatggatctgttaggtaagaaagttagaaaataagtaaatactttctattgctatttttgatggaatgaagtggagctgttgtgatttctctaggtcccatttgttttcctattgtctattatctacttctggaggcaaggattggcatctgtaatgttaggaacgctgtgtttataagttttgtgtcctgctgctgttattgactccgttacgttgcatttttgtactttacaaaacgtagattatatccttgagccctcaataatttctccttgcttctttcctatctaaactctaccaggaatagaaggargcctgctgggccagatctgccattttgtggttagtgtatatgggtttttgttattatattctgctgctatgatgtctattttgggcttggacccagagtctgtcatttagcatggaaatggtaggaagctaaagaaactgacactctatttgagcttgggattgtgggaagattttctatcttaatgcatttttttgccattatggaaaggccattatgtagaggtagcaacaggaatagaaggattgcagcagcagaagtagcaagaatatcagctaattattgagaagctggtgaacttaaaaataccatggtaaagttatggtagggtaggggtggagggtgggaatcagacataggctatgctccataaagcttggagagagaaattgcaattgatttgtatcagaattgtcttattacttgtgaccccattggactttaaatatttgagagttgcaatagactcgtagtaagtgctatttccaatgtacctagcacagtgcttggcacacggcaggcagaatacttttttttttttttttttggtgaatgaatgagtaagtgctaaaataactcatcagacagtacaattttggagacagcttattgataggaaaaagaacatcatgtgtcattaggaartttcctattgtctccttaaattccttttcaccagaaagttgtcttttggtggggagaatttggggtggggagaataccagtacatgtggaaactatgttgttatgaaaatgtttaactaaagaaagtattagttgatactgaattttcagtaattcttaagaattattccaagtatatacattggttaamttctccaagtagtgaaggacattgtgatcatatttatgttttgcagtatgatgactcactagcttaccatattaaaaaaaaactcttaaaattgtctttttcttctggaccctcttatgttttttctaagctactttctaacatgagtatgtatgttttcccactgaaaagtcaatacattgaaaactgacatagatgtctttgatatttcattgtatgtttatttcggtgaagttgccaatttagaagagtaatgagaggcagttttccctgggtttgtttagccctgagtaagctaataattgatttttagatcagtataccttgtagtacgactgcctgtaatacctgaaacatcttggaaaagaattgcccattataaggaatatgatttttgatttatggtttgaagtttgcatcacttgcaatgtattatatagtgtattatatcttatatcactgtgtgggaaagttagaaaataagtaaatactttctattgctatttttgatggaatgaagtggagccgttgtgatttctctaggtcccatttgtttttctcttgtctattatctacttctggaggcaagaattggcatctcaatatcttatttcaaagatattgagtcttttaaatgtcttcttggcgcagtcataaaaagaatgaaatcatgtcctttgtagcaaagccacatggatgcagctggagccattatcctaagccarttaaygcaggaacagaaaaccaagtaccacatgttctcactcgtaagtgggaattaacctttgagtactcatggacataaagatagcgacaacagaaactggggactactagaagggaacaagggttgaaaaactaactatttaataatagggtactrttgctaagtacctgggtgatgggatcatttgtatccaaacctcagcattacacaatatacccaggtaacagaccttcacatgtacccccaaatctaaaataaaagttgatataaaggaaattaaatagagtgaaataaaggttggaaaaaaattcttcatggatgtgacattctgtaaaaacctagtatctggaaaatctttttaggaatggtggttgtggatgaattacatatgctgggagactctcaccgagggtatctgctggaacttttgctgaccaagatttgctatattactcggaaatcagcatcttggtaagtacgtgaaataactgagttcctgagatttcaaacaatgttgaggaagtgtctgaaaaatgcataagtatgagttaaataaattaagggagtgtaatatttttcttattgagaaaacttatgtatagtagtttgtttttgttccagaagtcagtccaggcatggtggctgacacctgtaatcccagcactttggaaggctgatgtgggaggatcacttgagcctgagttccagaccagcctgggcaacacagtgagaccccatttctataaataataaaaaaaattagctgggcatggtggcacacacctgtagtcccagcttctcagtaggctgaggcaggaggattacttaagcccaagagttccaggctgcaatgaggtatgattgtgccactttactctagcctgggcaacagagcaagaccatgtctctaacaacaacagaaaaagtatttcaggttgcaactgattttagattactgtgtaaacattcttaattttctgactgctcacctttcaatgtatacatttttattatagatttttaaaaatctagtttctgtatttgtcatctatatatatataagtagtcaggctaattttgaaaaaaatattatttttttagccctcacttctcagaggcaactacctttcaactcttctagctttttaaaaatatttacagcagcatctctaattgtggctacttaattttttaaatttcagaccttatatcttgacttttactatgaaagatgaagatctagctttcttttaaattttttactaaccactacccaatcttctcccttctctgcagtctctccttatcctctcattatcttcctattcttcaaatatagttatgttatgattttgcttagatcattattcagtgttacactattatgactatataaatgacattggtaactgggctatagtgtaatatgattacttctgcttttctaaacaactttttgttttctctgaaattaataactgtcttttttgtttgatggcttggttttccagatacttactgctaatttatccctagcctcctccccagttgtgtattctaccacatttgctattctgccagtcatcttcttgaagattttcctgaagcccttcaagttgttccaatctagataggtggttaatctatatatgtgctatatagcaatcatcttgggattcccttccccctaccaattttttgaccatatgtctgtcttgatttaccatctcattttggtgggaatatcttccaggaacttctactttatttcagtgaacacacataggtataaactttttgagaacttgcatgtctgaaaatgcctcataattctttcttttttttttttttttttgagatggagttccgctcttttgcccaggctggagtgaagtggcgtgatctcggctcactgcaacctccatctcccaggttcaagcgattctcctgcctgagcctcctgagtagctgggattataggcgcctgccaccacacccagctaatttgtgtatttttagtagagacagggtttcaccatgttggccaggctggtctcgaatgcctgacctcaggtgatctacccacctcggcctcccaaagtgctaggtttataggcatgagccactgtgcccggcctccataattatggactgtccaggtataaaagtcaagattagaaatacttttccttcagagttgtcaaggcattacttcattttctcattgctattgagaaattcagtgctatgctggtttttcatcctttgtaaacaattttttaaattctgtctgggaatttttaggcactcctctttttccacagtgctgtgaaatttcatactgatgtgtgttggtgttggtctatttttaatcattgtgctgggtactcaatagattcttttcagttaagggagaattgaacacatctctcttgtgatagaacaagcagataaccatctatatcccaaatcactagggatatagaaaatctgattaatataatcagcaaatttgacctratggatatatattgaacaattacctcaaaacagcagagtacctgtgcatttgagttacacatggaacatttatcaaaaagttttccatatactggaccataaagcaagtcttaacatattttaatggattcatatcatttattttctaacaatagtgaatttagctataagaaaagcataactaggacatgtctacatgactagaaataaacacatttttgacacacttttagatcaaaaaagtaatcacaacagaagttagaaaatagtttgaactgaaagtataataaaaatatctcttaacaaaacttgtgaagggcagcaaaagttgtttttaaaaggaaattgatagcataaagtgtatatattattaaggaagagagactgagaatcaattatttaattatccatcccaataacttagaaaaaaggccaagcatggtggctcatgcctgtaatcccagcactttgggaggccaaggcaggcagatcacttgaggccagttctagatgagcctgcccaacatggcaaaaccctgtctctactaaaaatacaaaatttggctgggcgtggtgatgcatacctgcaatcccagctactcaggtggcataagaatcacttgaaccctggaggtagaggttgccatgagccaagatcgtgcctttgcactccagcctgggtgacagagctagaccctgtctcaaaaaaaaaaaaagtaaaataatgcaacagaaagcttgataaactaataaaaacagagcaaaaaatgaaagaggaaattcactatccagacatttaaaaattctacaaatgaataagaaaaacacaacccactatatcaatggacaaaaaaacaggcttttgaaacagtatcggctgggcgtggtggctcacgcctgtaattccaacactttgggaggctgaggtgggtggatcacgaggtcaggagatcgagaccatcctggctaacatggtgaaaacccgtctctactaaaaatacaaaaaattagccaggcgtggtggtgggcgcctgtagtcccagctactcgggaggctgaggcaggagaatggcaggaacccaggagacggagcttgcagtgagtgggcaacagagcaagactccgtctcaaaaaaaaaaaaaaaaaagggtatccacatggttcatacacatgaagtgatgctcagtagtctcattggttatcagggaactgtaaattacttcttcaaagaaatactggctgggcacagtggctcacacctgtaatcccagcacttcgggaggccgaggtgggtaaatcacaaggtcgggagttcgagaccagcctggccaacacagtgaaaccctgtctctgctaaacatacaaaaattagccaggtgtggtggtacacacctatagtcccagctacttgggaggctraggcaggagaatcacttgaacctgggaggcrgaggttgcagtgagccgagacaggtccattgcactccagcctgggtgacagagcaagaccctgtctaaaaaaaaagaaatactaccaygtactgtctataactgccaacattaaaaagattgacaataccaagtggtgacaagattatggaacaatagaaaacacagattgtggaggtgttactttggaaaacaatgtgggattatctactaaaattgaagatmttctgtgactcagtaatctgtggctcagtaattttattcttaggtatatatcctaaagaaatgtatgcatgtgtgtaccaaagggcataaccaagaatattgttagcaacactaattattaatgtattatatatcttttaatgttcttttcatttgtttttttacagtcaggcagatctagccagttctctgtctaatgctgtgcaaatcgttggcatgagtgctacccttcctaatttggagcttgtggcttcctggttgaatgctgaactctaccataccgactttcgccctgtaccgcttttggagtcagtaaaagttggaaattccatatatgactcttcaatgaaacttgtgagggaatttgagcccatgctacaagtgaaggtaaatcaatatatgtacatcactactatttttatctgtgtgtttgatttcattttctagcaaattgctaacaaattctgaatgatgtaattgggagttacatatacattaggattaatattaagctaactggtttcctcttaaagaattggtggtgagctgggtgtggtggctgacgtctgtaatcccaacatgttgggaggccaaggcgggtggatcacttgaggtcaagagttagagaccatcatggccaacatgtgaaaccctgtcgctactaaaaatacaaaaattagctgggtgtggtggtgggcgcctgtaatcccagctactcgggaggctgaggcaggagaattgcttgaacatgggaggctgaggcaggagaattgcttgaacatgggaggcagaggctgcagtgagccgagatcatgccactgcactccagcctgggcaacagagtaagactccatcccccaccaaaaaaaatattagcggtgatggtgagagaggaaatgtagttgtacctttaatttaaataaatagttgtttcctgatatataatataaacatttaaaaaaaataactgatcttgtagcgttttctttttactgggaaaagattttcttatggtttagtttacactaactgctagtgtgcaagattaacttttttgttaaatggtaggtataatatatagtagagtgaaaatattatttttgtagtctgatagatctacctctgatacttaatagagatacttgatatggctgagatagtagttgaatcacaaaacctatctgaacctcatatcttcacctrttaaataggatattataatccctatcttgaatattgtaagaattaaatatgatttttaaaaattatctggcatctagaaagttacttgataaataagtaccctcccatactcccaaatacactttaatcctgaggttaaagaactgactcatgtacattggtggagtgaggcatctgctgtttttgtgcagagttgtgcctctgagtactaaaacagctaagggtcattttagaattggaaatagaattggaaattcatgtgtttcactaactacctaggtatgcatttgtagtttctgcatacttggtrtggaatcttgcttgctttgctctgtgccccatatttcgcctggctatgccttggttacttcaatacatttatgtgtgaacacattcatttgctctcctgttaatttttttcttcttttaccatgtctgtgcctccacccttttgaaccacttatatttcttacctggattattgaaatatttcctaattgttctctctgcttctgaccttgtccctttcagtctgtgcttacaggagctagtgatctatttaaaatgaacatcagatcatgttacccttcttctcagaaacttgcagtggctttctgtttcatttagaataaaagccagtgtcttcttagtagtctataaggtcctacatgatctacatcccccacccmtcttagtgctctgactctatctactatgttccctctcacttccttcacactggcctctgctgttttttaatacaacaagagtttctggcctcaggttctctttttctagaatactttccccttagggccatcagtgtggtttactctttcacctttggacttttttactcaaatgtcaccatcttagaccttccctggccaacttgtctaaattatagtgttctcccttacatggtctctatttcttttcccttagcacttttcaaaaccaaacatattattattattattatttttgagatggagttttgctcttgttgcccaggctggagtgcaatggcgcgatctcagctcaccgcaacctccgcctcccgggttcaagtgattcttttgcctcagcctcccgagtagctgggattacagacatgcgccaccatgcccaactaattttgtatttttactagaggcggagcttctccatgttggtcaggctggtctcgagctcctgacctcaggcctcggcctcccaaagtgctgggattacaggagtgagccactgcgccctgtcccttatgtattttacttacctcatatttgtaattatctatctcttcctactggagtagaaacattatgagggtagagctttttttctgctttgttcgcagctccatccccagtacctagaacaatatttgacaaatagtaaatatttgtttaatgagtgaatagatggatgcattaatccagtttttaatacatacattgacatacttccagtatggagaacttgcagggccaccacagtggattcacatgtgcccttttgttcatttgaaatgtgttgcctttctttgagataatgtttccccaccttcacatctcagctaaattgttttctcaggacaatttttctttcagatctttctgtcaaatatgaggcctcaaaacaccgtaaaactctcttttaatggtatatattattgttgtattttatatttatttatttagtacacatgctcttcgacttatgatagggttatatcctgataaactcattgtaagttgaaaatgcctttaatacatttaacctactgaatatcatagcttagcctagcctaccttaaatgttctcagaacatttacatcagcctatagttgggcaaaatcatttagcacaaagcctgttttataataaagtgtttaatatcttataatttaacgaatactgtgctgagagtgaaaaatagaagagttgtatgggcacccaaagtatggtttctattgagtgcatactgcttttgcaccactgtaaaataaaaaaaaatcataaagtccaatcattttaagttgagsatatctgtattttaatgtgtctcttggtgagactataaaccccttgactattaggatcttgactttctttttactcaatattgtattcccattgcctgagggytggagctcagtaaatattagttgaatgaatagtaagtatttctttcacctttcatcattaggagtttattttttcttctttttttcctttcttttgttattgactttgtaactgattttcattatgccttaaagaagaaaaagcttccccagaaaggaaaatgagtgcttttaaactgatgtgagaatcttttgaaaggaccactaaagtggttatttatctttctgttttagggagatgaggaccatgttgttagtttatgttatgagacgatttgtgataaccattcagtattacttttttgtccatcaaagaaatggtgtgagaagctggcagatatcattgctcgagagttttataatctacatcatcaagctgagggtgagttatggatggaaaggaaagccttcatgcttagtacatttgcttgaaagtaatggtagtgattatattagcaaaaacatggcttttgttcatcattgtcactgcctgcccactaggtggtatcctttttaccaaactgtgcttttgcgattctaataatattccgtccctagtatagactatgtatacacacacatgcttagactaatcagctttagatttttagaatactgggtatatactatagttctttatcagggatccatgggctttaagagtttgatctttggagcccctaaattggatgcaaaacttcacatgtagacatttctttggggaaagtaaccatatctttctttatatttccaaaggaatgtgtaactctgaaaagaatcatacacacatacatacatatgtataagttgacccttgaatgacatgggtttgaattgcgtgcgttcatttatatgtggattttttttcaatacataatnnnnnnnnnnnnnnnnnnnnnnnnnnnnnnnnnnnnnnnnnnnnnnnnnnnnnnnnnnnnnnnnnnnnnnnnnnnnnnnnnnnnnnnnnnnnnnnnnnnnnnnnnnnnnnnnnnnnnnnnnnccggcccaaatcttttattaagaattaaaatttctgccaggcgtggtggctcatgcctgtaatcccagcactttgggaggctgaggagggtggatcacctgaggtcaggagttcgagaccagcctggctaacatagtgaaaccccgtttgtactaaatacaaaaaattagctgggtgtggtggtgcacgcctgtaatcccagctactcgggaggctgaggtgggagaatcacttgaacccgggaggcagaggttgcagtgagctgagatcatgccattgcactccagcttgggcaacaagagcgaaactccatctcaaaaaaaaaaaaaaaattaaaatttccagcccagccaacatagtgaaaccccatctcctaaatacaaaaattagctggatgtgatgtcgggcacctgtaatcctacctacatgggaggataaggcaggagaatcacttgaacctgggaggtggaggctgcagtgagccgagatcacgccactttactctaacctaggtgacagagtgagaccctctctcgaataaataaataaatatttatcaaaacttaggcacacagacacagaccatacatagccccattcacagaagaaaaatgtaaacaaatgtaaagaggcagtgttaaatcataactgcataaaattaactggtatatactgtactactactgtaataattttatagccacctcctgctgctgttgcagtaagctcacgtgttgtaagtatgcacttaaaatatgacgcttatcaccttcatatgagcagtttgtgtctcataaatttcatattgcagtaaaaagtaatttatcatgtttcttgtgtacttttcatcatatttagtgcagtactgtaaaccttgaataataccatgggaccaatttgaggtgccactagtgatgctggaagtgttccgaagaagcagagaaaagtagtggcattctaagaaaaaattgaattgcttgctatgtaccataagttgaggtctgcagctgcatttactattttaagataaatgcatcgagcttaagtactactgtaaaaaaagaaggaaatttgtgaagctattgctgcagctttgcacattttatgaaatacttcttcatctgattttgaaaatgcagttttatgtggctgcaggatcactatatgaaaggcatacctgctgggtgaggtggcttatgtcaataattccagcactttggaaggccaaggcaggaggatcacttgtgtccaggagttcgagaccagcataggcaacatagtgagaccttatctctacaaaagttaaaaaattaggccgggcatggtggttcacacctgtaatcccagcactttgggaggatgaggtgggcggatcacctgaggtcaggagtttgagaccagcctggacaacatggtgaaaccctgtctctactaaaaaatataaaaattagccaggcgtggtggggcatacctgtagtcccagccacttgggaggctgaggcaggagaattgcttgaacctgggaggcagaggttgcagtgagccgagatcgtgccaccgcactccaccctgggcgatggagcgagactccatctcaaaaaaaaatatccaggtgtggtgatgtgtgcctatagttccagctacttgggaggctgaggtgggaggatcgtttgagcctgggaggtaaagggtgcagtcagccatgatcgtgccactgtgctcagctcagtctgggtggcagagtgagatcctgtcgccacagatgcacgtgcgtgcgcgcgcgmacacacacacacacatayagagacacacacgcacacacacagaagaaatacatacctatagactctactacgatttgagaaaaaatgaagtccatatggcaacttaaagcaaaaggatctaaagctggagaatttaatgccagcaaaagatggttggataattttagaaagaggtttatatgtggatttttttcaatacataatatattggaaaattttttggtgatttgtatgaatttgaaaaaatgtcaagataacaggagatgcaagaccaagaggctgcagatgagttccaagataccattaagaaaattattgaggagaaaggatatctgcctgaacagatttttaatgcagatgaaagtgccctattctgagaaaaaaaaattgccacaaagaacccatttattagtaagaaagagaagaaagcaccaggatttaaggcaggaagggataggctaactcttgttttgtgcaaatgcagttgggtttatgatcaggactactcatgtctataaaacagctaatactcaagccttagagggaatagataaacactggttgccagtcttttggttgtacaagaaggactggagagtgagaaccccttctctggattcgtttcatcgatgctttgtttctgaagtcaggaaatacattgccagtaagggactgccttttaactttcttttgatattgaacaatgccttgggccatccagaaccccttgagttcaacacttaaggcatcaaagtgatctacttacccccaaacacagcatctctaatttggtctgtagatcaaggggtcatgaggatgtttaaagctcattacgcactgtactctatggaaaggactgtcaacattatggaagagaaccccgatagaaccttgtgaaagtcttgaacgaaaatcatgaaaaagattgtgaaaatggcaaaaaaaggtggaggtatgaacgaaatcatgaaaaagattgtgaaaatggcaaaaaaaaggtggaggtaaagggtttcaagatatgaatcttggagaaattcaagagctagtagacaccacaccagaggaattaacagaagatgacttgaaggaaatgagtgcttccaaacaagtgccagatgatgagtaagaagacacagaagaagcagtaccataaaacaagttgacattagacaatttggcaggattctaattattcaagactgcttctgactttttttatggcacggacccttctatgatatcggcactgaaacgacagcaaatggcgaaaggattggtaccgtatataaacatttttagagaatgaaaaagcaaaaacaggcagaaattataatgtatttgcgtaaagttacaccaagcgtgcctgcctctactgccaccacttctgcctctgccacccctgagacagcaagatgaaccccttctgtttctccttcatcagcctactcaaggtaaagatgatgaagatggagacttttatgatgatctacttccagttaatgaatagtaaatgtattttctcttttttgttttctttttttttttttgagacggagtctccgtcttttgcccaggctggagtgtagtggcgctatcttggcccactgcaagctccgcctcccaggttcacgccattctcctgcctcagcctcccgagtagctgggactacaggtgcccaccaccacgcccagctaattttttgtatttttagtagagacggggtttcaccgtgttagccaggatggtctcgatctcctaacctcgtgatccactcgccttggactcccaaagtgctgggattacagttgtgagacaccacctattagtagttaacttttggggaagtcaagttgtgtgcggatttttgactgggggtttctgtgtttctaactcctgtgttgtttgacagtcaactctgtgtgtgtgtgtgtgtgtgtgtgtgtgtgtgtatttatacacaaatatacacgcacatgcatgtatatacaaatgtattttaaaataagctctgaggtattatttataagaaaatgtacccattttgtatgtatatgataaattttaacagatgcatacatctgtttaaccataatataatcaacacctagaacattttcattaccctaaaatattctcttttcttttgctgtctcttccctctattccagacttaggcaactgttgatctctgcttgctgtcactttagattacttgtgcttttctaaaaattccaygtaaataaagtcatacagtatgtatgtgtcttttgtatctagcttgctttcactcagcctggtgtgattgatgttcacccaggttgttaatttatcagtttgttccttttttgttgccagatggtgatctagtatatactaatggctataatcatagtatatatttttactgattctagagtgaacactgttgcctcactatttttactagtctgtggtgctcaagataaatacaaggaagacagggaccagttctagtcacagaatattaggatattttattaattaattataccagtcacatcatgaggataagtgatggaaatctcaagcctagctctaacaagtaaactttgcctgaagtttatattggctaggctgttgtctaacagtgtatcatctcttccagtttccccttaactggtaccttctacaccgggttagcttatttccttacattttaccatggccatttataatccttaataaccagaatcatcatcattttcttttcttgagattttgttatcttggtttgtagcagtggttcccaaatgctcctgcttggactggagcctggtctatgatgagatttttatcagaaaagtaaagacaaggcagcacattatttataaagctgcagtttacattctgaaattattcctactcattttttaatcttaaatgtctttttttgaagtaaaaatattgataggtaaggttttaaaaaattaattgccctcagcaaaataaaacattggcaactctctgtgattccttaaaattttttaaaaagtttacctaaaaatttaaaaatgtatgaaatataaggtacatatttaaatatacatatttttattttcaactgacatataataattctagaacatacatttatttattttcctttttgtttttttgtttttatttttgttttgagacagggtcttgctctgttgtccaggatggaatgcagtggcatgatctcagctcactgtaatctctacctcatgggctcaagtgatcctcccacttcagcctcccgagtagctgggtctataggtgcatgccaccatgcctggctaatttttttgtatttttttttagagatgggattttgccacatttcccaggctggtctcaaactcctggattcaactgatctgcccactttggcctcccaaagttctgggattacgggtgtcagccaccgtgcccagccatatatttactgtttatgaaaagttttacaagttcaaaaatccaaaagtctggaaaatttttaaagacaacatataagtatgtaaagcttttactgcatataagaaagttaaggctgggtggtggctcatgcctgtaatctcagcactttgggaggccaaggtgggaggattgcttaagcccaggaatttgaaaccagcctgggcaacctagggagaccctatctctacaagtgaaaaaaaaaaatgctagctgggcatagtggctcgtgtgtctggtcctaactaaccaggagactgaggtaggaggattgcttgagcccaggaggtcaaggctgccatgagcagggattgtgccactgtactccagcctgggtgacagagtgagaccctgtctcaaaaaaacgttaagctcttactgggggagaagacaaaaaacagagggtactatttaattagctaccagattaatgccaaagaggcaagaataatttcacagaggagtaggctttttcgtgacgggattggtgaaaccctctgatactgctactgctggttggtggtacacaccttgagcaagggttttgattttggggctttgagtggtaatcagtatccgtaatactctgcttcctcagcaggttcctttgatcccctcctgtgggcttcgtcttacccttacacagtttcctaaactttggcgcacattggaattgcctggggagatttaaaaattcttcatgtccaggtcacatcccacaccaattatataacaatgtccaggattaagaaccaggcatcagtattcttaaaagatctccagccgggcgcggtggctcacgcctgtaatcccagcactttgggaggccgaggcgggtggatcatgaggtcaggagatcgagaccatcctggctaacaaggtgaaaccccgtctctactaaaaatacaaaaaattagccgggcgcggtggcaggcgcctgtagtcccagctactcgggaggctgaggcaggagaatggcgtgaacccgggaagcggagcttgcagcagtgagccgagattgcgccactgcagtccgcagtccggcctgggcgacagagcgagactccgtctcaaaaaaaaaaaaaaaaaaaaaaaaaaaaaaaaaaaaaagatctccaggggattatatagtatgcagcagtttcagaaccattcccctgctatttagctctattatgatttacacagatacacttaaagaagctgagttagaagcaaatggtgttgataatttttttgtgacaggattggtgaaaccctctgaatgcccaccagtaattctggaacaaaaagaactcctggaagtgatggatcagttaagacgtttgccttcaggactggactctgtattacagaaaactgtaccatggggagtagcatttcatcatgcaggtatttcatatttataatgttattaagaaacctccaaaattcctcatactgtcttaacttttatatttgtgtacatttatttcttgttaaacacacttaatgtccttagatttctttttaagaaattgtgtgggctgggcgtggtggctcactcctgtaatcccagcactttgggaggccgaagcaagtggatcacctgagatcaggagtttaagaccagcctggccaacatggtgaaaccccatctctactaaaaatacaaaaatcagctgggcgttgtggcacgcacctgtaattccagcttctcaggaggctgaggcagggagaattgcttgaacccaggaggcggaggttacagtgagccgagatcgtgccactgtactccaacctgggtgacagagcgaaattgtgtgatagattaaagaagagtaaaacgaacctgtttcagtttacttatttctatatagtagtctccccttgttcactgaagctatgttccaagacccccagtggatatctgaaaccatagatagtaccagccccacatatatgatgttttttcatagcatgttaaaacttttaaatgcattagaaatgtgtgtgtgtgagggggtatatatatggtatatagtagtcctttgtgaggaatatgttccaagatcctcagtggatgcctgaaaccacagatagtaccaaaccctctatatactatgttctttcctatatagtcacattatatagtgccggtagtgtatacagcatggatacactgaataaagggataattcatgtcctgggtggtaggacatgcaatttaaaacttatgagttgcttatttctggaattttcctctttatatttttgactttgggtaactaaaactatagaaagcaaaaccacagatgggggaaaactactatatacacacacacagaatttacattgtatgtaatttatgatgcatactaaaaaagtgaacacctgtgtacccatcacttaattttaaaactagaaccccagccctttaaatttttaaataaaattgaaaatgagccagctaagtatatattctatacactgtttttcatttactcatgtttttgttcatcacgtatttatgtcagaggtatatctgaccaatgtgatgcataggccctgaagatatcttgatgaataaggcatatcactacccacaaggagttcattgtttagaacagtggttagcaagttacagtctgctggtcaagtctagcctaccatctgtttttgtaaataaagttttattggaacacagtcatgcccatttgttctgttgctgctttcatgtcacagtggcagggtgggatagttgcagcggagacctgctgttttccacaggaacaggaaaagtttgtggacccctggtctagaaaataaggtagaggtatactagaggcagcagattctactctttttttgttattgttgttgttgttttctcgctctgttgcccaggctggagtgcagtgatgtgatctcagctcactgcaaactctgcctcccaggttcaagtgattctcctgcctcagcctcctgattagctgggattacaggcacccaccaccatgcacagctaatttttatatttttagtagaggcagggtttcaccatgttggccaggctggtctcgaactcctgacctcaagcgatccacctgcctcagcctcccacactgctgggattacagacatgagccaccgcgcccggccagattatgctgttaaagagatagactgtgatgactcctttgtcaacagtcataacaatagtttcaaaaatcttyagaggcttgaagcagactctcaaatccatttgtaagtgaacacgtataatattttcgttatatatcaataaatatataaaaacctcctttttttaggtcttacttttgaggagagggatatcattgaaggagcctttcgtcaaggtctcattcgggtcttggcrgcaacttctactctttcttctggggtgaatttacctgcacgtcgtgtgattattcgaacccctatttttggtggtcgacctctagatattcttacttataagcagatggttggycgtgctggcaggaaaggagtggacacagtaggtaagtgagtttgaatttaattgtagcagcattgctgaaggacagtgtctacttgaaatttgactagtgtctggcaacctgtttctcatcatgctgtatttctttattatccaatgcactagtgtcatcattttggattcacttaatatttatagtgagtatgagttataattttctttttttttttttttttttgagacggagtctcgctctgtcgcccaggctgcagtgcagtggcgcgatcttggcccactgcaagctctgccttccgggttcatgccattctcctgcctcagcctcccaagtagctgggactacaggcgcctgccaccatgcccggctaatttttttgtatttttagtagagacggggtctcaccatgttagccaggatggtctcgatctcctggcctcgtgatccgcctgcctcggcctcccaaagtgctgggattacaggcttgagccaccgcgcctggcataattttcatatatatatatatatatatatatatcatcaactgttgattttctacaaatgttgaattaagtttttctttcgtattgtatacaataaaatgatttagtattatgtaaatcaagatgacttcttattacttagctggaagatgatttttaatttctaggtgtagtctactctttagcactaattaattttcacagatgttaattcaacttaggtgactggtctcagaaatcagacaaggatgctgggatgcaccctcacactttgggaataggaacttgacatcccatcttttttctcgaaattggtgctggctctgaaaaaacaccttttcatttttttttaccttgtatcagcaagttatgattgtttttaccagcaatccaaacaaaagttttgtcttaagcagtaaggaagaggtttgtttgaattaaatgtcaaaacggcagcaaattttatttctaacgtgctgtatcattatatgtaactaaatcattatcagccatctaacattgaagaaccttgggaggaacattccctgccactttctactctaggacataattgtcatctttctactgtaggacataattgactccagtattttattagatatgtcaaaaaaaaacaaaacaggcaaacagttctgtggctactgaagagaaattaggaaatccaggagaataaggaaagtggatgggaaatggatattctgggcagaggaagctgggtagtacactgaggaagtaacttttagaataaactgacttgtcacatgaagtccccaaatatgtcagttctcattattcatggattccatatttgaattttccaccttaacagaatttattcagaatcccgaaataatacctctggggcttttgtggacatatgcagatctgcgaaaaatttgaatctttccaagcacactttccctgctgtggttgaacaagccaaagctctgcgttcttgtttcagctcttatactgtgaacaagcttctttttaatgggctagttagtgccatatttttcacatttttgtgcttttagttggtgattttgctgtttaacatgacccccaagcaaagtactgaaatgstatctaatgttccctagtgccttaaggctgtgatgtgccttatggagaaaatatgtgataagttttctttaggcatgaattataatgctgttggctggagctcaatgtaaacaactatatacattaaataagatgtctttaaacagaaacatgcataaaacaaggttttgtattgatgaagtgatgaaaatgtttttactagaggcttgcaggaacctaatcatctrttttccttggcagcaagggttcagtattctgtgttcgtggcagctttatagaacatgactaccacaaataccaaaaattgaccgtaatttattggtatctggattagttagaatataaattcactgctgtaacaaaaaccaatacaataagtgtttaacaagatagatgttaatttctttctcatataacagtaaaattctattctaggccttatatgatgtaattgtaatttaggccttatatgatggctgtagtgtgtcggggacctagtcttctattttgttttaacattttcagcaatgtagtttctatcctcggtatatgatggccagtccagtctctgtcatcacatctgcatttcagccatcaggaagggaagatgaggaagcaaagagcatgccctgccctttaaggccgctgctcagaagttgcacatagtatttctcttcacatacaatgggccagaactttcacatgattacattccccaactataagagaggctgggaaatataatctttagcttgggtggccacgtgctccactaatacttaagaagatgtgcatggctattggaacagctttcagtctcagcaccagtaataaatgacccatttacaatccctgaagggcattggtcagcctttcttttaagccctgaaaattttgatgatttaaaaaaaaaaaacaaaacttccaatttgttggatttttcctacagctgacatcagagacgtttatcctgtttctctcttactttacctacagaatatgcagattgcatgtatatgcttaaaaagagttgagggaagagagtgagattcttccttcccattcctatttgcctacctctgtccatccccaattttcagtggactcacacctctggggaatggagtataagtccattttacatagataattgtctctcgggacagagggtcttttagttaatgtagaagataaggagaaataagacaagaaataagctgagatcttatttgccttgttatgttcttagcttatatttattatgggaaagaacaattggaaggttagtgccctgggctaattatcaagccttaaatcagacaactctcaaacagaactaaaatatactgtaataagttcatttctgaggtcttaaagacttccaagcttttgatcttgcatatcattgtatttcaggatgtcatatgacttgctcataacttcaagctaatgaagaatgtaggaatatagtggtttatattcactatggagacttaaatacttggtcatgctttttgtatcgtgtagcatcattggaaattctgtgcattttatattcctggacagcacatggtgttttatttagatgacacttcagtctttccatagactacttagaagcttctagtataggatgatggtgcttggtgccaaaatagcgatttgtaagttcagcagtcagtaataaattatttgattctaaataatttcaacttccctcttgtgatgtggatgagtcctccctagacaggtggttgcaggaacctgtacatatatactgatgttcatttggacattttataaaccttgcccattcaggaaaagggcagttcattttgttgaagaatcaaagccccgaaagacctttaaacagcccaaagtggcttgtttatcttgctgctaatgctagttgattcattttctargtaatttatatgtgtgtgttttctttcttaagctgggctgttttgtagccattgcaagagtcaggtgttatattcatgtgatttttaaaaattggatattgacaaattataattgtatatatttttgaggcacagagtgatgctatctgtatacaatgcaaaatgatggaattaagccagttaacatatcacccccaaatacttatcatttattcttcctgtctaactgaaacattgtactctttgaccatcttctcatccctccaactccctaatctctctctcttctgcttgattgagcctgctgctaaagctttgattgcatttttcagttcactcattgtactcttcatctctaagatttctctttcttttttattgtttctatttctttgtcaaacttcttgttttgtttgtatattgttttccaaattttatttaattttttatccatatatccttgtagttcattggacttttttaggataattattctggattctttctcatttcacagatcttcatttctttagggttcattgttggagctttgttagtttmttttgaaggtatcttggcttcctggttctttgtaatctgtgttcttgtgttggtatctgcacatttgaggagacagctacctctttggcttttataggtgttctttggcagggatagaacttcacttgtctagcctttgattctgaataggccaactggcagcagccctgagcaggcaaagcttgctttggattctgtagatagttgggctgctgcctttgctctgagtttgggtgggactgctggctgggctctgctatcaggtgaacccacaagctgagctctgcagtcaggcagagttgctggtttgrmactgcaatcrcctcttggctgggccccagagtgtattccttggccagatggtacccctatttgagatctgtacttggacagtgttgcaggctgggcctcgaggttaggtggagttgctattctggaccagtgggccagctgctatgctcagtggaaatgcatgattgagcatggtggctcatgactgtaatcccagtgacttgggaggctgagatggaaggatcgcttgagcccaggagtttcaggcttcagtgagttatgatcatgccactgcactcctatgtgagtracagagatcccacctctaaaaataaaataaaaaaaatgcacatctgaggtttgcctccctgcctaggtggggacttggagtgggctttgagactgaactgagggctgtttaaacttccacccttggcagaactagtccctgcactttgcaaaaatacagtatgataggcatcttycacctggggcaggtccttgaggctgagcttgagcactgtttaaaatcccaggtttggcagaactagcccctgcttctttccagaatgcactgtgatggtcatctcctttcctgggcagggtcctcatgagctttgacgctgggcctggaggctggccatctaaagattcaagccaggtagaatttcctascacttctagaagtgatcagtttggctttgtcctgggctacactgtttagctgttagctggtacctctgattgggcaccaccactggcaggtacacagagctaccaccaagatctrcatgctggttgccgtgagctctacctccttgctttgtttctgcctgaccccaggtgatctagccatgctgttacccagcatgttctctgtgaggcgagactggagttggcttcttgggaagcctcttggaatgctagggaagctctgtgttctctggttttcttttcccactgtagaagccatgagccctggggattcctttctgtgtgatactgtgctgacttaggggagtggaaggggtgatgaggtcaaagtgagatagtttatcttactatatcttgcaatttttatgtagttttgtggtctatgcataagtttcagacttattcccaagttttgggttttttttttttttttttggttattgttgttgttgttgtttttttttttaatacacggaattttactcttgttgcccaggctgtagtgcgatggcgcaatcttggttcactgcaacctccacctcctgggctcaagcgattctcttgcctcagcctcccaagtagctggaattataggaatgtgccatcatgcctggctaattttgtatttttagtagagatggggtttcaccatgttggttaggctagtcttgaactcctgacctcaggtgatccgtccaccttggcctcccacagtgctggaattacaggcatgagccaccatgcctggcctcttttttttttttttttttttttgagatggagtttcactcttgttgcccaggctggagtgcagtggcacaatctcggctcactgcaacctccacctccagggctcaagcgattctcctgcctcagcctcccaagtagctgagattacaggaatgtgccatcatgcctggctaattttgtatttctagtagagacggggtttcaccatgttggttaggctggtctcgaactcctgacctaagtgagccacactccttggcctcccaaaatgctgggattacaggcataagccactgggcctggcagttttggggttttcacaaaggtgttcttgtctgcagatagaagctagttgaagcttctggggaggggggtagtaaagcctcctaaaccaccatcttgctgacatcttgttttcctttttttttttttttttttttttttttgagatagagtctctctctgttgccaggctggagtgcagtggcgtgatctcrgctcactgcaacctctgcctcctgggttcaagtgattctcgtgcctcagcctcctgagtagctgggactacaggtgcgtgccaccatgcccagctaatttttgtatttttagtagaggcggggtttcaccatgttggccaggctggtctccatctcttgacctcgtgatctgccctcctcggcctcccaaagtgctgggattaaaggtgtgagccaccgcgcctggctgttttgcttttttaatggtgcctatctttataatcatttctgggataaacagccattgataatcaagtttataatcccttcactttatcctatcttgattctcagtttggcaattgggaaggataatctgtaccttctctttgcctcgggtggtaaggatattccagcactgtgccagttttatttaaaaaaaaaagtattcttcatttgtctttttgaacctcttacctgctttctttcccacagtattggattcatttttgaagaaaaattatgattctctctagtcataattgttgcaataatagtttgtatttgttcaaattgtatagttgtatatggctttaacatataagtgctttcatgtatttttgttcatttggttctcacaataaagcatttagattagtaaatgttgtaatataaattttgggtatctacaagtatttttgaatttattttatcatataactggtaacaatttacatttgcattttactttataggtttgaaagtacctctattaattacttcattattcaataataatggttaatcctgtaggggaagaaaaagacttttcctctactttcttaggttctgcagttgggacctgctaattaaattgacagattaacaggagaaaaggcatataaactttatttgatgctaatattttaatttttatgtacatggaagcctttatagaaaaggattgaagacctgagaaactgtttaacctggggtcttatataacattttaacaatgggcagtaaattgtggagaagcaacaagaaaaaggaaaaggtatctgggcttctaggggcaacaaattgtgagaaggtaaatatatggggcaaactaatggaagatagaagttattttagtaggtagagtttgtttgtgcagacccatctcagtgctgacctgtctccagtgataagggttgttgtcctgtgtgggagagggaatggaaaacatcatcacaaagggaaaaatttattcttgcttttaggcagatagggagaggacaaagagttctttctgtgtttgctgcttcccaatggccttcagctcaaaataatccttatgctgaagtggcatattttggagtggcatattctgatccccttctgtccaaagttcaaaaaatagccataattttattaccataacaaccactatcatctcttgtctgcttttaagcaaagtaaggcaacttaaaatctctttagcagmtatcttatggaactatattgggattttgcaaatgtgtatcttttggttataggcgagagtatcttaatttgtaagaactctgagaaatcaaaaggcatagctctccttcagggttctctaaagcctgttygcagctgtctgcaaagacgagaaggagaagaagtaactggcagcatgatacgagctattctggaggtaagagagaatttactaaattaccatttgctcttttatgcctaaattagtaaaatgttagtatatgaaaatcttagctttatttatttattttttttaatttatttttgagacagagtctcactctgttacccaggccggagtacaatggcatgatctcagctcactgcaacctccgcctcccgggttcaagcaattctcctgccccagcctcccgagtagctgggattacaggcacacaccatcatccctggctaatttttgtacttttaatagagatgggatttcaccattttggccaggctggtcttgaaccagccttcaggtgatctgcctgccttggcctcccaaagtgctgggattacaggtgttagccactgtgcccggtgctttatgttttttttgttttgtttttgagatggagtctcgctgtgttatccaaaatttcagatgaatttaatgattcatttctttttctttctttgtttttgagatgaagtctcgctctgttgccaggctggagtgcagtggtgcaatctcagctcactgcaacctctggctcctgggttcaaggaattctcgtgcctcagcctcctgagtagctgggactacaggtgcctgccaccacacccagttaattttttttttttttttttttttggagacggagtctcgctctgtcacccaggctggagtgcagtggtgcaatctcggctcactgcaaactccgcctcctgatttcacaccattctcctgcctcagcctcccgagtagttgggactacaggcgcccgccaccacgcctggcttatttttgtattttcagtagagatggggtttcaccgtgttagccaggaaggtttcgatctcctgacctcgtgatccgcctgcctcggcctcccagagtgctgggattacgggcgtgagcyactgcgcctggctcacccagttaatttttgtattttcagtagagacggagtttcactgtgttggccaggatggtcttgatctcctgacctcgtgatctgcccgccttggcatcccaaagtgctgggattacaggcgtgagccaccgtgcctggcccacttatttttctttttaagaaaatattttatctactttaaggagaacttttctgttgtcattaggtgttaccaacagttacagtgagtggtgatgggaaagtaaataaagaatctctacattaagattctaagaacatttaaaaaaatgagaatgaaatagcttgctttattttatattcagagggcttgcatgttttatttatttttttttttaattgtttttttgagatggagtctcgctctgtcgcccaggctggagtgcagtggcgtgatcttggctcaccgcaagcttcgcctcttgggttcatgccattctcctgcctcagcctcccaagtagctgggactacaggcgcctgccaccagcctggctaatttttttgtatttttagtagagacggggtttcaccgtgttaaccaggatggtctccatctccagacctcgtgatccgccygcctcggactcccaaagtgctgggattacaggcatgagccaccgcgcccggtggcttgcatgttttcttaaaaagctacagaaatttccaaatatcttctttcagataatagttggtggagtggcaagtacatcacaagatatgcatacttatgctgcctgcacatttttggctgcaagtatgaaagaagggaagcaaggaattcagagaaatcaagagtctgttcagcttggagygattgaggcctgtgtgatgtggctactagaaaatgaattcatccagagtacagaagccagtgatggaacagaaggtaagtgtgacttctcagttgcaatttactcactttttcttctttagtgaggktgtatgactgctcagtgaatggaaattgtcttttcatgtagtataaaaggaatttgattttttgagcagtgtatcaactcatttttagtaaatcagtattgtatttagcaacttcagaccattatgatagagcctgctcatacattttcatgctctggataaggtactatttgtaaaatttatcagccgggagggttagcatggaaaacagaaagatagtattttgttttattttattttgaatgtttgttcctctgtttcctcaccctaaccctaaaccaggaaaggtgtatcatccaacacatcttggttcggccactctttcttcttcactttctccagctgatactttagatatttttgctgacctgcaaagagcaatgaagggctttgttttagagaatgatcttcatattctctatctggtaagttstgttttaacarttatgtttgtgaaaatagggagaaaaaaatagatatataatcctgaacatcaaagataccctaacagaacatctcgtctgttttccatgcctaggttagtactggtgggaatagagaagaggtaagaagataattgttttaaagtaataatctaaatgttctagttacctttaaatttattttctccaacctcctttcaaaaaagatttgagttgttttataaaaaatatatatttttacaacgtataaaagaacagcaaagaaaaatgggatatcagaaaattaaagatcggatcatgatgtaaaactcaagcaaaggtcagtacacaaacatgcgtgccattaagtcatgtccaatgctgttgtcaactttgattctgggttttctagcaactaaaagaaagaggaaagcttgattagtgttaatattcataagataaaaaacaaaacaagtttaggaaaaacattgcatttccctgcctaagagaaatttagtcctaaaaggatactttggaacttaacattgtttgataaaaatctctataataaatgcaataaggaattttaagtttgtttatattagacaatgctctgtgaatattattttgtataacaaagatattaataagaattggatagtgtttaaggtcatgttctctggcaagaacctgatcagaaataattaattttgtcagttaagagcagatgcatgcattttgataagcaagtgataaggggaggtgagtaaaattgaaattctcattagaatgaagggggcttatcaggaaatgtgtttcaataaaaatcgctatgtagtgagcagaggggaaatgtctagacagtaccaattttcttttattacaaactcgcataatacatgggtgataataggctcaaaggtctgtgcccaagaatgtggctgggaggaatctcaaagcaggtttcaccggtcatctatcatggccttaaaaataagtcatttattatacagtggctragattgtgggctctaggatcagactgccttagttcaacttttggcctcatcacttagtaatcatataaccttgggtaagtatttaacctctcttacgattccatttcctcatttgtaaaatggagataataatacccacctcagggctgatagtctttgatgaatgtttggtatctgaataaatgtttaataacatctattatttctagtaaattctcccataaacattatgtaagtcatttgccaaattacctaactactcctactcctgttccctctctaaaacgtgaagactgttggcagtgttagtatgctgaatgcttgtggttagtggtcttgtatacttctctcaccattcgagttgtatgcccttcaagagttagttgtgttcccaaacttgttcatgtcagtttgcttctgagaaaattaggctgaggcagaaggatcacctgagtccaggaatttgagaccagcatgggaaacagagcaagaatctgtcgctaccaaacaaaaaaaaaaaaaaaaaaaattgtgtatggtggtgcatgccggtaatcccagctacttggaaggctgagacagaagaatcacttgagcccaggagttctaggttatagtgagctatgatcgtgccaccatgctccagccttggtgacagcaagagacctcgtgtcttaaaaacaagcaaaaaaatataagtgagataactgaaagctctgagaaaaagttataggaatttagacagggaggaaactaaaaggacactgctcaaagtttattttgcagttatctttaatttttatttatttatttattttttgagtagagtctcactctgttgcccaggctggagtgcagtggcacagtcttggctcattgcaacctctgcctcccaggttcaagcgattcttctgccttagcctcctgagtagctgggactacaggtgcatgccaccacacctggctaatttttgtatttttagtagagacagagttttaccatgttggccaggctggtcttgaagtcctgacctcaagtgatccaccctcctcggcctcccaaagtgctgggattacaggtgtgagccattgcacccagccaatgattatctttaatatctaacttcacattacaaaacagaaactggatttcttagacaatatattgtggttatggtttaagaaagccatggtaaattctaatcaacagactcatgctcaaaaggccttgacccctagctcaaagcattggcaattaaaatacatttatgttttaagttagacaaaacatttagtgtttgcatgtactattttatattttgaatatataaaacatttctgtgattcaaaagtcagaactatataawcaggaatagtcagagaagtctgactcctatatccatcccttccatgccttttccacctacctttcatagatgactgttttcattcattttttaatgtatctcttctcttttttaattttacagaaattatcagacatacatatccttcaccttttttatacagagggtagcatgctgtatacattatacctttttttttcttaacagtgtatcttggaaatcacttcatatcaattcattttttattcttttttataacctataattctgtcgtgtaggtggatgtaccgttgtttattctatcagttccctattgatggacatttggatcattttcaatattttcttgtggcaaattatgcttcagtaagtaacatggtacacacagtgtttagtttttatggaggtgtatctttaggaaagactgaaatgtaaaaccataagtgattttggtaaaatgtaaaaccaaagagtgaaatgtaaaaccataagtgattttggttttgcaaagttgacctctgtagagtttgtatcactttcctgttttaccagagatatattagagtagttgttttttcacagcttcacaagtagagagtatatggtcaaacttttgtatttttgagtgtagttttagtttacatttttttacattatgagtaaatttgaacattttccccatttatataaaatgtccagaatggcagtctatagaaacaaaaagtacctttagtgcattagtagttacccagggctgggggaatgtgaggaggttggatgaaaatggagagtgattgctaatgggtacagggctccccacctccctccccagtgaattgtccatgtcttttgctcattgttctgttgtgtgtgtgtttttttgtttttgtttttgtttttgttttgttttgtttttagttttaaaggtttttttatatattagggagattggtgctttgtggtataagtagaatgattttcctcttgatttttcacttgtcttttgactttgcttattgtatgttttgtctagtagttgaatatatggacttttgaattagtgagaaattttttttgctctgaaattattaaggaattcacccacattttcttcaagtaattgtatagttgtgatccccctattttttttttttttttttttgagatggagtttcgctcttgtcacccaggctggagtgcaatggtgcaatctcggctcactgcaacctccgcctcctgggttcaagcgattctcctgcctcagcctcctgagtagctgggattacagacatgcgccatcacacctggctaattttgtatttttttttttttttttttagtagagatggggtttctccatattggtcaggctggtcttgaacttctaacctcaggtgatccacctgccttggcctcccaaagtgctgggattacaggcatgagccactgtgcctggcctgcccctattttgagctctgcttcatttggagtgtattctagtacatggttcttcagtttcatgtttttttcataatggctatctgtaatctcagcatcatttattaaaaaattcatttatacaatgactcaagatggcaacttttatcttctgtatttccatttgtatttgggtacatttctaattccatttgtcattgtgtatattcctgtttcacttgttagtctgacaaaagaccagtttgactgatttttgtgccagtgcctctgttttaattaaaaactttctggtagggcaagtttcccttcattgctctgcttttcagtgttcatagctattctttttggcttactgtattagtccattctcacactgctataaagaaattatggagactgggatatttataaagaaaagaggtttaattggctcatgattctgcaggctgtacaggaagcacagtggcttctgcttctggggaggcctcagaaagcttccaatcatggcagaaagtgaaggggaagcaggcacatcttatatggccagagcaagaggaagagagtgagagagaggcgggaagtgccacttacttttaaacaaccagatctcacgagaactctccattgcaacgacagcaccaagtggggtggtgttaaaccataagaaacggtcttcatgatccagtcacctgccaccaggcactatctccagcattggagattatatttcaacatgaaattcggtggggacacatatctatactatataaatctacacttgggcccctaaatctcatgaccttctcacattccaaaatacaatcatcccttcccaacagtcccccggagtcttaactcattgcatcattaactcagaagtccaaagtctcatctgagagaaggctagtgctttccactgatgagcctgtgaaataaaaaaactaagttagttactcccaagatgcaatggggttacaggcattggataaatacttccattccaaaagggagtatctgacttggttaggttgtataatcctttttatgttgctggatttggtttgctggtattttattgctagtattttatttggtttgctagtatttttgtcataagatayattgacctgtagttctgttttctcgtgatgtctttgtgtggttttggagtaatactaactgcacagtatgatttaggatatatttcttcctcttctgtttcttttgaagaatttgttaaagattgctattaattgttatttaaatgtttagtagatttcaccagtcaagccacttgggcctgggctttactttggagtaaatgttttgatgatgaatttaatctttttactttttataactattcagagtttcgattttttcttcaatcggttttggtagtttgtgtatttccagaaaatagtccacgtagattatctaatttgttggcatttacttgttcatagtattcccttataatcctttttatttatgtgaggatggtggggttggttcctctttcattcctgattttagtaatttgaatcttcctgcatcatttcttgatcagtccagctaaatatttttcaattttgttttcttttcattctttcagcggatcatctgaggtcaggtgttcgagaccagcctggccaacatggtgaaaccctgtctgtactaaaaatacaaaattacaaaatacaaaaattagctgggcatggtggcactcgcctgtaatcccagctactcaggaggctgaggcagaagaatcacctgaacctgggaggcagaggttgcagtgagccgagattatgccactgcactccagcctgggtgacagagtgagactccatctcaaaaaaatttttttctgtactgaacatacagtttattttgtcattattccctaaacaatacagtatatcagctatttacgtagtatttatgtggtattaggtattataattacgctagatgattactctgtatatggcaggatgtgcataggttatatacagacactatcattttatatcagagacttgagcatccatggattttgttatctgcaggaggtcctggaaccagtcccccacagataacaagagacagctatacattttgctatggtttggtggagttctatagatgtctcttaggtctaattgacttagaatgttattttagtcttctatttccttttgattttcttagtagttctattcattgttgaaagtcgggtattgaagttttcaactacagtcggtattctcagggaatttgttcccctgtacctcttttactgctcttttttgaatgaagggaatatattctagtatagtcattattgcttaaggacagtgatacattctgagaattgcatctttagctaatttcattgttgtgtgaatattacagagtgtgcttacacaaatgtagatggtatagcctgctacacacctaggatatatggtataaccttactgcttctaggctacaaacttgtttggcatgttactctactgagtactgtaggcagttgtaatacaatggtaagtatttgtgtatctagacatttctaaacatagaaaaggtaatgcaacatgctagatatttgatgaytatgatgtcactaggcaatattaatttttcagctccattataatcttatgggactgctgtcatatatgcagtttgtcattgaccaaaaatgtcattatgcagcacaaaacactataacattttaattttgtacatttttctctatattttttgccatttttttttttagtgtttactcaagggtttatcaggtacagcttaaaatttatactaacttaattgcagtgaaataaagaagtattcttaaataactctattttgattcctttttttgtgccattgttatacttattacatcattatgtgttgcaaacctaacagtacgttgttatacttagtattttatgtaatttaatgtttttagagaagctgagagaagaaaggagagcaaatatacatttacagagtttgcttcattaacattcttatttatgattgtgttttttttcttcatttatttctatggatttgggacaccatctcttgtcatttccttagtccagtacagctttgcttccacctscctcctgtgggctgatactgtcaaatatattgtgaattttatatgttatggacccaacaattcaattatatgcatattggcaggttgtagtggctcatgcctgtaatctcagcacttcggtaggctgaggcgggtggaccacttgaggtcaggagttcaagaccagcctggtcatcatggtgaggccccatctttactaaaaatacaaaaatgagctgggtgtggtggtgcatacctgtaattctagctactcaggaggctgaagcacaagaatcacttgaacctgggaggtagaggttgcagtgagctgagattgtgtccagcctgggcaactgagtgagaccctgtctcaaacaaactaacaaacaaacccaatacagtacaaaaatatgcatattgttttataagttgccttttaaatcagtcaggagaagaaaagagaaatatgtaatgatactgtttttatatgtacccacataatttcctttgttgactttctttttttggtttggaattgaaatatggttttggtgagtttctttcaacctgaagagctttctttagtatttctttgcttttttttttttttttggagacagagtctcattctgttgcccaggctggagtgcggtggtgcagtctctgctcactgcaacctccgcctcccaggttcaagcaattctcatgcctcagcctcccgagtccctgggattacaggcatgcgccaccactcctgggtaatttttttttgtatttttagtagagacagggtttcgccatgttgaccaggctagtcttgaactcctgacctcaagtgatccaaaccccgcccacccagcctcccaaagttctgggattacaggcatgagccgctgcgcctggctagcatttcttttttttttttttttttttttttttttgagacggagtctcgctctgtcgcccaggctggagtgcagtggcgggatctcggctcactgcaagctccgcctcccgggttcacgccattctcctcctgcctcagcctcccaagtagctgggactacaggcgcccgccactacgcccagctaattttttgtatttttagtagagacggggtttcaccgttttagccgggatggtctcgatctcctgacctcgtgatccgcccgcctcggcctcccaaagtgctgggattacaggcgtgagccaccgcgcccggcctagcatttcttataaaatggatttgctagcaaaattttctcgggttttgtttatctggaaatgtttgttatttttatttttgaaaaataactctcctttatataatattcttagttgaggctgggcgtggtagctcatgcctgtaatcccagcactttgggaggctgaggcaggtagatggcttgagcctagaagtttgagaccagcaacatggtgaaactctgtctttaccagaaaaatacaaaaattagccaggtgtggtggtatgcatctgtagtcccagctacctgggaggctgaggtgggaggatggcttccgcccaggaggtggaggttgcagtgagctgagatcgtgccactgcactccagccagggtgacagagccagaccctgtttcaaaagaaaaaacaatgtttagttgacagatttttttttctttgagcagtttgaatatgtcatctcactgcatttagaatatgtcatctcactggccttcttgttgctggtgagaagttagctcttaaccttatcaggtttctcttacataggatgactttttcttgctgttttcaagattttttttcttcagttttaatgttttgactgtgatgcgtctttgtatggatgcctttgtatgtatcctgcttggagttcactgagtttcttggatatgtaggttaatgttgtccatcaaatttggaatacttttagccataatttcttcagatgattttccttttcctttctatcttctcctggtactcattatgcatatgttggtacacttaatgtttcccatattcctttaagactctgttcattttttctgctttctcctctccctctttcagattgcatagtctttattaatctattcatgtttgctgattctttcttatgccagcttggatatactgttgatctctctagtaaattatccattttaggtccaggtttggtggctcacgcctttaatcctagcactttggaaggccaaggccaaggcwggagtgttatttgagttcaagaattcaagaccaacctgggcaacataataaaccccattttagttactgcactttttttttttttttttttttgagacatattcttgctctgttgcccaaacaagagtacagtggcacaattacggctcactgcagccttgacctgggctcaagcagtcttcccacttcagcctcccaagtagctgggaccacaggcatgtgccatcatccctggctaatttttgtatttttttgtagagacagtgtttcaccatgttgcccatgctgatctcaaactcctgagctcaagtggtcctcccctctcagcctcccaaagtgctggctttataggcatgagccactgtgcctggccagttattgtacttttaactccagaattttcatttggttcttttaaaaataattttgtctttattgtattctctacttaatgagacattggcatcatgccttttacttcaagcatggtttttgtttttgtttttaccatatttataatatttgctttgaagtctttacttatttcaatagctggaccctctcaaaggtatttctttttatttcttttgcctgcttttccccctgtgtttgagacatactttcctatttcttatatgtttcataatttttgttgaatcttgacattttgggtaatatatcaactctgaatattgattcttcccttatctcctctatgttattgattctttcttgaaaattactcagaatacttaagattgtacctacagttagaatattgatattagaagtgtctataattaaaaacttaggttctggccgggcgcagtggctgatgcctgtaatcccagcattttgagagtctgaggcaggagaattgcttgaggccaggagtctgagaccaacctgggcaacagaataaaacccagtttcaccaaaaaaatttaaaaattaggcagacgtggtggcactcaccttgtagccccagctacttgggaggctgacttgggaggattgcttgagcacaggaggttgaagcttcagtgaactagatcccagcctggatgatagaacaagaccttgtctcaaaaaaaaaaaaaaaaagacttgggttctataaaatccagtttgtatgcttagtgatctctttccatttgtcctggcagtgcattgtttgtgaataaatgatgtttccatatgaatgaggtattatcacagttagacatttttgtaaatcctgaggcctttgtctttttattttaagtaattttattttattgtaattttttttgagatggagtcttgctctgttgcccaggctggagtgatgtggcacagtcatagcttactgcagcctcaaactcctgggctcaagcgatcctcctgccttggcctcctacagcattgggattacaggcatgaaccaccacagtcagccattttatttattttattttatttcatttttttagagacagagtctcacctggtcagttgagctagagtgcagtggcacagtcatagctcactgtggcctcaaacttttgggttcaagcaatctttccatctcagccttctgagtagctaggactacaggcacataccatcatgcctggcttttgtctttaatatgaaggttgtatataatggttttttgtaatataatagttttagttaatgaataatacttcttccttttaggttacacctatgtttgaggattggactactattgattggtatcgatttttctgtttatgggagaagttgccaacttcaatgaaaagggtggcagagctagtgggagttgaagaggggttcttggcccgttgtgtgaaaggaaaagtagtagccagaactgagagacagcatcgacaaatggccatccataaaaggtaaacgtcaaggtctctgggctctccggtatttaacacagtgtcttgcatgtagtagacgcccagtttattgtagtcactttcattgtcaataaaatcaaaattttggcagagtataagatttttcagttttcttttttttcattttctttttttttttaattttgaaatggagttttgttcttgttgcccaggctggagtgcaatagcgcgatctcagctcaccgcaacctccgcctcccaggttcaagcgattctgctgcctcagcctcctgagtagctgggattacaggcatgtgccaccatgcctggctcattttatatttttaatagagatggggtttctccatgttggtcaggctggtcttaaactcctgacctcaggtgatccacccgcctccgcctcccaaagtgctgggattacaggcgtgagccaccacacccaacaagttttctgtatttactaaatttattggtattttagtttctttctgcagctcacagtttagcagccattatatataaagaccttatcttttaaggtagaatatttaattacctctcttttgtaaagaaggtgttgatcagaagaaccaccaacttactgtgacttcacctggggttatgctttatatcatacttaaaagtgattcattaccaatagaggagaagagctaattaaaagattcaggtggaaaaattggtacaggctgttagcttctttgaaatataatgaaattggctgggtgcagtggctcatgcctgtaatcccagcactttgggaggccaaagtgggcggatcacttgaggtcaggagttygagaccagcctggccaatgtggtaaaaccctgtctctagtaaaaatacaaaaattagccgtttgtggtggtgtgcacctgtaatcccagctacttgggaggctgaggtgggggaattgcttgaacccaggagatggaggttgcagtgagccaagattgcgccactgcactccagcctgggcaacacagtgagactccgtctcaaaaaaaaagaaataataatgaaatgatttttcttaaaaaacagtctctaatatattatttataatatggttaagtataaattttatatacttggatttatatacttggattacttttgctaccgttgcctttcaaatcaaaattggatgctatatttatattgtcattttattggagtaatgatatacatgtagctgtatatcaagttatctttttaatttttgtgtcatcacatttcttgaaccaagtctcatttcttgttagcagcagttttgaatatgggcaggtttttgttatacagacattagttctttactatagtactaatgcatgtcaaaacttgctttgcaagcattgatctcagcctttgtccagtaatcctattttctattaagaatctcaccacaatgtattatataagccctctgttgcctttccagttcttagtcatttttcaacacactgtatcgcytagtagacgtgaaggatctcttaccacgcttttgatgatttattcccaggtttttcaccagtcttgtgctattagatttaatcagtgaagttcccttaagggaaataaatcagaaatatggatgcaatcgtgggcagattcaatctttgcaacagtcagctgctgtttatgcaggtcagttaaacaaagggtttcacatttatttaatactgtgatttgaggtcgagttaagattactttttttttcaaattccattttattgtaggcttctttaaaagtgctaaaactttgtacagttcttgtcatcatcagaaaattcaaaactatggctcctcagggctcagtaccrtgttacagaggattggtaactagctgaatgtcttggcctctattccttagcaacctgctgactatcctcctttctgttttccttttctttttcctgttgcaagaagaaacagaaacaaagttctctgtggtctcccctttctcattaaggtactgattgccgggcgcggtggctcatgcctgtaatcccagcactttgggaggccgagtcgggtggatcacgaggtcaggagttcaagaccagcctggccaagatggtgaaaccccatctctactgaaaatacaaaaaattagccaggtgtggcggtgggcgcttataatcccagctactggggaggctgaggcagagaattgcttgaacccgggaggcagaggttgcagtgagctgagatcgcaccactgcactctagcctgggtgacagagcgagactctgtctcaaaaaaaaaaaaaggtactgattaatccatattgttgaggagaaggacggaagatggagagggatttctgaactcctgtctgactgttataaaaatgatctaaggaaccactggtctgccttaatgtattaaaccctaagcaaacgagaaattctgggtctgattttactaaggaatccttacaagcccttaagaaggaaactatgggctacaagagggtgtgttatatgtataataggtttcatcgtgaagatatgtgcttatgagggagtactgcggggaagatgagaagagatagtggtaggaagggaggcactcactcttttttttttttttttttttttttgagacagagtcttgctctgtctcccaggctggagtgcagtggcgccatctcggctcactgaaagctctgcctcccaggttaatgccattctgctgcctcagcctcccgagtagctgggactacaggtgcccggcaccacgcccggctaattttttttttgtatttttagtggagatggggttccactgtgttagccaggatggtctcgatctcctgacctcgtggaccacccgcctcggcctcctaaagtactgggattacaggtataagccacccgcgcccggccgggagggactcactcttagactcactggtatcaaagatgaaagactgcctctaggggtttatgttcttgtagggaagtgtaacaaaattttaattcaacaaatgtctttatgacatggcacttgttttggtttctttattccaagacagtgcagctattgagctcagcaacctttctttgaagaaaatgcaggtgggaacttcactctttctagttctctcagcacttgaatatttaaaccaactcttgttttcctctaggtggaaagagtcccttacttttttttttttgagatggagtttctctcttgttgcccaggctggagtgcaatggcacgatctcggctcaccacaacccccgcctcccaagttcaagtggttctcctgcctcagcctcccgaggaactgggattacaggcatgcaccgccatgcctggctaattttgtatttttagtagagatggggtttctccatgttggtcaggctggtctcaaagtcctgacctcagatgatctgctcgacttggccttccaaagtgctgggattacaggcgtgagccactgcgcccagcatctttacatgctttttttttttttttgaaaatttgtattattttaattatttttatatacagaaaactcaacagtgtacatttaacccagtttagtggcaagttctttagcctttgccttttcgagcttggtgatacgagccacagacttaggacccaggacgttgccgccccagtgacggtgggtctcatcctatctgtcgttgtaattggtcctgataacttccaccagcttagccaaagtgcctttgtcttccgagttcacctgtgtgaaggcgacagtggtgcaggtcttcctgtggactagacgtcccagtcttgccttccccttggtaatgcagtaagggacccccattttacgacacagggcaggcaagaagacagccagcttgatgggatccgcgttgtgtgcaatcaccaccagctgagctttcttgttctccaccaaggtggtgacggtgttaactcctgttcgaaggacaggtggtctcttggtggggacgtcccctctgccagcagctttcttcttggcccaggccaacagcctctgcttcttctcttgccttgactctggtctgtacttgtgggccagcttaagcagctgagtagctgtttggcggtccagggcctgggtgaactggttaatcgcaggaggcactttcagccgcttatagaggatggctctctgccgctgcaacctgatatagcggggccgtttcacaaagcgggtgaggtctcttttgggctggatgtcctgtccagtgccaaaattcttaggccttttcacaaacgggattcaccactttcttagcctcctgcttcttcacgacagcaggggccggagccaccttcgttcccttggccttctttcctttcggcatcttgggtggcgggaagagagagacctttacatgtttttaagagttctcttttgcttaagaaagagagagagagaggaatgaattagggtgagggcttcttgtttgttttgtgtttatgtgctctgcctcagttttcatgtattaacttgaggattaagaataaataagatgacatttaatgtcatctcataaaacttagcacatttattgtccaattagttaaggctcttaatatatatctgctcccttgttaacttacaccttgggccttgttaaatcttacaattttgcagggaaaaaacaaaagaaaatataaatacatctaaakaaatggagaattcgtctgtaaaaaaaattgaattcaacaaatattctatgaatgttctagggatgattacagtattttccaaccgtctgggctggcacaacatggaactactactttcccaatttcagaagcgtcttacgtttggcatccagagggagctgtgtgacctggttcgggtatccttactaaatgctcagagagccagggttctctatgcttctggctttcatactgtggcagaccttgctagagcaaatattgtggaggtggaggtgattctgaaaaatgctgtgcctttcaaaaggtaagaaaatacctttacctacatgggcttatgaaataaaaaaaaaatgtcaattttaaaataatagataatgtattaaagttatttttctcttaaataatcttattatatacttggtgtaagtggaagaaaatatggctactttttccccattgcagattacttttttttttttgagatgaagtctcactcttgttacccaggctggagtgcaatggtgcgatctcrgctcactgcgacctccacctcctgggttcaagcgattctcctgcctcagcctcctgagtagctgggattataggcacccaccaccaggcccagctaatttttgtatttttagtagagacagggtttcaccatgttggccaggctggtcttgaactcctgacctcagccaatccccctgcctcagcctcccaaagtgctgggattataggcgtgagccaaagtgcccggctgcagattactttttattttgtatatttaaaaaataatacatgacttaaaaacattcctgctagaacgtctgagtggggctgggcacagtgactcactcctgtaatcccagtactttgggaggctgaggctgattgtttgagcttaggagttcaagactagcctgagcaacatagcaagatctcatcgctactaaaactgaaaaaaaaaaaaaaaaaaatagctgggcatggtggcatgtgcctatagtcccagctacttggggatgtgaggctggagagttggttgagcccgggaggtcgaggctgcagtgagccctgatagtgccactgaactccagcctgggtgacagagtaagatcgtgtctcaaaaaaaaaaaaaaaagtactgagcaaaagtttggtatcaatgctttctgctttgctaaattttgattttgatctgctttgatggattttgataattttgatgtgatttcattatatatctcaggctcatcttacactttaggcaagagcattttaaaatacattcctctgaaatgttctttggaatgctagtgtccctcaaaacaatttgtgagaagattccttgattatttttttgtgtgtatgtctgaataaccaatttattgaatgggctagactcagtatataaatcaaggaatagcttaattattttttctaccactgttttttgaactcagtcttatatgaaatctcaggcagattctataggtatttagttactttcaggtactaacaaccagttttattttcaggtattaaacaatttgttttagatggaagcatcaatctcatttccaattagtgtttcttccctcccactcactttaaacctgactcccagctctgagaccttaacctgtgtgggaagggatggggtatagtattttactatcctctttgctcttgcatatctcttgcccatggaagacaatttttccacagaccgggggtggaggtgggggtaggggggtggtggagatggtttggttttaggatgaaacaaaacaattagattctcataaggagcacgcaacctagattccttgcatgtacaattcacagtagggtttcctgcagctgatctgacaggaggcggagctcaggcagcaatgctcccttgcctgtagctcacctcctgctgtgcggcccagttcctaacaggccatggactggtactggtctgcatctcgggggttgaggacccctggtttagacttytaactggccacttggaatctgtccacacttgcacggtttagaggtcagtsagagatttgggcagagtttatatgaagaattacgagttgttcctctctagttatctgttctagactgccttaaatttccaactaatgtagttactcttaactctcttctgacttctgtcaatcagtgaactccaggttgttatctaagtttttagccaacctacagggtgctgactgggccctgccttcaggtaaaaagtgaaaattaacccactgccattttctttcttccaagtctcaaccccactccaatttctgctttcttttgttcattttctagtcccttcatatattttgcccagagtttatattgtgtattgtacagaagcattcgttttctttcttgtcttgtctttttttttttttttttttttttttgtgacagtctcgctctgtcgccctggagtgcaatggcgtaatctcggctcactgcaacctctgcrtcctgggttcaagcaattcttctgtcttagcctcccaagtagctgggactacaggcacatgtcaccacacccggccaatttttgtatttttagtagagaaagagttttaccatattggtcaggctggtcttgaactcctgacctcaggtgatctacccaccttggcctcccaaagtgctgggattacaggcatgagccactgcgcacagccttttaaaaaatttttttaatgagacagggtcctgttctgtcaccctggctggagtgcagtggtgtgatcttgtctcactgtaacgcctcctgggttcgagtgattctcatgcctcagcctcccaagcagctgtaattacaggtacctgctaccatgcctggctgattttttgtatttttagtagagacagtgtttcaccatgttggccaggctggtctcgaactcgttgcctcaagtgattcgccttccttggtctcccaaagtgctgggtttacaagtgtgagctaccgygcccggccggatgtttttcaatgaaagttttatggctttcacttttttaaaggcttctacttaaagaatctgtcttagtgaagccttcctttattatgccatttaaaaactacagaaccacccaccacccctttctggtgccttatttttgtatacaactcttatcaccaggtaatatagaatgcattttaaactttttgtttattttctgaattccccagctagaatgtgccatgagagcagatacatttctctctcttcttcattgttattttttcagttcctggtaacagctcagattgcatgtttaataaatacttgccttacgaatgaatgaattcatttctgtcttttcccatctccttgtgtagtgcccggaaggcagtggatgaggaagaggaagcagttgaagaacgtcgcaatatgcgaactatctgggtgactggcagaaaaggtttaactgaaagggaagcagcagcccttatagtggaagaagccagaatgattctgcagcaggacttagttgaaatgggagtgcaatggaatccatgtgccctgttacattctagtacatgctcattgactcatagtgagtccgaagtaaaggaacayacatttatatcccaaactaagagttcttataaaaaattaacatcaaagaacaaaagtaacacaatatttagtgattcttatattaagcattcaccaaatatagtgcaagacttaaayaaargtagagmgcatacaagttcctttaattgtaatttccagaatgggaatcaagaacatcagasatgttccattttcagagcaagaaaacgggcctctttagatataaataaagagaagccaggagcctctcagaatgaggggaaaacaagtgataagaaagttgttcagactttttcacagaaaacaaaaaaggcacctttgaatttcaattcagaaaagatgagcagaagttttcgatcttggaaacgtagaaagcatctaaagcgrtctagggacagcagccycctgaaagactctggagcgtgtagaatccatttacaaggacagactctgtctaatcctagtctttgtgaagacccgtttaccttagatgagaagaaaacggaatttagaaattcagggccatttgctaaaaatgtatctttgagtggtaaggaaaaagataataaaacatcattcccattacaaataaagcaaaattgttcatggaacataacactaactaatgataattttgtggagcatattgtcacaggatctcagagtaaaaatgtgacttgtcaggccactagtgtggttagtgaaaagggcagaggagtagctgttgaggcagaaaaaataaatgaagtgctgatacaaaatggttcaaaaaaccagaatgtttatatgaaacaccatgacatccatccaattaaccagtacctgcgaaagcaatctcrtgaacagacaagcactattaccaaacagaaaaatataatagagagacaaatgccctgtgaagcagtcagtagttacataaatagagactcaaatgttactatcaattgtgaaaggataaagcttaatacagaggaaaataaaccaagtcattttcaggcattagragrtgatataagcagaactgtgatacccagtgaagtacttccatcagctggagcatttagcaaatcagaaggccagcatgagaattttctaaatatttctagactacaagaaaaaacaggtacttatacaacaaacaaaactaaaaataatcatgtttctgacttaggtttagtcctctgtgattttgaagatagtttctatctggatactcagtcagagaaaataatacaacagatggcaactgaaaaygccaaactaggagcaaaggacaccaacctggcagcagggataatgcagaagagcttagtccaacagaactcaatgaactcttttcagaaggagtgtcacattccttttcctgctgaacagcacmctctaggagcgactaagatagatcatttggaccttaagactgtaggtactatgaaacaaagcagtgattcacatggggttgatatcctgactccagaaagcccgattttccattctccaatactattggaggaaaatggtctttttttaaaaaagaatgaagtttctgttactgattcacaattaaatagttttcttcaaggttatcaaacacaagaaactgtgaaaccagttatacttctgattcctcaaaagagaactcccactggtgtagaaggagaatgtcttccagttcctgaaacaagtttgaatatgagtgatagtttactatttgatagcttcagtgatgactatctagtaaaagaacaattacctgataygcaaatgaaagaaccccttccttcagaagtaacatcaaaccattttagtgattctctgtgtctacaagaagacctaattaaaaaatcaaatgtaaatgagaatcaagatacccamcagcagttgacttgttccaatgatgaatctattatattttcagaaatgkattctgttcakatggttgaagctttggacaatgtggatatatttcctgtccaagagaagaatcatactgtagtatctcctagagcattagaactaagtgatccagtacttgatgagcaccaccaaggtgatcaagatggaggagatcaagatgaaagggctgaaaaatcaaaattaactgggaccaggcaaaatcattcattcatatggtcaggggcatcatttgatctaagtccaggactgcaaaggattttagataaagtatccagtcctctagaaaatgaaaagctaaaatcaatgactataaacttttccagtttgaatagaaaaaatacagagttaaatgaagaacaagaagttatttcaaacttggagacaaaacaagtgcagggaatttcattttcttctaataatgaagtaaaaagcaagattgagatgctagaaaacaatgccaatcatgatgaaacctcatccctcttacctcgtaaagaaagtaatatagttgatgataatggtctcattcctcctacacccattccaacatctgcttctaagctgacatttccakggattcttgaaacacctgtaaacccttggaaaactaataatgttttacaacctggtgaaagttatttatttggctcaccttcagatattaaaaaccackatttaagtccagggagtagaaatgggttcaaagacaacagccctwttagtgacacaagcttttcacttcagttatcacaggatggattacagttaactccagcctcaagcagttcagaaagtttgtccataattgatgtagcaagtgaccaaaatcttttccaaacattcattaaggagtggcggtgcaaaaagcgattttccatctcactggcttgtgaaaagattagaagtttgacatcttctaaaactgctactattggcagtaggtttaagcaaggtaagaatttttttaattttattttttcatatttataaactacttagtagactgagataagagttagatttctcaatgttagatattaaatataatctattcaagttgtagtatgtatmtcctctgtggatttatgtgtagaacagccttatttattcagcatacctaaattaattaatgatagttgccctccagtataagaggtgcatgtaatatatattagaataaaagtttataaaaataaagataatacatattttgaatatgaacgtgacatttcttttatggtatattaatgttgtaacataatggtttttattaatcaccagtgctcatgaattcttttcttttttctttttctcctttcttttcttttctttctctctctctctctctctctctctctctgtctctctttctttctttctttcctctttctttgtcttgttcagttgcccaggctggagtgcagtggtgtgatcttgatcttcgctcactgcaacctccaccttctgagttcaagcaattctcctgcctcagcctcccaagtagctagaagtacaggcatgtgcaccatgcccagctaatttttgtatttttagtagagatagggtttcaccatgttgtccagggtggtctcaaactccggacctcaagtgatccacctgtgttggcctttcaaagtgctgggattaccggcatgagccactgcgcccagccccatgaattattattattattattattttttagacagaatctcgctattggccaggctggagtacagtggcatgatgtcggctcactgcaacctctgcctctcgggttcaagcaattctcctgcctcagcctcctgagtagctgggactacaggtgcatgccatcatgcctggctaattttttattttgtattttagtrcagatggggtttcactgtgttagccaggatggtctcaatcccctgacctcgtgatccacccacctcggcctcccaaagtgctgggattacaggcgtgagccaccatgcccggcctcataaattattttctattaaattgtaatatccttgtttgcttatgtaattacaaaattacattgctaataggaactttgttcttcacagtgtacattagctacattttccaagatttatcttgagtagaacttagacctccatgatagtcatgaattgtatactgaaatgttgcttccaaaaccttgcagagctcttccaggttttgagagagttgaaccttttggtcaaataaggctatgtatattcctgtcttattgcgtgagctctgccttctggattgtggggaccagttgtagtcagctgtggaaatcaggtgtttgattagatttattaaaccttgctattttatgaattaatttgttcataaaggtttgagtatttgtctgattttcaattcatgaagcagatgtgttaaccacaacttttatgtacttttagtgttgaatagcactttccatttttgatgtaacaaacaaaattgagcacattttctgtatcaggctatataatagaggctagagggataaaaaagttcacctaaatttaataaatatgtactaagttcctatgtgccagttattttcctgctactagggatataattatcaataagacggattgattcttgacctttataaaattggagatacattattttaggaataaaacattgactctagatacaaaattatgcttcttcactaaggagtaatagtctttatttttctggagtttcttagctaagaattgctgaatttgctgcaaaatatttgtagtatgcaaatgatctgtatttttgtttgagttataaaatttgaaatgcagcctccctttcttgacgttaatcattatagatttattttaacaaatccttgatagctttttcatagtgacagttatcttaattgatgggaagcctggaaagatcttacttatacttaaaatgactgtccaaatgcatattttaagatctggaaattttgcctatcaaagataggttttttattataattgttttaacaatttatgtaatgtctttatttttagagatttttaactgtttcacttttgttttacttagctagctcacctcaggaaattcctattagagatgatggatttcccattaaaggttgtgatgacaccttggtggttggactggcagtatgctggggtggaagggatgcctattatttttcactgcagaaggaacaaaagcattctggtaagtaatgagtatttggctaagtcactrtgtaattactgtaacatccattagggtagtgatcttatattttgagaataatttcctgatatttacctaggatttatttttagagttaaatttttttttgtttgttttttgagacagaatgtcactcttttgcccaggctggagtacagtggcatgatcttggctcactacaaccttcacctcctgggttcaagcgattctcctgcctcagcctcccaagtagctgctattacaagcatgtgccactgcgccggctaattttgtatttttttagtagagacagggttttaccatgttggtcaggctggtcttgaactccttacctcaggtgatccacccgccttggcctcccaaagtgttgggattacaggtgtgagccactgtgcctggcaaaaattgtaattttttggagagcagctggcatgtacattattgcatatattaactagaattaatgttttaagaagcacttccttacttctccctgcctgtcacacgaggctattcatgctatgggtttttcctctgagggggcagtgaagactcagggactctcttgccacctttagggtttgcttttgaagactaaacgatggcagtttattttcagtcttctgtcctaccattgaatgggtctgaaactcatctagagggaatgttgagctagagatctatagtagtcgaattatataaactttggagaagtctttagagtggaaaggatgtaatctggaaataccctgtgatctgaatgtggatgttggataccccagctgataggytggttttggacaggagcaaaattaataaggaaacattttaaaggatgctgtatagtgtctgttccttagtaagcatgaaatattttcagttgttttgcaggaaaatatgttggggtgagtagttacttaagctttttttaggagcaaaattaataaggaaacattttaaaggatgctgtatagtgtctgttccttagtaagcatgaaatattttcagttgttttgcaggaaaatatgttggggtgagtagttacttaagctttttttttattttggatagaatagtatgtgttcatactaaatctctctttaaaattyatttccaaatacttttcctgtctttaactcctcattttgggaaatgtaattttgtttttacaagtattaatatttaatattttctcccacctaattaagtagagcattaaaaatcttctagcccaagtcataatttttagatatatgatgcacttcatctacatagctgatatgacctggataagatgctgaattactcgtcacatggaaccagacccttagccttctgagtctttttcagtctttctactaaagattgctgcttcaaatgaatgcatgtaatttttgccttaaaaatgttttttcctttttttttttttttttaaagaaattagtgccagtttggttccaccttctttagatccaagcctgactttgaaagacaggatgtggtaccttcaatcttgcttgcraaaggaatctgataaagaatgttctgttgtcatctatgacttcatccagagctataaaattcttcttctttcttgtggcatctccttggagcaaagttatgaagatcctaaggttctatgtctaatttaatttttatatacttaaaacaacatttttagtgttaattcttaaatgacttggtatttacttagcatcaataatgcagcttaaaagtattttagagtagtcacttctttattcaataatctcatctacccagaatagaatatcatgcaccaaatatctctgtgtagataaaaacagagatgtcacaaatttggagccctaaagtttatgtctttcctcagagatttttaaaaaattttaatttgggtcataagtcctaagttttctgtctgatagtaaattggaagtgaaatgagaacagatttaggtgtatgatagcaggaggtcttaaatattcatgagggtggaggcagaaaattggaaaagagtgtgaataagatgacaaaaaggattgtagttagtggccatttagcatagaggcaaatccccttactggctcctgagaactttcctttataatagcaaagtatgatgcactcttcgtaatgatgactcagttaagaaacatgttaacttttacatcagactatttcactcaatattcccctataaaactttattcttaacctacaaaagaaagaattgagtcatatagtaaagtaattgtcagaattatgaacagggcttagattcccttattctaatccagttaatgatctgcctgatctagtattagaaactacaggactcctagtcttatgaggaagttggaaatagcaatcaaatgaataattggatgattctggtgacagacccccccattctgaggggaaagtgtagaggctttctgaaactctggatataaacttttaatggtaaaacatttatgcgtcacttttttttttttttgagacgaagttttgctcttgttgcccaggctggagtgcagtggtgcaatctcggctcactgcaacctccgcctcccaggttcaagcgattcttttgcctcagcctcctgagtagctgggattacaggtgcccaccaccaygcccagctaattttttgtatatttagtagagacagggtttcaccatgttgaccaggctagtcttgaacttctgacctcaggtgatcaacccgcctcagtctcccaaagtgctgggattacaggtgtcagccactgcgcccggcgcctcacttcttttgatgatgaaagaactaaatatacctaaaacctcacaggcccatctttattacagtagcttagcccaaattagccttagtggaggagtccatcttcattttcagacacatggtttgagtttgctgagacacacttgtttttcaagcctactgctaaactggatcggcctgagcattgtaggaatggaatagttacaactttcctttctttgaaagctactgctgttgttgctaccaaaaatgagtcctgttacaattattctttccttctttcctgggaagaccactgaataaatattaaatgaaaatgagtgaggttagaaatgagctttgtttttttcccttttcatttagaggtacataagtgtctttgaaaaaaatcaggaaaatattctcattgctatcccattcaggtggcatgctggttactagatccagattctcaggagccgactcttcatagcatagttaccagttttcttcctcatgagcttccactcctagaagggatggagaccagccaagggattcaaagcctggggctaaatgctggcagtgagcattctgggcgatacagagcatctgtggagtccattctcatcttcaactctatgaatcagctcaactctttgttgcagaaggaaaaccttcaaggtaaaaaccaagtttctggcatttttatgttatagattagagatagagatttagccactctttatcaaaaatgggtaaattacacatttatgcaaatcctacctttggattgtctagtgctttttttctgtaaaaggccagagagtaaatatttttggctttgtaaactaaacaatctctatcacaaatactcaactctgccattgtagcaaaagagcagctgtagacaagaccaaaacaaatggctgtcttccaataacactttacaaaaacatgcatctaatgttagtttggccataatttgctgacttctggcccttgtgtgaagaagagaattacaaaatcgcatttatgcagttgttggtaattttgtatttgaactttatcaaaggatttttattcacccttagaagacatccttaatggatttcaaaaagttaactcttttctttttggaactattaacaaacagatgttttttcacagcaagggataatcatgagagtctcttttttccctcatgacaaataacatgaatttattgtcattgttatctgctggcccagatcaagcaccctgactacagagagcttaacggatgcttatggtagagatgtgaagtagaacaaatttggcttcattgtgaggagtgaccgaatttattgactaatcaataggtactagaaaatagatggatgaattcatacagactagggtttggatctgggttatccacttatgagctgagggactttgggcaaactactgaaactgtaagtctggttcttataaagttgttctaaggattaaataagatagtgaatatgggcagtgtttgtcacagagcaggtgcttattatgttagttgattattataatttttaactttcacaatttcaatgtgcttttgaaagctcctttttttttctgcactttcaaaaatgtgtggctaggctggctcagtggttcctgcctgtagtctcagctactcaggagtctaaggtgggaggatcactggagcccagaagtttgagaccagcctggaccacatagtgagaccccatctcaaaaaaaaaagggtggttaggaggtattaaatgcattttttacagtgttaatgctttcttattcatagaattcaagaattgaagtgcactgagataagggaagtttttggagagaatgtagacagctatcagatttagtttgaatataattatttctttgtagaaagagatatagatatgttttatttttaaaatttttctgttagccaggaggtattctcatctgacatagaaagatattttaactgcaactttgatttctttaataactgtaagattattcagttatttctttttgaatatatttggtaagctatatatatatattttttttccaaatcttttttttctttttattactccactgtgacattcccaacctatatatttttaaggaatttatgtttcatctaaattttcaaatttattgatatacagctattgctaagtctctcttttttacgtctctggtttatttgttatattctctttttctttcataatattattatttaatgtcacttgaagttttcccaattttctagtcttttcaaagaaccaacctttgcctttgattcttcctattacttttgttttgtatttccttgatttctgtccacatctatattatctgttttcttctagttcccctgactttattttgtagtcatttttcaatattcataactttgaccttaaaaccattacttctcaaattattttttttcttttctaacttaagaatataaggcagccgggtgcagtggctcatgcctgtaatcctagcactctgggaggctgaggtgggtggatcacttgaggccaggagtttgagaccagcctggccaacatggtgaaaccctgtctctactaaaaatcaaaaattagctgggtgtggttgcatgcacctgtaatcccagctactcaggaggctgaggcacgagaataccggaggcggaggttgcagtgagcagagattctgccactgcactccagtctgggcaatagagtgaggatctgtatcacaaaaacaaacaaacaaacaaaatatatatatatagctataaattttcctcaaagcactacttttattgtattctacagttttgatgtgtatacacacacacacacacacacacacatttttttttttttgtagagatgagggtcttgctatgttgcccaggctggtctcaaactcttgccctcaagcagtcctcctgcctttgcctcccaaagtgctgggattacaggtgtgagccactattcctggcctgataatattcttatcatgctagatatttttagatttctggtatattttttcactcacaaattatttagaagaatggtttttaattcccaaatatttagaaacttttattttgtatttttattatatttaaacttaattgtgttgtagttcgagtacatggttgtataatactaattcttgaaatttttagccaacgattcattatctaaaacctgagctgttgtgtaaatgctctatgtgcacacaaaagaatgtgtactctaattctggatgcacaattttatatgtctgttaagtcaaagttgtttttaaaatattctatgtctaattttccctgtaattcaatcaattttaactttgttttgaggccactttattaggtgtgtatgtgtttaaaaatgatttgtcttcctggtgaattaaaccttctattattgtattatgaccatctgtattacaaataatgatttttattcttagtctgttttcttatatgaatatggcaacatcagctttctcttaatattasttcatatagcttttttctatcccytttaacctttctaggtccctatcttcagacatgtcttataaacaaagtatagctcatttacttttcaggcttaacyyttttttttttttttttttttttacaaatttgccaatttattgtgattcttgatgtatttctgcttatttgattattgatacacttgttctctattttcctactattttactttrtttctagtcactttttgttttgtaagtagttcattcacagttgtgcaatattctaactagtccttatctgcagttttggggatctaaatttcttcttggttgtttcttctgagtcctattcacatttctttgctgtcttgtatttttcatattttttgtgagttcatacaggatttattatgatcaaggatccctgcaggacttacgtgggggaaatcttcccttagaaaggttttgctcctgcctctgctgggtaccacactrctctgcatcaaaggaccgcagtagcctttgagagttttgtttcagaacaggagtctgagactctgctcctcatcctgttgttgtttcaaggatctatatccccttaactttttttgctatgggactccattcccataacgaccttgctccttcctaatggctatggatgcaggctagcttcctgccactcttactttgtgcttctctgattgttcctgttctgacccaagttcattatttctctagtctcaagtaacgtgaatttctccactagttccaggcttctaaagccaggctctgacggtctcgtaccttctgcatgtagttagaggccagtaactctcatttgtttctttgcttttcgtggtggttacgggtgtccctggagatttctcatgctgaytgagaccagcagtgcctcaaataatgtttgtgtggagctggggaaggtgggccagggttgcttagattcctagtgactcaatactggaagctgaagtcttagggattctttcttaatgatttaggacagcatttcctatagtacattccatggatgcttacttttcaagatgttaataagtattatatgaaaaaagggtttaatggtcaaataagtttgggactttcacttaaaataaaattaaatagttgtctttgcttcaggtcctctcagggcctttaatatataagttaagtctgccttatccaaaatgtgggaccagaagtgttttacgtttcagatttttttggattttggaatatttgcatatatataatgagatatcttggggatgagacccaagtctaaatgtagaattcatatatacctatagacatagcctaaagataattttatacaattatttaatacttttgtgcacaaaataaaatttgtgtacactgamccatcagaaagcaaaggtatcactgtctcagtcactcatgtaggcagtctgtggttrtctggcggaaaagatatattgaagctgaatggggcaaggaggggcttttttcctttagagacgctgaataaactttgtgttgtacacctgtgttttgactgtgccctgtcacgtaaagtcaggtatggagtgtcctaattgtggtgtcatgtcagtgctcagaaagtttcagattttggagcattttggatttcaaaataaggttgattgttatgctgctgctaagagtagaagcagaaacatcttaggagaaatacagtctcttgtaatccagactagtcacaagattgccgactcttctactctctgcagagacaaggatagttgtccagtgctaaactagcctgtacttttccacctttcattgttggcttgaggatgctgctcgggagactggctcctgaaggataccttggtagcatttctggattttcctagatgaattctgtatagtttaggtaaggctgctgatctagccacttagccaatgaattaacgttttaattttcttttttcttccagatgttttccgtaaggtggaaatgccctctcagtactgcttggccttgctagaactaaatggaattggctttagtactgcagaatgtgaaagtcagaaacatataatgcaagccaagctggatgcaattgagacccaggcctatcaactagctggccacagtttttctttcaccagttcagatgacatcgctgaggttgtatcatggggctagggatatagatacataatttttagagttaaaatgattktgtgtgtgtgtgtgtgtgtgtgtgtatttacctgaacaccaaaggtcagtaaaatgaaacagccagttaaccagattgctttgggaatattctagcatctaatttgtaaattatatctgtatttaatttacaaataaaggaaggtaataaagaggacttctagaatgtaagctccttgagaaggagatttgcctggaacggaggagggactcactaagtatttgttgaagaaatgattggtactggtggttgcatgacagcatagctatttttccaggaagttggtcatttcatgagcccttaccccttccttgcttgccctaacatctttctatagaataggaaactggatatttttctgaattaaatgaaaaagggattttttgctcatgaattctcatcatttagcttccacttataartgagaacatgcagtatttgattttctgttccttcgttaacatatttaaaagaaaatgaggaacttggtttctcttattcatgtgttgaattcagtggtgccttttttttttctttttggtatctgcttttcaaatccccaagccaatacctagctgactgcacataaaattacatagggaacttatagaaaatatagaatctctgtttcagcacaagtaggtttggggcaaaggcaagaattgctgcccttgtgattcagatgggcctgaaagcatgtaagctacaggccttgagcaaatcctggactaagagtaaagggcctttgatagtattggcttcttcgtcctgcatgtcaaaatggcagttacctggaaggtagtttgtatgtgaagtttcacagttaattctgaaagcttcacccccccaaaaaaatgcttaagctaaagaacttctaaatatataacttgagatatttgtgttgtctttaatcataatgggtctctcttcctgggtttgctgctttattattactttaatagtgttttatttttcctatccagttgcttggttttttttctcctatactgccattcatgtaccctttgatacctatattagggttgcctgataaaatatggcacatccagtttgaaatttgtatttcatcctgtcatttttgaaaacatggaggaacctgaaagacgttatgctaagtgaaataagccagttacagaaagataagtaccatatgtttcagatgatctcactatatgtggaatccaatgaagttgaactcctcgaagtggaaagtggaacagctgttaccagaggctgggggagtagggagcggggaaatggggagttgctagtcaaagggtataaagttttagataggggaatggggagttgtttatcaaagggtacaaagtttcagataaacaggaggaatcgattctaatatttattgtacacaagggtgactacagtcaatagtaacgtattatatatttcaaagtaactaagagtaaatttcaaatgtcttaccataaaaaatgataagtctaagtgtggtgatcaatatgttaatcagcttaatttaatcacaccacattgtatacttacatcaaaacatcatcttgtaccccatgaatgtawacaactataatttgtcaataaaatcaggtaaacaatggataacaatttagtataagtatgccccatgcaactcaaatttaactgggcattttgtaattttatttggtatatgtggcaaccctaatccctatacatgcatatgttcatatctgtgtaacatagttcttgggctaaatagttactgacatctgtagtaagcctcagtacctttcattcctaaaaccccagttcaaactggaaccagatcattgtttctgtcatcattaccattctagagaagtacagggattatcttcccttccacccctggctcaacttgtgggaaaaattcttgtacttacacaaatagtttcaatttttagaattattactgggaaaataatccaaggttcattaaaacccactcaaagtatataagtgaatgattaggtatagtagataatgttctgaattgccctagtttcatcccctctcatctgagcttgtgagtgttacatggggtcttccacctcccacacagcacagttctggtgtcttcagtgggtgctaccggccctctctagcattcattattgccacattgtattggccaccttctcctaactttttgtgcctagggactatcagggcccagcattgtggtggtgggactagatgacttttcaaaccccttcctactttagtgttttctgatttttgtaatgagacaatagccatgtaagcttccatgttgatctatggggcttaactgattgagcagcctcatttaggagagctcacaattcttagagcaataagtctcaatgtcaataacttgtttgccagttgctcagcacagtgtatatacgtgcctgtgttcctgactgcttaaaagctggctgtgtgtggtggctcatgccgataatcccaccactttgggaggctgaagcaggtgggttgcttgagcttaggagtttgagaccaccctggccaacatggcgaaatcctgtctctaccaaagatacaaaaattaggtgggcatggtggtgcatgcctgtggccctagctactcgggaggctgaggtgggaggatcacttgagcccaggaagtcaaggctagagtgagctgtgatcacaccactacactctggcctgggtgacagtgagatcctgtctcaaaaaaaaaaaaaaaaaaaggccttgtgttagtattaattaatctgatagtgtctaattagagtatggatagactacctgacatataaattttgattgccatcatttattaaatatggtaattccaaattatccacagaaacattatttcaatccatgttgaactgtagagattgttttctgaaataacttaaaatattttctgaatgataatccttgcaagtttcattcttgactaaagagayattaatttcttgcaggttttatttttggaattgaagttgcccccaaatagagagatgaaaaaccaaggcagcaagaaaactctgggttctaccagaagagggattgacaatggacgcaagctaaggctgggaagacagttcagcactagtaaggtgctctttggggcagtcacagagcagggcagaacctaaaytacttttaacattttggtgtctagaaagaatgctgatgaaatcaacatcttagcctaccatttgaatttacccagatataaattaacacattggtttgtggtttggtagcccacaaattctgtggagatattccagcatggaaaatccgaatcataagttagcagttgtgtccttccttcctatcattaaaatggtgtaaaggtttataaaggtgtaccaccatgcctggctaatttttgtatttttagtggagatggggtttcaccatgttggccaggctggtcttgaactcctgacctcaagggatcctcccgcctcagcctcccaacgtgctgggattacaggcatgagccactgcaccaggccctgatttaagaatttaatctgctaatttcaaagtacaattgttaatcataatccatggaaactgtacacattagtgggagggaagagagaaggggcttaattttacatttttacagatgtttcaggggaaaaatagggtagaaaatatagccacagagctgtccaagttgcccttgtgtagaattgtggtccttataccgttatctatgatttgtctgctcctaggaagtttccttagctccaggctatagcacaatttttaatttaatctcactggcccttttactcacaagtttctgttccttaatagttcactgaaagtctatagtatgaaaaattcaaagttttaaaaataaatgtctcctgattaccttgatatggaaaccgtataagtatccgggcaagcacaaaaacaactgggatacttccagtcatgtgaggagcgaaggaggaaaatgcataaagaaaacagatggtgtaaaataaacttttggtcgggtgtggggaggcagttactttgttaaactgacaattcatttatttttttgaaaaaggtagttttaaattgatactgctcagtattaccacatttccattttgtaaactgtagttatagttttatcaatacggtggtttaaaaaactccaagtaatagttttgagttgtcgatattactctcaaatttaattttgagactgtattatttacagaamagagattctagcttgctgtggaatttggacaagaattcartcttaccttatatttttttggcaggacrttttaaataaattaaaggcattacatcctttaccaggcttgatattagaatggagaagaatcactaatgctattaccaaagtggtctttccccttcagcgggaaaagtgtcttaatccttttcttggaatggaaagaatctatcctgtatcacagtcgcacactgctacaggtgatgagaaatcttaagtataaacaatatccaattttgaaggaaaagcattttcatatgtaatattttttatgatggccaagaattcaagtgttgatcaaggggttcggtgaagttttacaactataaaatacatgctttatccaaagcatagatagatactacctgggtacagagatgagtattggttcctgcttttatttttatttatttatttatttatttattttgagacagagtttcactcttgttggccaggctggagtgcggtggcacgatctcagctccctgcaacctccacctccctgcaacctctgcctcccaggttcaagtgattctcctgcctcaacctccygagtagctgggattacaggcgcataccaccacatctggctaatttttgtatttttagtagagatggggtttcgtcacattgatcaggctggtctcgaactcctgacctcaggtgatccacctgcctcggcctcccaaagtgctgggattacaggcgtgagccactgcgcccagcctggttcctgcttttaagaacttgtatagagtaactgggatgtctgagacagtactttcaatgtgagtatacacaggaattaaatatttgagtcagtggtcttatctaatttcagtcccagcccttttttgagcctcttaagatttctccaagttgaatctgagtaggcctctggggcatccgtataagtaagtgtcttattttacccaagcagaaaagaaagctgtagagtcctttggttatctcatggtcctcctgagataagtaagagtgtaatcttatgaagaaaaatgtattctttctctaggcagtacaaaactctaaatatttgctaaatgtgatgtgtagtggaagaaaaggtagctttaactcattcatagaggaggcaggcagtttagattggtggtatagaatgtgggctttgacatcagaaatcagggtttgaatcctggttctgtgaatctttagacaagatacttaacctctcaatgcctacattttttttcatgtataaaacaaggtaataggctgggcacagtggctgccgcctgtaatcccagcactttgggaggccaagatgggagggtcacttgagcccaggagtttgagactagcctgggcaagatagtgaaaccatgtctctatagaaagtcaaaaccatgtctctatagaaagtcaaaaaattagccatgtgtggtatcttgtgcctgtagtcccagccacttggaaggctgaggtagaaggattgcttgagcctcggagatcaaggctacagtgagctgtgattgagccactgcacttcagcctgggcaacagagtgagaccctgtctcagtcaataaataaaccaataaacgaataaggtaataacagtctcaccccacctggtaattctgaggattaaataggttcatagatgtagggtatttagaatagtgcatggctcctagaaagtgctcactatcagttgctgctgttacccagcacggaggctccatgaggtgctgcttttctctgcttgctttatcccttgttctaaacattctaaacttgtcccatcctagtgatatcttgtcctgttggtatttaaatttcactttgaaacatatgctaatgatataaacttacgtaaaataaaatcctccgtgatgaaaagacaacatcaacctagaattttcttttatttatttatttatttatttttgagacagagtctcgctctgtcgccagactggagtgcagtggcgtgatctcggctcactgcaacctccgcctcctaggttcaagtgattctcctgcctcagctaatttttgtatttttagtagagacagtgtttcactatattggccaggatggtctcaatctcttgacctcgtgatccacccacctcagcctcccaaagtgctgggattacaggcattagccaccacgcccagcaacctagaattttcaatggtgttgcacatttatttgttctttacaaaacagaagataaaatcagtaataagccttctgctttgttatttgttcgtaaagaacaaataaatgtgcaacatttcttttgattttattactgattttacttattagtgattttagaaatgtattttaataatattttataatgcttataatatttagaaatacaaacttaagcatagcaaagccatttcatgaatatacttcatatccattaagctatatattcattctttgtaatttatttttaccattttttttggtctgccagtgttgcttcattaattcaactaatagaccagagtagtgtgctgaatattaagtgttatagaaaagaagacaatgtgttgatgtaaaaagagccttggatgccttcctctgctgtttgttagctttgtaacactgaacaggccatttaatgtcaacaattatgttaaaggttatcattaactgagcacttattttgtgctaaaagctaaatgacaaagacataatattaggggatcattcaaaaaaacaacgtccaagtcacttaaaaggtctgatttatcagaagataatggagttatacatagctagtagacagcctgttacaatgaagagtgtgtcataaaatagagttttagtgttgctgatagtgttataaaaaatcacagtaacaaaatttctcaaacttttttggagtgatacttaacatgttttcaygttttagagaaattcaaccaataagtaaacaaaagatgtaaaatatatttggaaataaaggctttataagcatttttttttttttttttttgagacagtctcactctgttgcccaggctggagtacagtggcatgatctcggctcagtgcaacctccgcctcccaggttcaagcaattctcctgccacagcctcctaagtagctgaggattgcaggcacccgccatcatgcccagctaattttttgtgtttttagtggagacggggtttcactatgttggccaggcttataagcatttttttaaaaaacagctttctgttcactggaaaatttactattaaccacctgattcaagtctcacctgattcagtacttctagtaagtactgttgtagattctcttgatgaatgacaatgatgaagaaaaacagccagatgatgtctgaaagtgttgtttttagaagcgtcagtggttgtttctcctaagatccatttgattagcctttactcattaatatgaccgctaacatgttatagtgctgaaatctgatactcattttagcataagactagttcagtttatcaaattacttctcattgtgcgatggttttctgtgtaaaacatagtagtgtagccaattcatacattcatttatttgggatggtcttgtacttattttatcattgttagacacatgaacatgatgaaaaatatttaaatataaatgtatttcagttcagcattgatagtctgcatttttaagataatccagaaatgtgaatactgttaagacaaatactagattttttytcctgattttatgtctttattctgcttgattttaggacgaataacctttacagaaccaaatattcagaatgtgccaagagattttgaaatcaaaatgccaacactagtaggagaaagcccaccttctcaagctgtaggcaaaggcctacttcccatgggcaggtaggtgctgtttctctgtatctgtattaataaacttttgtaagtatgaatggctcaaaatagcttattagacaaataaatgaaattaatttaattttatgtttcagacatacccatttctgtcctagaccgttttgaatcctgagtcccatctataaagaagctaattcatgtttaattcaatgtttgctaaaaaaagttctagtatctttgttaagctttaaagtgagtctcagataaagatttggttttctttgtttgtttgtttttttgagacggagtcttgctctcttgcccaggctggagtgcagtggtgcgatctcagcttactgcaacctccacctcctgggctcgagcaatcctcccacctcagcctcctgagtagctgggaccacaggcgtgtgccaccatgcctagctagtttttgtagagacaagggtctcactttgttgccctaactagacccgaactcctgggctcaagcaatctactcgcctcggcttcccaaagtgctggtattacaggtgtgagctaccacacccagccctcagtaaggtttttattaagtttcttagacggaaatactgatgttactgaaaatcagacctytttcatatatttgagactgcttcatgtctaactgatgatgttgtttgcaccacagaggaaaatataagaagggtttcagcgtgaatcctagrtgccaggcacagatggaggagagagctgyagacagaggaatgccattttcaattagcatgcgacatgcctttgtgcctttcccaggtaaggtggctgatagctttgaagcttctcattgctgtgagaatgtttttcaaagcatggataaagcctgaaatatgagtgagacttagagcatgcattggtccctccatctttctgtctacggtggagcctgcctttctcctttgtcatgccaggtttatagcagtcatcatctccatgatctgctctgtgggaaacttttatggtgtgtgctcagcagcagcagtctgctgaaaccatgttttctaacgtcattgtaaacctctttgcaaagtccagttggttttgtcagtcttcatcctctttaacttgtttacagcatttgtcactgttaatcaactccttcttcaatttctcttctcccttgacctctaagggcagtttttctctccttctaacttgtttgcttttatgttttttctctctttttctgcactgctgcttcctattgcatggggtggcccctaaggctattctcattctgcctgacccctcctcaatactctagtcataaaccttttgttgtcaagacatttggaagttatgatgtaacttgcagatcattccaactgttagtatacatatttgttctttaatctttcaccagctagcaagtcctagtgagtacaattaaccatctgaatttatttaaattccatcagaaacttatatgccaatggtgaattcagacctatgatgacatgtcctgcttggcaatttttagttttacttatgtctaaactatcagcatacacaattctatcaaagttatccaagggagtccccagaaagtctatgtggtgtatggtaattttttttttttttttcgagatggagtttccctcttgttgcccaggctggagtgcaatggcgtgatctcggctcarcgcaacctctgcctcccaggttcaagtgattctcctgcctcagcttcccgagtagctgggattacaagcatgggccaccatgcctggctaattttgtatttttagtagagacagggtttctccacgttggtcaggctggtctcgaactcccaacttcaggtgatccgcctgcctcggcttcccaaagtgctgggattacaggcgtgagccactgcgcctggctaaggtgtatggtaatttctttctttctttttttttttttttttttgagacggagtctcactctcgcccaggctgaagtgcaacagagttttcttaaaactcatgaatcagtttttttttttttttccttgcagcttcctcacccctctcagccttcatagaaattctggagtaggaaaatgcaattgacatactgaatagtacatcagagtctccttgctctggattagactttggcttaagagaatgttgkggctggtttcattttttttatccagaccacttaaattttctccatattagcaataagcctgttttgccttcttatcatttgtgtgttcagygtagtaacacttttaatttccttcaagaacttttcctttgcattcacaacttggctaactgtatggcacaagaggcctagctttcaacctatctcagcttttgacatgccttcctcataagcttaatcgtttctagctttttggtttaacgtgagagagatgcgactttccctttcacttgaacacttagaggccattgccattgtagggtgattaattggcctaattttaatattgtatctcagggaatagggagttctgagagagatgggagaaaggtgggggaacagccagtcagtggagtagttagaacacacacaaaattgatcaatgaagttcactcttacatgagtgtggttcatggattgtaataatagtaatatcaaagatcaccataacagataataatgagagggtttgaaataatgtgagcatcactattaataaaatgtgccagagtgagcacatgctgttggaaaaatggtgctgaaacacttgctccactcagagttgccaaaaacctttaatttctttaagaaaaaaacctgcaatatctgtgaggcataataaagtcaagtccaataaagcaaggtatgcttgattttataaaacttatgttttgaaaaagtagatcacacgcccaagttgtttcaaacatactcaaaagtatttctcacaaggcatggtggctcacacctgtaatcccagcactttgggaggctgaagcaggaagatcgcttgagtccaggacttcatgaccagcctgggcaacaaagggagaccccatctttacagaaagtcaaaaaattagctaggcatggtggtgcgcacctgtagtcccagctactcaggacgctgtggtgggaatatcatgtcacttgagccctggaggttggggctgcagtgagccatgatcatgccactgcactccagcctaggcgaaaaagcaagaccctatgtcaaaaaaaaaaaaaagaaaaaagaaaaaaaacatttccagtaactgaattgagtaccagaaactcattttttaaaaaattgcatctgattgacaaagctggttcatctttttttagaagtattaatttgactttgaagcagaaacatccattacaaaacaatgtctatacaagttaagkaaatttactaattcttatgttactcattattacaagttaagtatcctttatctcaaatccttgggaccaaaagtatttcagattttggaatatttgtgtatacataatgtgatgtcttggggatgggatccaagtcataatgtgaaatttatgtttcatatacatcttatagacatagcctaaaggtaatttatacaatattttaaattttgttcatgaaacaaagttataactttgacctgttacaagaggtcggttgtggaactttccacttgtggcattatgtcagtgctcagaaagttttagattttagaacagtttggattttgaattttcagattagggatgctgtacctacagtatgtcaaattcaaaggagtattacttaaataaaaaagcgactctaaattcatcaacatcagagcatttttaaaaatttttaatattttcagtttatataacatgttgattgtaattaaactatactgcatattgatttatgctttaaaaatgcataaaattattattattattgttgttgttgttgttgtttttggtagagatgggggtcccactatgttacccaggctggtctggaactcctgggctcctccaggagtgatcctccagccttggcttcccaaattattgggattacaggtgtgagccactgcacccagcccattattaatttgttttatgaaaagttttcatttccaaatacattctcttacctgtctagctaggtcagaagtacatttttygctttcttggagcctcaaatatatgctgtgtgatatcagtcaaaaaacataaaccacattgttctttttgtctttgattactgaatacttggcaaatgttcttttgtttcaagaaaatattgaactggagtacagttaatctttgtaggactctcatgaatcaaacaaggagctttgacagagtatacaagattgttaaattcattgttggaaattttcaacagttcttaagttggtgatgactcagcatttgtacacatacataaaataattttaactgtattgtaacacttttgatggtctgatttagaaaactaaacataaatcttttttatatatatagtggaatgaagaaatagggaaacatcattctcctgtttaaaaatctaaaaaaaagaagtttttaatgacaaagctagagcattgtctatatgatgaaaactaattttttcatatctacttaaaattcttctttgacaaatgtaaaagattccaaaatatctatgccactggtttgattttgtaagctaagaatggtgttttctttataaatttggaagtccactgagacaaagcctattcagaatattaattaagcagtttctctgttatgggacaatttatccaaagccaaaaaagaaacacttgcaatttgattgatctatcatactgttaggttacctatagaatctataggtaattgtttggtggtgtattagtccgttgtcatgctgctaataaagacctacctgagactgggtgatttataaaggaaggaggtttgatggactcacagttccacattgcyggggaggcctcacaatcatggtggaagatgaaggagaagcaaagggacatcttgacatcttatatggtggctggcaagagcttatgcaggggaactcccatttataaaaccatcagatctcgtgagacggactcactaccatgagaacagtatgggggaaaccacccccatgattcatttatcttcacctgacctcttgacatgtgagttttgttacaattcaaggtgaggtttggatggagacatagccaaaccttatcaggtgtgttatttgaagatcttttgctttttgtaaaatgtgattgattcttgttattcatggtagttgcattctacaaagccacaatgaacactaaattaaacaaatattgaagcattgctgctagtatgcggacgttatggttgccaccttgttgaatctttggattttgtagtcttcactaatagaatataaggttttcttttgtcagacaatttactttcacatcagcttggtcattttgaggcttttaaagctttgctaacaaatgtttagagtagcctgcactctagggctaggttattcctgttcataaggtgtggcctttctggagtctacttggtgctaaagttgtttaacaagatctcttctcagtcttgtttgttacagcttgatcatttctcagcattcaagaatatgttgttgaagtagttgttcagctgaaagctatgcagtatttgttcttcctttagtaatatttatttcttcagtgtctgttctttggcgccctgcactttccccctgcacaacttaatatttggtcaaaaatccaagggaattcctgtgtgtatttctggtgctccttttatgcacaactcttttctctccaaattccagctgcctcaaagccccaaactctagactgtgtttccttagttcagagacagatacagcgctgtgcttcagctccctttccctgctacagattctggaaaatgcctccattcagatccctgagacctttgtgtggctcacctcattttcttccattctcagtgattatagttctgcatggcttgttgtctaacatctgagaaccattttttttttcccatataatttgtccaattttgtggttgtctgtggtaggaagtccaccaaagttgtggccatttacagtttgagtatcccttgtgtgaaatgcttgggactagaagtgttttagattttgattttagaatatttacactatttagaatatttaccaattgaacatttctaatccaaaaatccattatctgaaatgccccagtgagcgtgacgtttgagcatctcgttggtgctcaaaagttttggattttggagcatattggattttggaattttggattagggatgctcaacctgtattttaaattagtatttatctctgtttttgaataggttattcattaacatagttcagaaatcaacatgatataaaagatgtgtattgggaagctttgcttccttccctgtcatctacactatccttcccaattcttatagattactacatgtatgaggccttttatgtattttgacagtatttctttatgcagatataagcaaatatgggtatataatcttttcctatttttacacaaaattagcattctgtatacattattgtgtaccttgcttttttcatgtaatgtttctttttctttctttttttttttttttgagacggagtctcactctgtcaccaggctggagtacagcggtgggatctcagctcactgcaacctccaactccctggttcaagcaattctccagcgtcagcctcccgactagctgggattacaggcatgctccaccactcccagctaatttttgtatttttagtagagacagagtttcaccatgttggccaggatggtctcgatctcctgacctcgtcatctgcctgccttggcctcccaaagtgctaggattacaggcatgagacactgtgcctggctgtaatgtttctatactagagatttgtgcttatcaataaggacatttaaacaaaaaccagtttaaactatgttcaggtagtctgtgcagcagtctgtgggcttgtttgctgagtcatagagtaaaaacctgtttaatttcgatagacactgttaaattgccagcgaatggggaggagattccattttacttctcagtaacaatgtacgagtgtttttctcctcagccttgtcacagagtgttgtccaacttttgtaatttttgcaatacaggtgaagaaaaattgtttcttgccatagattttttatttctcttatgaagctgagcattctttaatatgtttaaggttcttttgtttttattatgtctgaacttcttatttatagtttgtcttttcctccacaagtaacaactcttcttatgaaagggcaatgagtcttttgtgagatcagttgcaaatatttttctaatttttctttgaccctgcttttatttttttaactttgtttttgttttgtcrtgcatatctaatccacccatttctaatctrtaggtaaattattttaatcgttttaataacttgctcacctgttgaccacttgatttttttcactgaatgactttgttattgtcaaatcagggcacacatttctctccagcccacttaacatttgcacacattggacaccagttttttcattaattaattcattcaacaagcatttgttaagggcctattatctatcagcaactgtgcaagcttttctgtagaatgaaaaggaaaattaagcttcctattcttaagtactcagagcaaaataagaraggcatgaaagcaccattttggattatgtgccaggtgctgtaggaacactgaggaacacactccacggtgggcagatgtcagggtggctttacccatattatatatacttgaaagctacatggaaaaaaatgacctaagatacagagctgaattccatcatattaagaggaaggttttaacttttgacatgtgatttcaaagttctaagttagracaaaatttttgtcatcctgctcaattatatgatatagaacttggattgtgtgatatagaaactttgtactagcttttctgaaatcacttctacttcaggtggttcaatactggctgctgactactctcagcttgaactgaggatcttggctcatttatcccatgatcgtcgtctcattcaagtgttaaacactggagctgatgttttcaggagcattgcagcagagtggaagatgattgagccagagtctgttggggatgatctgaggcagcaggcaaaacaggtgattttagtgaacatggttaatataaaggagaagaatttagtgactcaaaaaaaattaaaaatggtctcaattatttgcagctgagaaacagtttctccaactttggatctttcaaagcacagttcatctgagcttatctcatggtattcattatattttcttttgtggaggcagtaggaagaaccaaaaagactgagatctgaggctacttcgtgtcaggaaaaccatatgcatttaaagccattatatggctagtcacagtgcctggtactcactagatgtcatggtggtagtggtggtcagagtgcgtgtgttcgtacacacccgcatgtgtgcacatatgtatacttaaaaaacatctttccaggccgggcgcggtggctcacgcctgtaatcccagcactttgggaggctgaggcgggcggatcatgaggtcaggagatcaagactatcctggctaacacagtgaaaccccgtctctactaaaaatacaaaaacttagctggccgtggtggtgggtgcctgtagtcccagctacttgggaggctgaggcaggagaatggcgtgaacccaggaggcggagcttgcagtgagccgagatagcgccactgcactccagcctgggtgaaagagcaagactccatctcgaaaaacaaaaaaaaaaaaaaaaaaaaaaatctttctagtctgtaagtgttctgaggtaaagttccatattttcatttttatatcttttatagcatcaagccatagtgctttgtacagaaggtggtctctaaatgtttgttgaaaaaatattgctgacctgtagattatagttagtacctgatagctttttagccgttgaagttattggttagtaatctacctatgaaacttcatgctgcctttgtaactttgaaatggatccatgttagtttctactctggataactattaggcaaagagtaagtcagaggccacatttataccattccttggcctgggttaacactgatactttcttaccacatgacccgtgggaaatctgatgccatttgcaagacagtaggattgctagctgaggtaaatgcacaccaccgtactctgagatcctgctgtttttgtttcgcatttacatttctagttcctcacagttgtagttttygtgtgtgtgtgtggagaggtgaggtctcaatttgtcgcccagggtggtcttcaactcctggcrtcaagtgatacttccaacttggcctcccgaagtgctgggatcgtaggcatgagccactgcacccagcctcacagctgtacttcttgactggctcatcaagcatggaacactttctctaaccacctgtttagcaccaacacttgtttcttccactatttaaaaagccagctctgtcctctctgtctgtttaatccctggagaggttctgcatttagcaagaatcaaaccctaggtaaaatagataatattcccatatttaattctcataacccatgagatagctattattattactatcaccattttatagaggaggaaactgaagcacagaaagtaatttgcttaaggtcatgcagctataagtggtagaccaagaataaattcagaatgccagaacttgggcacccgacttccttttatttatttatttatttatttttattttattattattatactttaagttttagggtacatgtgcacaatgtgcaggttagttacatatgtatacatgtgccatgctggtgtgctgcacccattaactcgtcatttagcattaggtatatctcctaatgctatccctcccccattcccccaccacacaacagtccccagagtgtgatgttccccttcctgtgtccatgtgttctcattgttcaattcccacctatgagtgagaacatgyggtgtttggttttttgttcttgcgatagtttactgagaatgatgatttccaatttcatccatgtccctacaaaggacatgaactcatcattttttatggctgcgtagtattccatggtgtatatgtgccacattttcttaatctagtctatcattgttggacatttgggttggttccaagtctttgctcttgtgaatagtgccgcaataaacatacgtgtgcatgtatctttatagcagcatgatttatagtcctttgggtatatacccagtaatgggatggctgggtcaaatggtatttctagtactagatccctgaggaatcgccacactgacttccacaatggttgaactagtttacagtcccaccaacagtgtaaaagtgttcctatttctccacatcctctccagcacctgttgtttcctgacgttttaatgattgccattctaactggtatgagatggtatctcattgtggttttgatttgcatttctctgatggccagtgatgatgagcattttttcatgtgtcttttggctacataaatgtcttcttttgagaagtgtctgtttatgtccttcgccaactttttgatggggttgtttgtttttttcttgtaagtttgtttgagttcattgtagattctggatattagccctttgtcagatgagtaggttgcgaaaattttctcccattctgtaggttgcctgttcactctgatggtagcttcttttgctgtgcagaagctcgttagtttaattagatcccatttrtcaattttggcttttgttgccattgcttttggtgttttagacatgaagtccttgcccatgcctatgtcctgaatggtattgcctaggttttcttctagggtttttatggttttaggtttaacaagtaagtctttaatccatcttgaattaatttttgtataaggtgtaaggaagggatccagtttcaggtttctacatatggctagccagttttcccagcaccatttattaaatagggaatcctttccccattgcttgtttttctcaggtttgtcaaagatcagatagttgtagatatgcggcgttatttctgagggctctgttctgttccattgatctacatttctgttttggtaccagtaccrtgctgttttggttactgtagccttgtagtatagtttgaagtcaggtagcttgatgcctccagctttgttcttttkgcttaggattgacttggcgatgcaggctcttttttggttccatatgaactttaaagtagatttttccaattctgtgaagaaagtcattggtagtttgatggggatggcattgaatctacaaattaccttgggcagtatggccattttcacgatattgattcttcctacctatgagcatggaatgttcttccatttctttgtatcctcttttatttccttgagcagtggtttgtagttctccttgaagaggtccttcacatcccttgtaagttggattcctaggtattttattctctttgaagcaattgtgaatgggagttcactcatgatttggctctctgtttgtctgttattggtgtataagaatgcttgtgatttttgtacattgattttgtatcctgagactttgctgaagttgctcatgagcttaaggagattttgggctgagacaatggggttttctggatatacagtcatgtcatctgcaaacagggacaatttgacttcctcttttcctaattgaataccctttatttccttctcctgcctrattgccctggccagatcttccaacactatgttgaataggagtggtgagagagggcatccctgtcttgtgccagttttcacagggaatgcttccagtttttgcccgttcagtrtgatattggctgtgggtttgtcatagatagctcttattattttgagatatgtcccatcagtacctgatttattgagagtttttagcatgaagcgttgttgaattttgccaaaggcctttactgcatctattgagataatcatgtgttttttttctctgtttctgtttatatgctggattacatttattgatttgtgtatattgaaccagccttgcatcccagggatgaagcccacttgatcatggtggataagctttttgatgtgctgctggatttggtttgccagtattttattgaggatttttgcatcaatgttcatcaaggactttggactaaaattctcttttttggttgtctctgccaggctttggtatcaggatgatgctggcctcataaaatgagttagggaggatttcctctttttctattgattggaatagcttcagaaggaatggtaccagttcctccttgtaactctggtagaatttggctgtgaatccatctggtcctggactctttttggttggtaagctrttgattattgccacaatttcagagcctgttattggtctattcagagattcaacttcttcctggtttagtcttgggagcgtgtgtgtgtcgtggaatttatccattttttctagattttctagtttatttgcgtagaggtgtttgtagtattctctgatggtagtttgtatttctgtgggatcggtggtgatatcccctttatccttttttttttgtgtctatttgattcttctctcttttcttctttattagtcttgctagcagtctatcaattttgttgatcctttcaaaaaaccagctcctggattcattaattttttgaagggttttttgtgtctctatttccttcagttctgctctgattttagttatttcttgccttctgctagcttttgaatgtgtttgctcttgcttttctagttcttttaattgkgatgttagggtgtcaattttggatctttcctgctttctcttgtgggcatttagtgctataaatttccctctacacactgctttgaatgtgtcccagagattctggtatgttgtgtctttgttctcgttggtttcaaagaacatctttatttctgccttcattttgttatgtacccagtagtcattcaggagcaggttgttcagtttccatgtagttgagtggttttgagtgagtttcttaatcctgagttctagtttgattgcactgtggtctgagagacagtttattataatttctgttcttttacatttgctgaggagtgctatacttccaactatgtggtcarttttggaataggtgtggtgtgctgctgaaaaaaatgtatattctattgatttggggtggagagttctgtagatgtctattagatctgcttggtgcagagctgagttcaattcctgggtatccttgttaactttctgtctcgttgatctgtctaatgttgatagtggggtgttaaagtctcccattattattgtgtgggagtctaagtctcttgaaggtcactcaggacttgctttatgaatctgggtgctcctgtattgggtacatatatgtttaggatagttagctcttcttgttgaattgatccctttaccattatgtaatggccttctttgtctcttttgatctttgttggtttaaagtctgttttatcagagactaggattgcaacccctgcttttttttgttttccatttgcttggtagatcttcctccatccttttattttgagcctatgtgtgtctctgcacgtgagatgggtctcctgaatacagcacactgatggatcttgactctttatccaatttgccagtctgtgtcttttaattggagcatttagtccatttacatttaaagttaatattgttatgtgtgaatttgatcctgtcattatgatgttaactggttattttgctcattagttgatgtagtttcttcctagcctcaatggtctttacaatttggcatgattttgcagtggctgataccggttgttcctttccatgtttagtgcttccttcaggagctcttttagggctggccaggtggtgacaaaatctctcagcatttgcttgtctgttaaggattgtatttctccttcacttaatgaagcttagtttggctggatatgaaattctgggttgaaaattcatttctttaagaatgttgaatattggcccccactctcttctggcttgtagagtttctgccgagagatccgctgttagtctgatgggcttccctttgtgggtaacccgacctttgtctctggctgccgttaacattttttccttcatttcaactttggtgaatctgacaattatgtgtcttggagttgctcttctcgaggagtatctttgtggcgttctctggatttcctgaatgtgaatgttggcctgccttgctagattggggaagttctcctggattatatcctgcagagtgttttccaacttggttccattctccctgtcactttcagatacaccagtgagacatagatttggtcttttcacataatctcatatttcttggaggctttggtcgtttctttttactcttttttctctaaacttcccttctcgcttcatttcatcttccatcrctgataccctttcttccagttgatcgcatcggctcctgaggcttctgcattcttcacgtagttctcaagccttggctttcagctccatcagctcctttaagctcttctctgtattggttattctagttatacatttgtctaaattttattctaagtttttaacttgtttgccttttgcttgaatttcctcctgtagctcggagtagtttgatcgtctgaagccttcttctctcaactcgtcaaagtcattctccatccagctttgttccgttgctggtgaggaactgcgttcctttggaggaggagaggcgctctgctttttagagtttccagtttttctgctctgttttttccccatctttgtggttttatctacttttggtctttgatgatggtgatgtacagatgggtttttggtgtggatgtcctttctgtttgttagttttccttctaacagacaggaccctcagctgcaggtctgttggagtttgctagatgtccactccagaccttggttgcctggatatcaacagcggtgactgcagaacagcggattttcrtaaactgcgaatgctgctgtctgatcgttcctctggaagttttgtctcagaggagtacccagccgtgtgaggtgtcagtctgcccctactggggggtgcctcccagttaggctgctcgggggtcaagggtcagggacccacttgaggaggcagtctgcctgttctcagatctccagctgcgtgctaggagaaccactgctctcttcaaagctgtcagacagggacatttaagtctgcagaggttactgctgtctttttgtttttctgtgccctgcccccagaggtggagcctacagagacaggcaggcctccttgagctgtggtgggctccactcagtttgagcttcctggctgctttgtttacctaagcaagcctgggcaatggcgggcattgggcacccgacttcctatccaacacacttatccgccggagacaactgcttctatttaatagactcctgcatgatttaatagtgtttatgctataccagtttttgtttgtgtcaccatgcactgaaccacctaatccctgagccttgctgagatctcagacagcactaagcaacatgagttaaaaaaaaaaaaaacaggagtaacaacaaaaaaaaggtgaaaaagaaaaaaaggaaaggaaaaaggcattaaaaaacgtggcggtggggggcagttccaagatggccgaattggaacagctccagtctacagctcccagcgtaagctatgcagaagacaggtgatttctgcatttccaactgaggtaccaggttcatctcactggggcttgttggacagtgggtgcagcccaccgagcgtgagccgaagcagggcgaggcatcacctcacctgggaagcacaaggggtcagggaattccctttcctagccaagggaagctgtgacagatggcacctggaaaatcgggtcactcccaccctaatactgcgcttttccaagggtcttagcaaagggcacatcaacagattatatcctgtgcatgactcggaggstaccatgtccatggagcctcgctcattgctagcacagcagtctgagatcgaactgcaaggcagcagcaaggctgggggaggggcgcccgccagtgctgaggcttgagtaggtaaacaaagaggccaggaagctcgaactgggtggagcccaccacagctcaaggacgcctgcctgcctctgtagactccacctctgggggcagggcatagccaaacaaaaggcagcagaaacctctgcagacttaaatgtcccatcggacagctttgaagagagtagtggttctccccgcacggagtttgagatctgagaayggacagattgccccctcaagtgggtccctgacccccaagtagcctaactaggaggcaccccccagtaggagcaggctgacacctcacacggccagttacccctctgagacaaagcttccagaggagcgatcaggcagcaacatttgctggtcagcaatattcactgttctgcagcctccgctgctcataccgaggcaaacagagtctggagcggacctccagcaaactccaacagacctgcacctgagggtcctgactgttagaaggaaaactaacaaacagaaaggacatccacaccaaaaccccatctgtacgtcaccatcatcaaagaccaaaggtagataaaaccactaagatggggaaaaaacagagcagaaaagctgaaaaatctaaaaatcagagtgcctctcccactccaaaggaactcagctcctcgccagcaatggaacaaagctggacggagaataactttgacaagttgagagaaggmggcctcagacaatcaaacttctccgagctaaaggaggaagtttggacccattgcaaagaagctaaaaaccttgaaaaaagattagacgaatggctaactagaataaccagtgtagagaagtccttaaatgacctgatggagctgaaaaccgtggcaaaagaactacgtgacaaatgcacaagcttcagtagccaattcgatcaactggaagaaagggtatcagtgattgatgatcaaataaatgaaatgaagcaagaagagaagtttagagaaaaagaataaaaagaaacgaacaaagcctccaagaaataggggactatgtgaaaagaccaaatctacacctgattggtgtacctgaaagtgaccgggagaatggaaccaagttggaaaacactctgcaggatattatccaggagaacttccccaatctagcaaggcagcccaacattcaaattcaggaaatccagagaacaccacaaagatactcctcgagaagagcaactccaagacacataattgtcagattcaccaaagttgaaatgaaggaaaaaatgttaagggcagccagagagaaaggtcgggttacccacaaagggaagcccatcagactaacaccagttctctctgcagaaagcctacaagccagaaaaaagttggggccaatattcagcactattaaagaaaagaataatgagaacacttggacacaggacagggaacatcacacactggggcccgttgtggggttgggggaggggggagggatagcattaggagatacacctaatataaatgacgagttaatgagtgcagcacaccaacatggcacatgtatacatatgtaacaaacctgcacattgtgcacatataccctagaacttaaagtataataaaaaaaataaataaataataaaaaagcgaaaaaataaaatagaaaacttgggggtgggggtagactttagttagcttatcatgttgaaagtttttttggaattctgataatcatgcaagttatctttttagattttatttaatgatatttatacagagcttgctttatgtcagtttcctaaacagttataagtaataactcatttaaacctaacaatcccatgatgcagatattactgtcttcattttgtagatgaagaaattaagatacaaattggttaagtgacttgtgcaagatgatacattttgtgaatgatagatctaggctttgaaccccggccgtccttgtgattaaaccagactttctttaattgcctatttagatcatttcccttcactactcccgaaattttcttaggagtttttgtttgtatttaagtgaattaaattctgcagttgtggacatttaggtggctatgaggtgaggaggatttttttttccagttaagtcttcgtcataaagtcacaaagcctactctttctacacttcaagtctttttcaaggacaagaagagggatgttggtaatgcttctcttccctgactcctaggcacttgaagtggaagttaatgaagttctgtgaggagtaaaaagttgctataaagactgctggataaaggacaaatagtcaaaaataaatttttccttagatcacacatacctattcattcatactccctcctgcccttctgtctctctctcaaaaagtaatgctgaaaggcagaaaagatgtttgctggatatcagtctctgtggatgtaacccaccaaaagcaatctaatcattgtttcactcactgtgaaataaaaagtttgccgaaattcgyatcctaatgaacccttttatttgcattttatgtacttataacctttatttgttggatgactccctttcagatttgctatgggatcatttatggaatgggagctaaatctttgggagagcagatgggcattaaagaaaatgatgctgcatgctatattgactccttcaaatccagatacacaggtaatttatcttctagatagtattcttttcaaccrtcttaccatattatatttttaaaaatttgtgtaatggaattttcttttgaaatatcaattagtcagaagttttcatcaggcattgttaagggtaaataagattaaccttataatcacttactaagatgtaataatcttatttcatatttttcattaaagttggaacagaatagtaaaatgtagttgatgtgaatctactgtgtcactgtgaacaacccataaaatcaggagttgacttgtgctttggtttagatagctgtagtttgaaacagtaaactattgagtatatatactaggaactctgataattgctaattaaatatacgaggaattctgagaacaattgctgttatagagcagtttgagtattgtcttaaatgatcttttttgcctgtttgttgtggtataatttacgtataataattagattcaccctgaaaaaggtatatagttctgtgaattttgacaaatgcatatggtcataaaatttacacyacaaccaagatatagaaccattactctatcatcccaaaaagttcttttatgctctttttaaatcaaccctgtcccttatcccttatcccccttgtattggtactgaagcaagcaatacaatactaggcatggtggctcacgtctgtaatcccagcactttgggaggctgaggtggacagatcacgaggtcaagagatcgagaccatcctggccaacatggtgaaaccccatctctactaaaaatacaaaaattacctgggcgtggtggcatgcacctgcaagtcccagctactcggaggctgaggcaggagaatcacttgaacctgggaggcggaggtgcagtgagccgagatcacgccattgcactccagcctgggggtcaagaatgaaactccatcccaaaaaataaaataaaataaaaaatgaaaagaatcaagcagaaattctgaagtaggaaaatgcaattgatatactgaagagtatcagagtctcttaatatagcagaattattcaagcagaagaattactgagtttgaagacaggctatttggaaattcacagaggagataaaaaagtattaaaaaggatgaagcacacctgcaacatcagaaaatagcttcaaaagggcaaatcttctaagagttattggccttaaagaggagtagagaaggagataggagtagacagtgtattcaaagggataataaagaactttccaaacctagggaaagatatcaatattcaagtaaaagaaagttatagaacagatttaacccaaagaagactgccttaagacatgtaacaatcaaactcccaaaggtcaaggataaagaaaggatcctaaaaacagcaagataaaataatcaaataatatacaatggagcttcaatatgtctggcagcagactttttagtggcatgaagtgtcaaaggaaaaacagcttttaccctggaataatatatctggcaaaaatactaatatccttcaaacatgaaggagaaataaagactttctcagacaaatgaaagctgagggatttcatcaacaccagagttgtcctacaagaaatgccaaaaagagttctacaattagaaagaaaaggatgttaatgagcaataacaaataacctaaaggtacagaactcactggtaatattaagtacgcagagagacacagactattataacattgcaattgtgatatataaactattatcttaaatagaaagacaaaaatattaatcaaaaataactgtaacagcctttcaagacactggcagtacaatacgatataaatataaacaacaaaaaagttaaaaagtgggccaggcgcggtgggtcacacctgtaatcccagcaatttgggaggcagagacaggcagatcacctgaggtcaggagttcaagaccaacatggtgaaactccatctctacaaaaaaatacaaaaattagccgggcatgatgataggtgactgtaatcctagctacttgggaggctgaggtgaaagaatcgcttgaacccaggaggcggaggttgcagtgagccaagactgtgccattgcactccagcctgggagacagggcgagactctttctcaaaaaaaaaaaaaaaaagggttataagacattatttgcaagtctcatggtaacctcaaataaaaaaatatacaacagatacacaaaaactaaaaagcaagaaattaaatcataccaccagaaaaaatcacctttattaaaaggaagacaggaatgaaggaaagaaagagaaaaaaaaccatggaacaaccagtaaacaacaaaatgatgttgtccttaactgtcaataataacattgcatgtaaatggactaaactttccaataaaaagacatagagtggctggatagattttttaaaaaaagaaaaacaagacccaatgatctgttccctacaggaaacacatttcacctctaaagatatagactgaaaataaagggatggaaaagagattccatgccaatggaaaccaaaaaagatcaagagtagctatactatttatcagacaaaatagattccaagacaaaaactatgaaaagagacagaaggtcattatataatgtcttttacattatataatactccttttgagtcaattaagcaagagaatataagaattgtaatatgcacccagtattggagcacctggacatataaagcaaatatcattagagctaaagagagagagagagagatcccaataataataactggagatttcaacacccctctttgagcagcagacagatattccagacagaaaatcaacaaagaaattatgctaaatctgcactgtagaccaaatggacctaatagatatttacagaacatttcatttaatggccacacaatacacattcttctcctcagcacatggattattctctaggatagactatatgttagataacaaaacaagttttaaaatattcagaaagttaatatcaagtatctactgtgaccataatggaataaaactagaaatcactaacaaggaattttggaaagtatacaaacatggaaattaaacaatatgctcttgagtgaccagtgagtcaattaaaaaattaagaaagaaaatttaaaatttcttgaaacaaatgacaatggaaatacaacacaccaacacctatgggatacagcaaaagcagtgctaagaaggaagtttatagctataagtgcctacattaaaaaaaaagaagaagaaaaacttcaaataacctgcaatccatcttaaaaaactagaaaagtaagagcaaggcaaatccaaaattagtagaggaaaagaaataatacagatcagagcagaaataaagaatgaaattgaaacaaagtatacaaaagaacaacaaaacaaaaagttggttattggttgtttttttttttttgagatggagtgttgctctgtcacccaggctggtgggcagtggcgtgatcttggctcactgcaacatctgcctcctgggttcaagcaattttcctgtctcagcctcccaagtagctgggattacaggtatgtgccaccgtgcctggctagtttttgtatttttagtagagacagagttttgccatgttggccaggttggtcatgaactcctggcctcaagtgatctgcccatcttggcctcccaaagtgctgggattacaggcttgagccactgcacctggcctgaaaataagttggttttttgaaaagataaaattgacatacctttagccagactaagaaaaaaggagaagatccaaataaataaaatcagaaatgaaaaaggagacagcacaatgaatactccagaaattcaaaggatcattagtggctactatgagcagctatatgccagtaatttggaaaatctagaagaaatgggtaaatttctagacacatacaacctgccaagattgaaccatgaagaaatctaaaacctgaacagtctaagaacaaaaaaacctgaacagtctaagaacaaataatgagatcgaagccataataaaaagtcttccacaaagaaaagcctgggactcaatggcttccctgctgaattctaccaaaaatttaaataactaataccaatcctactgaaactgttctggaaaatagaagaggagagaacacttccagactcattctgtgaggccagtattaccctaataccaaaaccagacaaagacatatcgaaacaaacaaacaaaacctacctaccggccaatatttctgatgaaaattgatgcaaacatcctcaacaaaatagtaacaaatggaattcaacaatatattagaaagatcattcatcatgaccaagtgggatttgtccctgggatgcaaggatggttcaacatatgcaaatctatcaatgtgatacatcatatcaacagaatgaaggataaaaacaatatcatttcaattgatgctgaaaaggcatttgataaaattcaacattccatcatgaaaaccctcaaaaaactgggtttacaagaaacatacctctacataataaaagctgtgggtatgatagacccacagctagtgtcacactgaatggggaaaaagtgaaagcctttttctctaatacctggaacacgacaaggatgcccacttttgctttcatcactgttattcaacatagtactggaagtcctagctcaagcaatcagataagagaaagaaataaaggacatccacactggaaaggaagaggtcaaattctccttgtttgtagaagatatgatcttatatatggaaaaacctaatgactccatcaaaaaactattagaactgataaacaaattccttagtatagttgcaggatacaagatcaacatacaaacatcagtagcatttctatatgccaggagcaaacaatctgaaaaagaaatccggaaagtaatctcatttataatagccacaaataaaattaaacacttaggaattagccaaagaagtgaaagatctatataaggaaaacttataaaacactgatactagaaattgaagaggacacaaaaatatgaaaaaatattccatgttcatagattggaagaatcaacattgttaaaatgttcatactccccaagtcaatcaacagatttaatgcattccctatcaaaataccaatgacattctttactcttcacagaaatagaaaaaaaaaaagtactacaatttacatggaaccacaagagacctagaatagccaaagctatcctgtgcaaaaagaacaaaactggagaaatcacattacctgacttcgaattatgctacagacatatagtaaccaaaatgacatagtactggtataaaacaggcacaawgatcagtagaacagaatagagaacccagaaagaaacccacacatctacagtgaactcattttcaataaaggtaccaagaacatgcactggggaaaagacagtctcttcaataaatggtgttgggacaactgaatatgcagaagaatgaaactggacccctatctctctatatatacaaaataaaatcaaaatggattaaaaactttaagacctcaaattgtgcaactgctacaagaaaacatgggggaaactctccagtatatcagtctgggcaaagatttcttaagcaatactcacaagcgcaggcaaccacagcaaaaatagacaaatgagatcacatcaggtttaaaaaaaactgcacagcaaaggaaacaaccaacaaagtgaagagacagcccacagaatgggagaaaatatttgcagatacccatttgacaagagattaataagcagaatatatgaggagctcaaataactctgcagaaaaaaaatctgattttaaaatggacaaaagctctgaacagacatttctcaaataaagacatacaaatggcaaagaggtttatgaaaaggtgctcaacatcattgatcatcagagaaatacaaattagaactagaatgtgatatcatctcacaccagttaaaatggcttttatccaaaagacaggtgataacaaatgcaggcgaagatgtagagaaaaaggaaccatcattcacctttggtgggaatgtaaattagtacaactactgtggagaacagtttggaggtttctcaaactaaaaataggctgggcatggtggctcacgcctgtaatcccaacactctgggaggctgaggcgggtggatcacaaggtcaggagtttgagaccagcctggccaatatggtgaaaccccatctctactaaatatacaaaaattagccgggcatggtagtgggcacctgtatcccaaccacttgggaggctaaggcaggagaattgcttgaaccgggaggcagaggttgcaatgagctgaggtcacgccactgcactccagcctgggcaacagagtgagactccatctcaaaaacaaaacaaaacaaaacaaaaaactaaaaatagagctatcatatgatccagcaatcacactgctaggtacatacccaaaagaaaggaaatctgtgtactgaaaagatatctgcatgcactcccatgtttattgcagcactattcacaatagccaggatttggaagcatcctcagtgtccatcagcagatgaatggataaagaaaatgtacaggtacacaatggagtactatccagccatagaaaagaatgagatcttgtcatttgcaacaacagggatggaactggaggtcattatgttaagtgaaataagccaggcacagaaagacaaacttcacatgttctcagttatttgtcactcagctaaaaattaaagcaattgaactcgtggagatagagagtagagtaatggttaccagaagctgggaagggtattgggggtagggggtattgttaataggtacaaagaaatagttagaatgactaagaactagtatttgctagcacaacagggtgactatagttaataataattaattgtacatttaaagatgactaaaagagtataattggaatgtttgcaacacaaatgataaatgcttgaggtgatgggtaccccattttccctcatgtgattattatgcattgcatgcctgtatcataatatctcatgtaccccataaatatgtacacctactatatacccacaaaaattaaaaatttatgaaaaatgtaaaagcaaggtacaaactgggaagaaatatttgcagtagttccatcgaacaaaggatgtatatccagaatatatgaagaacttttaccattcaatgctcagaagctagacgatccgataaattaaaagtcagaaaatttgaagagacactttaccaaagatatgaatgaccatattaaacattgtcattatttgtcatcaagcaaaagcaaactgagatgccaaaaacaaagagatgccattacaaaaacactagaatggccaatattaaaaacacagtcttttacgttgttcatttatttgtaaaatggtaaaactactttggagaacagtatggcttttttgtgtaaagttaaacatccatttaactatataaccgtgcaattctactatcgtatttgtgcaagaaaaatgaaagcatgtccaaaggaaggctcgtatgtgaatattatagcagctttattcacaacagccagattctgagaacaggccacatgtctatcaacaggaaaatgtataaacaaattttgttatacctccacaacagagtagtatagatcaaggaatagtaattaaatattgatattcagtacaatattgatgattcttaaaaatgttttycttagcaaaagaaggcagacacaaatgagcatatacagtgtcattcaatttgtatgatattcatgaacatgaaaaacttaagagtatcataaagcagatgagtgagtgtctgagggtgatcatggggcctgactgtaaagggagatgaacatgttttgtatcttgtagtagtagctgcaggggtgtgtatatttgttaaaatgcctcaagctgtttaaagcgagtgtattttgttgcatgtaaattatacctcagcactgattttttttttaaagtagctctttcaatttgagtatttggaggtctcctataggagtttggtaagagattttgtagaagtacagcctcttaaatctcacccttttctttcctctttacccaaaaatatcacagtaattcttaaacagaaaaagatgagagtccagtggcttttggaaattcccatgctattgattacatatcaccaacagcaaaggattcatcctggagatgcttaagacataatgactgacccagattgcaaaggatgaatgttggtctaggaaatacaaatatgttggaatactacactacacatagttttttttttattttaagaagtgggtcatgtttattcctagtgaaatatttatcgtaactcatgcattaatttcagcaaggtcctactttggatcatagtgtagatggtaacaaggagctattgaaatgttttaaacctaggaatgataagatgaaagagtaaaaggggattcacacaatcaacagacacttgtgaaaagtgatgtggaatagtcttaagatcctggaataaagacacctagatatctgccccgttctggaatttttagttttacgttttgtttttgttgttgttactcaaaaaacaaaggccatgtagtrgctcayacctgtaatcctagcactttgggaggyggaggtgggcagatcgcttgagctcagatgtttgagaccagcctgggccacattacgaaacctcatctctacaaaaaatataaaaattatcctggcatcgtgacgcggtgcctgtagtcccacctaggcaggaggctgaggtgggaggatctcctgagcctggggagatccaggctgcagtgaaccatgatagcaccactgcactcccacctgggtgacagagtgagcgagatcctgtctcaaaaacaaaaaaacccaaagagttagagtatttcatttctaaagtctcttttatttctaactttttgagtctagaaaaagtgaatgaaagttcgcatgcctgatttgacgatatgatattaatgttaagaatcatcgtggggttttggtgtattttgccatatttaagccagtgaatgaagtgaaggatagactttggttctaattaattatttctgtattttctttgtagggattaatcaattcatgacagagacagtraagaattgtaaaagagacggatttgttcagaccattttgggaaggcgtagatatttgccaggaatcaaagacaacaacccttatcgtaaagctcacgtatgttgaaattttttaggaattttaacttaacatttcaatgacatgtactttttcagcagagtaaatactacaaatatccgttttagggattactggcatattaattggattttctgtatagacaacgtcaaccattggtttcattaaggacttctgaagtgatggcacatgccagtatttgctgaacagagtctgggggattaatgtaaacatgtgtttacttaataatactttaaacatgttctgttgcagtaaaccaattatttattagcttaggtactaagttgtaaataaacttaatttttacatttgctaattattctttgtttcctataccatatactaatttatcatatcataccaaattgctaacattcctcagagattagccagtcactaaattttgattaatttttggttcattctacttgtttgcttattttaaaagcactatctggccaggcacagtggctcatgcctgtagtcccagcactttggaaggctgaggcaggaggattgcttgcgcccaggagtttgagaccagcttgggcaacatagtgagatcacctatatctataaaaataaataaattagctgagtgaggtagtgcaatgcctgtagtcttagctacttgggaggctgaggtgggaggactgcttgagcccaggaattggaggctgcagtgagccatgattgaaccactgtattccagcctaggtggcagaatgagaccctatgtttaattaaaaaaaaaaaaaaggcactatctcatcagagattattaagatatcccaaatagtgaataaggctatttttaacggcacttaaaagatttattgatatttgctcaaattatgtttaagtgtctttctgaattcattgggattcatgaaagtattctgtgtacctaagtatttaaacttctagtatagttcatatcttcctattttaactagatgttttttgcccttcacccataactttgtgttttagtgctcattagacattgtatataatgaaaataccccgctaaacttctgtctggagctcaaagccttcagagcattaatgcttttagggactgtggaagaatagttggctttttgttactgctttactctctagcctcccatatatccacatgcaaatatcagatatttatcaggcttttaccatatctctaagtgaactagtaactttagttgatggactaggaaacttaagttttaagtcttggaagaaataatgcaaacaaaaaaatatatatgaaaacatcattgatatacttaattatttaggtttcagggagaaggaaagacttaaacagattcttgaaggctaaagtttaggctgttgggaatgagaaaaagacaatcacaaaaggataactgagtgaggactggctagaagccaaactggtaggaatggagagtttgagttgtcacataggggtatataattttctcctggatagatggagccagctagaacctaggagactaaaaggcttcttctaaatgacagaaggcttttagtggcaggctgagaaacttggactcgatctaataatacgaattgattatgttttctggaatttacatgataaaaaatggaatatgtagttattaatataaatgaatcatataagtttgtgaaaattaatattattgtacctgaagatgcaagagagtaataagactttttcatgccaaatacttcagtgttaaagttctgattcattatgttgctgctgaggaaaaatattccagccctctgaattaggaatagagtaaacacagccaggttgttttttggtttttgttttggtttttgcttttgttcaaacttttgttgtactgaaaaatacattctcacacataaagaatgtagatttcactaaattatcacagagctacacctgtgtaactaccactcagggcaagaaatagaatactgtcagtgccccagaagcgcccctcatgcatcctcctaatcaccacccatcgccttcccagaaatagccactgttataacttctaacactatagttttgttttgcatttttttgagctccatatacatcatatatgtatattttgtatctagcttctatcaaaattacatgggtaagtcattcttgtttcttgtaggaatagctgtatactcttatataaatataccataatttatctatttttctcttgatgagaacttgggttttcagtttgaagctaagctattatgtttttgaacatgcttgtacaaggttcttggtgcacatttacatgcatttatgtttggtaaagacacagtggtgggattgctgcatattttcaacttcagtagataaagccaaattgttttctgtggagattatagcagtttgtcctcccttcagaagagtatgtgagtcctcactgctctgcattcttgtcgacacttgctattaagctaatataattttagctattctggtgggtataaagtagtatcctgtaattttaatttgtgtttccttggctactagtgaggtaatcttacaaatgagcaaccttacaaatgtgtattagccatttagttattttttcatgggtaaatacctattctggttttctttttaatttttctgttgagttttctgcattttttcttatcaatttgtaggaacctgttactggttacatgtgtagaaaatattctctcctacattgtgtctggccttttctcccactcattagtaattttaggtgtggagagaggtttttgttttattttgtttttcttaaagacagggtctcactatgttgcccaggctggtttcaaactcctggtcttaactgatcatcttgccttagcctcctgagtagctgagattacaggcatttaatataytagaagttgggtatagctcagatgacagaggactagagaatacctctcatgttacattgacccccttccctggagtagacctttttcattttcttagatattttggggcaccgggaatgatattcatatatagattacacctggatattaacccagactcccttctctactcttccaagatgattaattttagtaggcatggttccctgccaagaagcacttggcagcagtcatttcaaggaagttgtaactgaatacccagggatctaggatgtgcgttttcactagcggctaargatttgcctcagcagcccatgaaaagctctgattcacatcagagggctccatacctgcagggctcacactctatattaaagaccaagaggccattggtatagagggtgtgcttaggacattccaacccccctcccaaagaatgatattctacttatttaggattaagattattttgaggagcagatctcttagaatgatgtctagaacagctataacactgatgagctaaatacatctaagtgcaaagtagtttttggatgctaactgagtagtcaagatatctaagctgaagcaatctgaccttatttttgtctgccctaatgtggaaaccccagaatctagagccctggatcatgataggtgttattcttaggatgcagcctaatagttggtgttctgggttgcatctcagtccagctttccagtctggctgcaaatgtgagcactraactgtggacactaaaggaaagtatgaaaccatgttggcatatctggtggagcacctgttgattgttttttctaggctgagcgtcaagctatcaacacaatagtccaaggatcagcagctgatattgtcaaaatagccacagttaacattcagaagcaattagagaccttccactcaaccttcaaatcccatggtcatcgagagggtatgctccaaagtgaccraacaggtttgttcatagatgaggcctgtgctgtaacatgatgagaataattgtatcagaaatgtaaatgggaagtattttttattttatttctcaacagttctcaaatgttttggtctcatgatgtctttatactattagaaattattaaggatttcaaagagctcttgtttttgtgggttatgtctatatatttaccatattataaattaaaacagrgaattttaaaacattaacatttaaagtaattacaaactcaccatattttgacatgtcacatatttttatgaaaataactacatctcttaagaactaaagaaaattcttgataggtggctttattttacatatgtgtaaatctctttaatgtttggcttaagagaacacagctggctgtttgtatctgcttctgtattcaatctgttgtaatatcacatgtcctgtaaccctctttgggaaactctgtacagtctgggatgatgcatgtctcaatttgtgggagacggatgagtttcccaggatgtggaatttcacttctataccaggacagttggccactttgctgcactcttacaagaaaataaaactgaaaaaggcaaatagcctcatagtgttattatgaaagtaattttgactgcagattttgggatcctctgtggtcttcagaccatactttaaggatatgttgatattcctatttatgaccttcagtgttctctgatcttagaatatactcttgatctctttatcacatatgttcctttgctgatattgttttcttrttmttactttcagaatattttccctgagttttccctttattgcttggataaattatttcttgtactaacaagtacagtgaaattttctttttttcttctgtcacattccatatttctgctttaaataccatttcactgtcactgagattgtcaaaccatgacagcagactttttttgtttttgagacagagtttcactctgtcacccaggctggagtgcagtggcacgatctcagctcactgcaacctctgcctcctgggttcaagggattttcctgcctcagcttcctgagtagctgggattacaggagtgtgccaccatgcctggctaatttaaaaaaattttttttttagtagagagggggtttcaccatgttgtccaggctcttctggaactcctgacctcaagtgatctgtctgccaagcttggcttcccaaagtgttgggattaccagcgtgagccatcacacccagccaggaggcatgttttaaattttcctgggaagaaattaaggtttggtgcatacagaggaagaaaaagctgctagagatggggcagaaaggtcatgattagttattgaggatgagatttgctatttctagaagagacatacatacaggttatagagaataatacagccagttataacgtgttcacttacgtacaaaaatacgtagataacaaaagtttattttctcattaagtgaggattattaatattgtcatcagtcccccttgaaatacctgaggcccctcattcattttcagtgtgggactatgtgtgtatatacacacacatacacatttatatttaattgagagagaatatataattaaactcatttggggagtaatactgtgctgtgtgctttggggatttagaagtaaaagttatcaatctatctttaaatttaagttctatttaagaaaggagaggaagatatgatacctgactgaagtatttgtattaattccacacagcagagtgataaatgtcaaaatgaggatacagacagtaatgactttaagagtcagtggaaggcgatatggctctgtcgctgaggatggcttcatgatgtcatgccagcttaaagtagcactaggtcagtaggatgaaaggaaggtgagcatgaggaagcagaccatatggggaacaagagcatcatggcattctaggtcagaagccaggtagccaagggaaatcaagagggcaaaggcatggtcatcagaaagcagaaaagctagagcatccagacagtcaatggtgtgagccaagtgtggcttcatggggcagatccgatttcagctgaacaggtgaacagaggtacagcctttgcagtcctagtgtggaagcagcttgctgcagcctcaggtgattttgtttgcttactgtgtgagagccacctctgagcaaactggcactgcagatagtgacagttgaagaactctctccctgagggaagcaccagatactgagggagatgttactcatgctggacctgaaagataagtagggaatttggacaacagaaaggaagatgactactgtgaggtttaagcaaacaagtaaaggcagttccagtaaaggtgttcatgttgagctttatctttttggtcagaagggcataatctgtaccactagatccagctaatgaggaaatagtaactaagtctagtatatattttggagttatggctactggaaggtatggattatctccacagaaaaacgtacagacatagactcttacatataactgcaaggggtttatgtactctctgaagtccactttgggagcctaggttttacaattacttgtttggagtgtgtacggttcaattggggaagcaccagttctatcacgatgacacttctggccataaaaagacatgagggagtgtcccccttaagaaacagtgcctaacaatattagtttgctttcctggggcaggaatcaggccccatacctccctggtgctattactcagatggtggttgggggactccatggatagagaaaatgttagttattcatgagaaataagttggactagagcttggagcagagttcctcacaccccatttactgacttctttgggagactccttctttctaggaggaagtttgtgagtttataccggatacttagggtaggtagcgaccagcaagtagttattttcctgatagttcytattcttgtgtgttttaatcttctcattaaaattcctcagagttactcagaatctctaaaaacattctcctatgacttagcgacatgctgatcagttttgctcctttttcatgaagtaggattgtcacgaaagagaaaactgcaagggatgttctgcccaatcagaggaggcttcttcatccttcaastccatgatgaactcctatatgaagtggyagaagaagatgttgttcaggtatttttgcaatgcttgtgtccattccataggaagacaagacactgtattgtcaggccgacagctttgtttcctgtgcatgaggattttggaactctaccctagccctgggatggctgtataaatattgagtccttacaggtagaaaaggagctaagagtgttccgttttgtactagttcttaataagtgaagaattgccaatgcaagatgtttttgtcttggaggaattaaacaaaaatttggagtctttcccttagggtttctaagctccaagcattctagcaaaaactttcagaaattcctgctcatcagtgaagaagagtatgagatgtctttttatttattcatttatttattttattttttattttttctgatttagcattttaagcaccattgggtgaagagctccagtctggtttataactttctcaggggatggtttgggaaacattctttgactgggcagtttgttaactacattttttttttccttaggtagctcagattgtcaagaatgaaatggaaagtgctgtaaaactgtctgtgaaattgaaagtgaaagtgaaaataggcgccagctggggagagctaaaggactttgatgtgtaactgtgctgttgatgaagtcctcccagggaagcctgtgcagatgcagtcacctggaaagaacagagattaccctttcacctacctcagcaaaacaaactttcaagtcttgatagacttagcctagtaattttatagtgagagtttcaaactatatatcagtgtctatagcatcaaaaacttctgggggcgtgggggaagtagaataccaagtataatagttacattcactttcaaagagcatctatgaatttgccttttgtaacttactgtggctttaaacatattcagaacagatgcttgaaatatgcacttagcactttggttccacatctgtctgggtaaaccatgaagaaaatgaagctgctgcctcaatcgacccagacagcagccataggcagataaagatttggtttcaccctggtggtggtaggcatcgtgtgtgactttttttcctctaatatcaattttacagtacggaaatagtattttaaaatagtattggctaataaattatgaattctataaagtagtaagacttggtatggttggagtgtaggaatgaatattcatgaaatgtttcttattgcttttccttccctaattcatacaatgaatgtatttggaatacttacatattataaaataaactatacctcttcaagaggtatcctgttctgtaagatcagatgtttttattgcaggtcaatataatactgccagagacagaaaatacccccttatcagtcccttagtgcctctttctgtttgtggcatggtgagaaaacccatgctgaaaagattgtactttgtgatcccaatcagagggatggagctaatctttttgctgttgaaataaaatgaatttatgagaaactttatatcaacaattgttttgttaaaaattatagttggtctaagagtgtcccttatttagttactccatagcttgttcataggaaacactgattatattcttaatcagttaccagaagagctcttttatgtttattaatcagaataatgaaaaaagatagttgctttataaaatgtaatgcattatcagtagttgggtattaatgcataagagacttagacatagtttttttggggtggcagggtgagaaaggcagagatggcagcagtaagagggaagaatatcattatttctttttccatatttacctgtactatgtttctcagaagctgaagtgctgtcagtattctggtaggcttgaaagatctggcacaagagaaagctcaatctgtttacctgtgagtgttcttcaaacatgagggcaagcaaaagtcccttctgcctcattctctgcagccatggcccagcatgtgtagtcacatgcattttctcattctgtttgacctgtcagctggacctgaaacaggccatccccattttgcatgattcagatgtgcacaaatcccagttactatggtttacttaataacatgagtctcccctgcaacacaattcaaatttcagttaccagtggatattaactgtgagtaactgcatgaaattcaaacttcactgatagttcttcaaaccacaaccactgtgtaaataagaaatgcacattgtgttatgcagaataatgccccccaccccaaagttcacatcctaattcctaaaatctgtgaactattatattacatggcaaaagggaccttgttgatgtgattaagttagagatcttgaggtgggggattatcctggattatctgaatggttccattgtaatcaccagggtctttataagagggaagcagatggtcagagtcagggaagatgtgacaacagaaacagagaaagatttgaagatgctacactgctggctttaaagttggaagaaggggccatgagccaaggaatgcaggaaccctcaaaaaattggaaaaggtaaggaaatggattctctcctagaaccttttgaagggatgtagccccgccaacaccttgactctagcccagttaagaccattttggacctctgtcctttagaactgcaagacaattatttgaattgttttgagctagtaagtttgtggaattggtagcagtaacaggatattcatacatgcatcatgatgaggaccagttacatcacttcttccaaaggctgtctgtgattggctacttcacatctgttattcactttacttgcagatggcaaaatgtagttgtgttgattgcttgtctcccagtggtaaatccacattatacaaaaatggataatcaaaagtagaagttggctaataaagatcaaagtgtaccagagaagtaaaaaataacactggaagtgaaattcaaattgaacataaatggaattacagaagaactacctgcctgggaatgctgacactactgctgtttgagatacagtagataggcaacctgagaaacagtaaaggcacaatttacataaatgaggaaaatggttgtgacaaaaggataaagatgtcccagaggaagcgatgccaacaaaaaacttcattaatttttaatctataactttaattccatcaaagtctcatcaggattttatattttttagatagatagtatcttaaaactcacctgaagaaaaaccagtacctggccgggcgtggtggctcacgcctgtaatcccagcacrttgggaggccgaggcaggtgcatcacgaggtcaagagatcgagactatcctggccaacatggcaaaaccccctctctactaaaaatacaaaaaattagccgggtgtggtggcgggtgcctgtaatctcagctacttgggaggctgaggcaggagaatcacttgaaaccaggaggtggaggttgaagtgagccgagattgygccattgcactccagcctggacaaaaagagcaaaactctgtctcacacacacacacacacacacacacaaaataccagtacctatcaaacttgagaaataacaaagatttgtatcagatattaggatgtattacaaagacataatagtttcaaattatatataggggatagaaataggtaagagtattaaaacagactaaagaatttaagaaacagacttatatgagaaatgattaaaatgtcatttcaaattagtggtgaaagatgggctgttcataaacgcgatgtagtgataagagtatccattggtaaaaatatcaagttggatctctatctcaaatgctcacaaaatactccagatggattaaaagcctaaatatttaaaagaagactatgaaagtaaattaaaaaaatatgagaatgtttatgactttatagaaataaaagcctgctttaaaacaaagttctaaaatcataaaggtaaaagataaaacttgactacattataaagaaaaattttcagtataaaagggacatcaataaagttaaatcatgaaagacactgaactgtctaacccaggggccatggcacaacagcaaatccaaagcagatccatagcctaagtaaggctgagttagcaagcgagtaccatatggtgctaaccccaagtgagagcaaaccacacattcatcagttgtacttcagcacatatcagtggaaggtgctcaagggtcacaacagaccagccactgttacagagtcccagaggatccaaggaggaagacaaggaccagcacccctccttccttatcatgagttaatataagccttcccctaaacccagaagccaatcttgtaaggaggaagagggagagactacagaattcctaggaagactcaaaggcaaggaaaactcagtcatagaaaataagctacattttaaaaatcaacaatagacaaatgatctgtagtagagtctgactccatcttttgatgtttgctgacaagttttgagcctctattctcccacttcctcttctgtccacatctgagtaagctgagaagaaatccaatgctcccttctttggtgccagtgggattttcaaaccctgcaagccccatgctgcaacccctggcccaccttctgaccacaataaaaacccagtctcttccttgttctctcaagttgccttgctctctgcagaaagcctcactgagtaataaaccttttcgtatcagaaaaattccaattaaaacaataagatgccattttcatctttcacagtgtgaaaaaataaaaatatttgaaaataggtgaagatgagactaatttttatacactggtagaagaataatttagtcaacatctatttaaattgtttaaatgagcatgccctttaattcagcaattccacttgacattaacatcttccttagagaaaacacttgcatgtatgcaaaatacatgtgcagatgttcactgcagtcttgtttgtaatatcaagagattggaaaatatctaaatactagttaagagtggtagcaagttatggtttattgacaccatgggataatataagtgagttaaaaagaatgaattataggtactgacaaagaacgatctgagacatagtagagacatgaataagcacgttgcagcatagaaaaattttttagaaggaaacacagcaaactataactcgttagtttagatgagtaggaggtaaccaagggaaatactcacttgatcttgtctaaatttatcatatgactattacaatatgcatttatgtattatttgtgcagttaaaatacattttaaaaaatgtttaaataatggttggattcccaaatcagctcacgagactattgttgaagctgcaaagccgctgtccatttgctatgaaaggtagaagacaatgccattgaagtgcaagtaatacaacaagattggaaatattttatttttataactttattttggaataacttaaaacctaggtaaaagtttgaagaatactaccaagaatcccaatcaagtcggaaatcaccattcaagttttgttaatttctccagttatgtcatttatagcaaaagggtccaatccaagactaagagttgcacctagttgtcatgactgtctagtctccttaaatccagaacatacatccttccttgacttttatgacactgaaaatttttaatagagggcagatattttatagaatgtcactcaatttggttttgtttattgcctcatgattagaccttgattctgcctttttggcaggaatattgcagaggtgatactgggttctcactcactgcatcctgtcaggtggcgcatgatgttgatttgttcccttgctggtggtggtaactgatcacttgattaagatggtgtctgccatgtttctctagttacagttttctttatgattagcaaatgtttttttgtgaagatactttgactatggaaatgtcctcttcctctgtcccactttacctcactagttttagcatccactggtatttgttgcccaagtcgttatgataatggttgctaaatggtaatttcaaaattccatctacatttatttatttgttgacattctattgtaagaaagagtttttgctttctccttttatttatattaatgtggactagtgtgtacttattaagttactgttatgacttttgatgctttttcctttttcttttcattattattattatttttttttttgggtagagacagggtcttgttatgttacccaggctggtctcgaatttttggtctcaagcaatcctcccaccttggcctcccaaagggctgggattacaggcatgagccactgcacttggccttgatgctcaaattatacctgatttgtcctaagctagcttgtccttaagcttgtcctaagctagcatgtccttaagctagctgctgtttccttttgacatgtccctattctttgaatactttattttctgacacaaaaatgttccttaaaatcagacatttgttcatagagctccagttccttttagcagagaatagtaattggaaatcaatatccaggcactagttgtgctcattgctccagggtgtgaggggcttgctccctgtcctcttggtgtgcagaattaggaaatatatatgtaccacacaggcacgtgtgcacacacacacctttatatcacatatgtatgtaaactatgtagcgatacccatatatatttgtatacattatttatacacactttatatatatgtaaaaatttatacttatacttcctattctaatctaataccacagggtttattctagctttcccttttaatttttcctttctttgttctccatcagggagaaacctggctcccatagtatcaatgtacttgttaattgctcagtaccctgtaggtagccaacctcctgaccccaccgggctgccttctgccctgctccagtgccaacatcacacgccatcactgaccactgaagggttgaccctgccacttccctccagtgctgtctcctgtgggctgcccttctcaccctactccaatgcagtctttgtatggggatgccatcaccaacctttttgagtgtggctgacttttggaatgaatgaatgaatgaaaggaaagaaaggaggaaggaagggaggagaggaaagggcagcagggaacagagggagggagggggtgaggaagaaacagaaaggaagggaagaaggaagaaaggaagtcgaatcagtatttcaaatattgaatgcaagtatctgaagcttgagttattgtaattcaaaaataagaaggtaaatggatccctttgaagaaattctgctagagaaaaattctgaaaaggaatttgtattttaaagggtcagtatgcatatttgtatttttaatcaacaagttttttagcctagagttggttggctgttttttccaatttttatatggaactaaaattaggagaaaaattatggcggtggggaaattttcctgagattaaattaga

SEQ ID NO: 94686 - DNA, 25700 bp, Homo sapiens
agaggttgcagcaagccatcacaccattgcactccaggctgggtgacagatcacggctccattttggaaaaaaaaggaagttaatcagggtgagaataggatgagtttttcacccacaaaaggagatgagattcacgcattctttcaacatgcattccatcaatagtgagcacctgctctgagctaggcccgttctaggtcccaggaaatgggtaaccaaccagacatggcccctgatttggagctcatattttagagcagctaaatggacagtaaacaagtaagcaaattaagatcatcttaaattgggggaagttctttagagaagcacttccataaagctgaatcgtgtcatagactatgactgccaggtggtagggaaggtaatatctcacctgcctgtggatagcagagtttctgaggccttgcaaagtattattttctgtagagacagggtttcaccatgttggccatgctggtgtcgaactcctgacctcaagtgatccacctgcctcggcctcccaaagtgctggtattacaggtgtgagccaacgtgcctggcagagggctttcattcttgatggactgctccatagcctcagagacagtcagactggtttcttcaaccagagtggagcagacaggcaatttctgtatcgaccaggacaaatattagaccaactcttcaatgtacagagagcatcacatttcttatatgctagaatatctgttggtccaaaatataaataaatagtgttgtagccagccacagtggctcacacctataattccagagctttgtggggctgaggcaggaggttcacttgaggtcaagagttcgagaccagcctgggcaacatagagagacacccccacaccgscacctgccatctctacaaaaattaaaataattagctgggcatactagtgtgggcctgtagtcccaactacttgggaagctgatgtgggtggatcgcttgagcccaggaatttcaggctgcagtgggctatgactgcatcactgtactccagctagaacttgtctcaaaaaaaaaaaaaaagtgctgcaattgacattactttatcatttgaaaagagggacagacaagaaaggtatttggcatttaccaagcaattacccagaatcctcatcccatcctacccccacccttcccctaaaaatgtatgtatatgtttttataccataaaaaatacatctctttggctctggaaccagattgcttgggttcaattacctgatctagcatttgctcctgatgactcagtgcagaaaagctctgtaactcagtttccccagctgtaaaatggggaatggcgcctttactgggctgccatgagggtaaaggagggaacgtatatttatgaagcattcagaacaattcatgatacatagtaagctctatatatttgagcttattattactgtcagtacgattatcatcatcttgctgtttccaatgggtacgatttctacattctctttcttaaagacctttaaatccttggtattctctccaccaccacagagagcagtgtccttgtagtttaaatttgcaaagacttcatggatccaataagcatgacattaactaagggacagttttctttcagtggattggaatctaaaatggcttttttattgttattattggccaggctggtctcgaactcctgacttcaagtgatccccccacctcaccctcccaaagtgtgctgagattacaggcatgagccaccatgcccagccctcattctcttcttttataaggacaccagtcattgcatctgccccctcaccagcagcccccaatccaggatgactcatcgttacttgattacatctagaaagaccatatttccaaataaggtcacattcctgggtaccgaggattaagatttccaattttttccctgactcaatttttttttgagtcagggcctcaccctgtcacccaggctggagtacagttatgtgattatagctcactgcagcctcaaactcctgggctcaagggatcccctgacctcagccttccaagtggctgagactacaggagcacaccatcatgcccaactaatttttttgtttttttgtgttttttttttttctacaggttaggtctcactctgttgaccatgctggtctgacctcaagcgatcctcttgccttggcctcccaaagcactgggattacaggcgttatcccatgcctggccctctttctacatctcaatcattgtatcattagcctgagctgcccatagtccttattctgcccaaccctggccaacctcctcctttaacataacttccatctcgatatgatggggcctgctgggcactgcaaacagcctaaggaaagtggaaactttacttaaccttaaattctattacaaagtctacattgaacgtaatttatatttgaactataaaaattttctgtaagttgacacatgacctataaaggactctacaccctgaagcaacgttttagaaagaaattaattggtccttttctgcagaaaccattaaccataggagagataaaggaaaaacttcaatgtactgattgaacttccatgcccatagcttaacttctaaaaggcaaccattccatactgttaaactgacttaggttgctattactgttattaaagagaccctcaaagccagaagttgaatcttgactgtagttcttgcacgtacacgcacactcttgcaactgaaaccactcagattgtcctaatgctgctccccatagcaacaycacctggaattttacgtttgtttttaagcatcattcgtaatctttacttgcaactgaacacaccgcacctgtgagagccacgtgacattaaaaaaatcccttcagtgaggccaggcatggtggctcactcctgtaatcccagccctttgggaggccaaggcaggtggatcatgatgtcaagagattgagaccatcctggccaacatggtaaaacccagtctctactaaaaatacaaaaattagctgggcgtggtgacgcgtgcctgtactcccagctactcgagaggctgasgcaggagaatcgcttgagcccgggaggcagaggttgcagtgagccgagattgggccactgcactccagcctggcaacagagggagactgcctgaaacaaaaaaatcccttcagtgccttgatccttccagattcagatccaagagagatgacatttgtccctcaccagagactgcacaccaagataaagatttcttctggccaggcgtggtggctcacgcctgtaatcccagcaatttgggaggcagaggtgggtgaatcacctgaggtcaggaatttgagaccagcctggccaacgtgttcaaaccccgtctctactaaaaatacaaaaatggcccggcatagtggctctcgcctgtaatcccagctactcaggaggctgaggcaggagaatcgcttgaacctgggaggtggaggttgcagtgagccgagatcgcgccattgcactccagcctgggcaacaagagagcaaaactccatctccaaaaaaaaaagaaaaaaagatttcttctgtgtgcatggctcagctctgtggtccactagcgtccttcttcaatccgtttccaatctatggaatcaggaaagactgaaccaacctagattaatattttagtataacataatacagtgttatttactatggcattgaccgtatatgcccttttgctccttggaggaaagacaattaatagctattatgtgagttaataaaataagcccaggatttctgagtataactaacctgttcccattgattttccttgtctcctgcaggcagagagctgatcaaaacagcaaaagcaaagcagtgcccctggcccagttctgaagccaaccttccttaatcacccagacccatccctggttaggacttgctgtggattctcacgtgactccatctcaggctacagggactgagagggtgtatgcaacatctcagacccagaaaccgttgattctgcctaaaaacacagcaataaccacatcccatcctcttgatttaaatgaaagggtatgggggaataaaagatgaacctttttttttctttgtcagatcttgcgctcatttggttctggtggggaacaacagctataagagaacaagtgtattcaattagaattaattccccctcttattctcatagctgagcagggctcaagtgcctctcatctgaaagaggtaataagatttaatctgtctcctcatctaccttctgcaagtatacttaacaaattagctctcgggactcttccaaatggagttttatgaggaatttgctaaggtaaacgttttagactttgaacacagttcagatttcagggacagtactgaaatctgaactgtgttgctaactgccctgcctttcaactcaagacacaataactttgaactaaaataattatatttttgttgttttccactctgtccccacgtytatatcaccacaacccccaatcccaccccgcaggagctaactcctccttcctgtccccgcaagatcaaaactcctcctgcaagccccgctagctctgtctgctcaccttcgtggcagatatgctattgtacttttacactcatttgtgtgataaatacttcaatgtccacttcttccacgagcccctgagcccctggagggcctggacaacaccgagtttttctcaccgttacatctccgttgtcaggcacttaataagtatttggtgaacgaatggcttgtttggtgacactccaaaggctgggggacagaggtaaagctccctccttttgggccccagacgggtggcgctgatggagagaggaggctaggataaggcctccaggaccgaagcgcgcacccgtaaggcccctgctaaaaagaccttcctgaaggcggaggaactgcgagtgcctacgttagcccaaggcctgacctgacgatcccagggaccctcgctctaactggccccgcctcccgggccccaaacccggactcggccccgcccgaagctccggatcctggggcccgcccctggccccgcgtcggcagaccgtgggctcgctcctggacctgcctcaaaccctccgcaggtaacgcctcccgaacttgagccacattccgatcccctcctcaaacccctccccgtttcccacaccctggacccctcgctccgtctcggccccgccccaagcccagctaggtctgggcccctgagcccagccccgaccggcctcccagtccctgggtccctcccgacaccggcccctccctaagctccgcctcccagggcccgcctcctgagcgcagcccgcagcctggactccgccccgcctcccggaccctgggcccctccccacgtgggcccgtcctaagctccgcctcccagagtccgcgcaccgcctggccatgtgctaagacatagtcaacgccccgccccggccccgcctcctgagcccttctctgggtctggccttagccccgccctaggacctgtctcctgggctctgctccgagtcccgcctcctgaacccaatggcgtttatccccgccctaatgcccgcctccaggactcttatcctgccctcacgcaaggcaccgcctccaggacgccaccaacctggacgcttccgaagcccagcttccaggatcgccctatcctggccccgccccaggacccgccaacctggaatctacccaggacctgccccaacgacgttaattctggccctaccccaggcctcgctctcatgacgctcatcctggccccaccccaggccccaccctcctaagctcatcttggccccgccctagcgcccgcccccaggacgctcctcctgaccctacccctaggccccgccacctctctgcctccgcgcactaccctgggcccgcccccttttcagtccaggcccggcttccgcccggtctcctggcaacgctgcggccccgcccacgtcatggcgcctgaggagaacgcgggtaccaaactcttgctgcagagtttcgagcgccgcttcctagcggcgcgcacactgcgctccttcccctggcaggtgggcggcggggcgagcggagaggcctgcggggcttgcggaagtccaggggcagacgggatgggtctccctgctgaaacccccggcgctcctgccacgtgagttcctgggctctccccggtcagggccacgagacccggtccccgtccctggggcctggccagagtcgctctcacccctcctgccccgcgagctggcggcggaagctgggggcgtctccacagtcttggggggcagacgcgcgctcggtgtggggtacagttcacgatcattttcatgactttttaaaggcagtaatcgttctggtcactgggacacagctgccctcgcccattctaaaaagtcagcaccctcaggcccgcrggtaaccacctcctcctgagcayggtgaccaggtcaaaggctgtccctcgggcctcagtgttctcatctgtatgtcgagcactgcacagaatcagctcatgygctgaggctttcactcctgtgatggaagagacagagaagggggtggcctctcytctccctggggacctgccattctcagcacaggcgcatggcaggcagcagcctcccttctgccagcagaggggcttaatgcaccctgcyccatttgtaattcatgtgcggtgagctcactgggatgagtcagtttggatatatattcctccctgggtctgccccattttatggggtgttgcttaatcatttgsgttattccattgacatgaaatatttagcactcagagatcatttctggtcaggagaaatttgtgcatttttaacccaaaatagaaaccttcataaaagcatcataggtctccattcagtattgactataattgttcacatgcccacgctgaatgctaacttgggctcaccatcaacacccacgaggtgggtactattattatcactcacatttgaccagagggattgtttgattagggtgtagtagttgagagttcagacccaggagacagcctgcctgcttcaaatcctggcccaacccctggccctgtgtgaccttgggcaagtgactgcatctctctgtgctgttgttttcttattaataaaatggttgatataatgatacctacctcttagggttgttgtcagcgttgagtacaaaagcctgtggatcagtgcctggctcatggcaaatgcatgtcggtgttagctagtgtttttattcagtctcaaaatgtttaataaatgccttccgtgagccaagcaccatggatcagcagtacccatgatagatgaggctctgcttgcatgggagagctagagaataaacaaataaatgaataaacaagaaaagaccagatgagagtggctttaaagccaagaaaacaggggaatggtgaatggaccaactgggaagaagagtcactaaagtcggggaatcagggaagccttccccaaagacgtggcatttgaactggggcctgagtggtgaagcagccagccatgggaagggtttggggaacaggatatgcaaaggccctgtggtggaaacaagccagctgtggttgaggaacaacagcaakgcagccagtgtggctggagtggagtgagcagtgtgggccaggggtgagggagaacaggccagagagagggattaggaccaggtcttgtagggccttttatggcatggaaggagctctgaagcaatgaagtgccttgctgtgtgtcacataccagccgagacagtctgcctaactcgggagccaaagcttgctgctggacttgccactgtaagaggacaatgtaacccaggctggtatgggcacattctgcatttccacttaaactcagatggcaagcccatcaaaccttggtgccatggctgccctggtaattcctggctgaccagtgcaaccagggagctggcccatgacccgggtggccgctaagtagccaggactaatgcggccaagagtcagccttcttcctgtgactcatccaggtgcaccctgcgacatctgaaggtcaggctttcagccgctgtggcttccacttccaactggctccgcgtccccagggagggatcacatagcgctttgccaacacattctattgcgtgttttaatgttcctgtgaatgcgcccttgagatttctctctctcccgtccacacggagcttagaagcaaaattaagagactcatcagattctgagctgctgcgggatattttgcagaaggtaagaattccagagtccctgggactcatgaccctgcctcctgaatctctccggaagacctgagagaagaaccacaggttctttaaaaacacccctgttcaaagaacaaaaccattgagtcagcactgcaggtaggtgtcagcacctccgacagctcctgcgcttttgttttctatctaagacttagacaaagacatcagaatatacaaaaatctgcatgaggggggaaatctagggaatgttttttaaacyatcctcagcaaaaacagagatgacaggtgcaaaacagcttctagcatttggtggatgctcagagactttcttttttgcattcctgaggcctgtcctgcccactcctgtctcctctagacctaaatgggcccttgctttgcccagggtggggtttggactcargtgcatctgcatgcaggtgacagccaggatcaccacccggcccagccacagcgtgaccttggccttgagggccaagtgcagatcaccctgcatcctgggtcttcaccttcgaagggccatgagcccttcagaaaagacaaagcaatagactccctcccagaaagaagtgcaccagaagaatacattttccatacaaactcaggggaggcagacatcctccacccccacccacccagcccatcctaggagccccagtgaagaattcctgtgctagaggtgaaccaagatgatccacttggaaaagatgcagccacagcagggaagactttcggggcaatacagtaggtcagggcttcgagcatggagatacctgaagttatctcgcaccctgctctgagtttcaccctgagcctcactctcgtaggtggtgaagcatgaaatgtagggagagctgctttaaaacccagcacaaggctgggtgcactggttcacacctgtaatcccaggacattgggaggctgaggtggacggatcacctaaggtcaggagttcaagaccagcctagccaacatggcaaaaacccatctctactaaaaatttaaaaaattagctgggcgtggtggtgcacgcctatagtcccagctacttgggaggctgaggcaggagaatcgcttgaacccaggaggcggaggctgcggttagccaagatcgggccactgcactccagcctgggcaacagagagagactgtgtcagaaaaaatgaaaaaccagcaccagcatgaagagcctgtgtattgcatggggtactttgctgcccttgggcagaatctgcatccctcccagccagcaggcactgcggactgtctcctccctctccctccaggctcctgttttcccaccgtccccactcctgctgcaccagtgcatctgccctcctttccaagtgccagcctgtggccacctcagagcttgcaccagctgttcccactgcctggaacttgctcatcctgcacttggcttctctcggctttagctggagtgtcaccctgagcgtcccctcccctccatcctgtccccagggacacacactccaagagagcagttgccgagtgggccttcccgcctcttccatagagccagacagttggcgactgtccttactgcaagccctggttcacactggctcccctgggagggaggtggtttaggcccacgtgccctgtgttcctgctcagaatgggcattagaaatgctgcaatatcctgtgccactgcagtggaagcatctttaggaaacggcttatatcttaagacaaacttcagatgcgtggggccagaacgccgtgtccatctacatctttgctgagggatcgggtagcctggagtttgccctctgctgtgttggcttgaagctcataggagacttaagacgggctctcgagcaaccaacgttctgtcctttgctgtagactgtgaagcatcctgtgtgtgtgaagcacccgccatcagtcaagtgtgcccagtgctttctctcagaactcatcaaaaatgtcagcaatgggcagtgtccgcccagtagctggacagcatagccacctgcgtgctggagcccccgtccttcccaggccctgggcctgctttgccaataccagcatggcaggggcctccccaggcaactggctgcagctgagtgtgacccatgggagacagtgcagggcaggaagaaggggagaccagcgtctctccctcactctgcctcatggggtttccacagcagctgcttctctggggccccagctcctagaatatgaattctcattcctaccaggctggtccagcccacagcactggaaccctcatccacaccctctgtcctgcccgctgaagggtttggagtttcctgctcttgtctgtctctgggttgccccacaggcccctgttggaagatttagctcttgccatacctttggaactagttcctctgtgaattctctgcattgatcctgctggaatgagctctttcctgactgatacaggatggattttattttttacttatttatttagttttttgagacagtctyactgtggtgcccaggctggattaccgtggcacaatctcggctcactgaaacctctacctcctgggttcaagcaactctcgtgcctaagaagctgggactacaggcacacgccaccatgcctggctaatttttgtatttttagtagagatagagtttcaccatgttggcsaggctggtctcgaactcctgacctcaggtgatccgcctgcctcagcctcccaaagtgctgggattacaggcatgagccaccacacctggcctaggatggattttaaagatgggcccaaacatgcagggtttgacatgaggatgtcgagaggccgttccttagtaggcagtagcagacctgctgagtgaaagggccacacttttagcaaataaacaatcccctgcttctccaatacctgctttctccctagtcctccccaaaagcgtgcatctgtgttcaccagcaggtctgccctgtgccaccaggagagggcagcagtcacccagtgtaccctgctgctgccctgtgaatcctaggatgggaccagctgtggagaagcagcctgctgacagccacagcctgcagcatgggccgccctcacagttctgcctgggctcacttaaaagcaccttttgttttcctcctctctgtttgatccaaacacagagctctctgtcatggtcacgtggcagctctcacggaatccttgtttccttccctagactacacctaaccctaacctctcaacacctcttgttgaaggccctcccatccaggttgccctaccaagtgaaattttttttagagacaaggtctcttgcccaggctgtcctcgaactcctgggctcaagcagtcctcccgtgtcagcctctagattagctgggactattcggcacacaccaccacacccaacgaagtgagtattttatatgccagctggctggtattacaccattccatcccaaatctcccctccaaacttggtgaaaatcatctgaccatttttacagatyagaacgaaagcaaacaagctctcactctgtctgcccccagcaygaggctgtccacacggagcttttggacgagctgtacgaggcgctggcrgagaccctgatggccaaggagtccacccagggccactggagctatttgctggtatragaagggcaccctcctccccctcacagcccagatacccttcctgcacagacaaagtgaaaacgtgggtgtgggttcaaatcctgactcacccattctgcagtcttagacatgaggtccgttaaccttctttagcctcagtttccctgtctgtaaatcaagcacttcaacaacaacagcatgtctcgtggggttgttgggyatttgtccaataggtgacacacactacctgcttcacaaggacctggtgcccagtcctcaaagaatatttgacagggctggacatggtggctcacgcctgtaatcccagcactttgggaggccgaggcgggtggatctgaggtcaagagttcgagaccagcctggccgatatggtgaaaccctatctctactaaaaatacaaaaattaggccaggcgtggtggctcatgcctgtaatcccagcattttgggaggctgaggcggggggatcacctgaggtcaggagtttgagaccagcttggccaacatggtgaaactccatctttactaaaaatacaaaaattagcggggtgtggtagtgggcgcctgtaatcccagctactcrggaggctgaggcaggagaatctcttgaacccaggaggtggaggttgtagtgagccgagatcacgctattgcaccacggcyttggcaatgagagcgaatctttgtctcaaaaaaaagtacaaaaattagccggacatggtggcacacacctgtagtcacggctacttgggcwgctgaggcaggagaattgcttgaacccaggaggcagaggttgcagtgagccaagatcatgccactgactccagcctgggtgacagagctcaaaaaaaaataagataaagcatagatacagaaaaccacaaaggaaaaacatagcatattgaatcatcacaaggcagccaccccttcatagccacacctggcccctggccaccactgacctgtgctccatcgccagaattcyrttgtctcaggaatgttcgatgaatggaatcctgtgtggcctgagatgagtgtctttcatgccgcgtgacacscttgaggcccgtgcaagctgttggtatgtcaacagttagctgcttctcattgctgagtggcgattggtcctgtcatggtttattcagccatgtggcggatggctacttgtcttctaagccacttgttttctgattgctggacttactgtctcaccctctcttggtacagccctcggaaggctcggtcacactctccgagcacagccatcatctcccacggtaccacaggcctggtcacatgggacgctgcccgctaccttgcagaatgggccatcaagaacctggcagccttcactaacaggtgacctcggggcacagggcagccgccatctaccttgcagaatgggtcattgagaacctggcagccttcactaacaggtgacctcggggcacagggcagggcaccgaggcaggcttaccctggtgcagtcgaagacacggtcccctttcctcccgccaggactgtcctagagcttggcagtggcgccggccttacaggcctgtccatctgcaagatgtgccacccccggacatacatcttcagcgactgtcacagccgggtcctcgagcagctccgagggaatgtccttctcaatggcctctcattagaggcagacatcactgccaacttagatagccccagggtgacagtggcccagctggactgggaygtagygacggtccatcagctctstgccttccagccagatgttgtcattacagcaggtaatgcccagccccgggcatcctgtgcaggyggtgtccttgcagctctacccagctcttggctctgggaaaagggaacagtggatgctrtygggcatggacatgatggggcttccagaagagttactccgggcctccagggggacatcaaaggacaggggtgcctcttaaggtgaccttcaagccacagccctcttgttggagacaggcatactcccgttacagtcgtcaccacacggctctgttccagagccatgccctgtgtccttcagagaccacaggaggaaaacaaccacttctgggatgaggacagggcccttgggagaaggtggtgtttggctgggccaccaaaaacccctcacccctgccagcacactcagtcccctctctggtggaacagagctctgcctgtggtcctgggtcccagccctgaaacccacaggtccagcggtggccagggacagaggcccacccctgcaagccagcagaccaatcggcagacrcctgaaacacgaagttcacggtagggtcaggctttctgccattcaaagccctctagataggcccagaaccagagctggttttttaaggaacaccagtgagtctggagatttttttcttttgcttcggtcttttgcagctttctctactaagggttctcctttttcacccaagtaattgcccttccatctaatggcccaaatggtcaaatggcatctaatagtctcatatgaacgctgcctctctggcctcaccctgctgctgaggtcagcatgaactggaactttccacttgtccctttcagtaacctgaagctttcaccgtagacgtgctgtattgcccagaagccatcgtgtccctggtcggggtcctgcggaggctggctgcctgctgggagcaccagygggctcctgaggtctacatggcctttaccgtccgcaacccagagacgtgccagstgttcaccaccgagctaggtgagcccccacgcccacccgggcctgcatggtccccgagctgtccctgcrggactccagtggaagtgaaagaactgggtgccagcaaaaagctaggatgccccacactcccacaccatgcggggaactcgggcagaggccggtgagcagggtgggcttggggcgtggggggcttgcggcaggaggagggcagctcagcacagggcgggagggtytgagcccagcagccctactatgtgcctcagagcaggtttccctaagcccttgggcctcggtttcctcatctataaaatggaggtggtgggaggggcagtcggggtcagggctggacacagctgtggcctgcaggatgctggagcacaggctgtacaggcggatccaccacgccactgtcctgagcacccagttgatggaagacgagcagggtgactatagagaagggcaactggccccgtagtgggccagccactgtcctgagacctgacattggtcagcccccagcacctgtgagggtgttctgtcattgtcccatctcaccgacaaaaacactaggacacacagaggccaagagacccccgagctcccgcagactgcagcccggccacctggctytagtgcctccacactacacccaagccccccattgccaccagamtytgccccagctccccctgagcacagcccctcctggcagccatgtgcaaagatgcacccgcagcagcctytgcctgcacacagagacatggacgacccagtgcctgtccacgtggggcagcccgttaactacagagccaacaaacaagccagcacgcgaagacatactgggttccaygacagagtcccgcacaacctcgcacaggaggctggccaggcgtggggctcaggcctgtcatctcagcactttaggaggctaaggcaggaggactacttgaccccaggtgttcaagaccaacctgggccacatagtgggaccccatcttcacaaaacatacagaaactagccagatgtggttggacatgcctgtagtcccagctactcgggaagctgaggtgggaggatggcttgagcccacgaggtggaggctgcagtgagccctgatctcaccactgcactccagcgtgggcaacaaagcaagaccctgtttcaaaaaagcaaaaaagccaaaaaaaaaaaaagaggggatgtctttcttaaaatacttacttgaaaaaaaaccggcattattttttaattgaaaaaaaacattgccgagcattacatttattgtaggccccccacaaccttttttttttttttttttttgaggtcaggagttcaagatcagcctggccaacatggagaaacctcgaatctacaaaaaatacaaaaattagccaggcgtggtagcacgcacctgtagtcccagctactcatcctgagtagctgggactacaggtgcgtgctaccacgcctggctaatttttgtattttttgtagattcgaggtttctccatgttggccaggctgatcttgaactcctgacctcaagtgatctgctgcctcagcctcccaaagtgttaggaatacgggcgtgagctactgcgcccagccccatttttgtttaaaaactaataataatcacccacacgtggttatgagtacctatattccaactactcaggaggctgaggcgggaggatggcttaagcccaggactttgtggccaccttgagcaacatagcaagacttcatctcaaaaaaaaatgtatcaaaataatcattttcacataggtatacctataggggaaaacctagaacatgtatatagcaggtttgtccaacctgtggcccaacacaaatctgtaaactttcttaaaacaatatgaggtttttttgtgatttttttttcttttagctcatcagctattgctagctttagtgtattttatgtgtggcccaaggcgattcttcttcttccaatgtagcgcaggtaggccaaaagattggacatccctgatatacacgttaacaggtgccatccttggatggcaggattatagagattgctacacgttcatgtctgtactacttcatttttataaatatgcattttccactcgtaacaaaaaaccgtgattgaaaatcatcccgggtcacagtgtctcatgcctgtaatcccaacactgtaagaggctgaggctttgggaggctgaggtgagcagatcacctgaggtcaaaagttcaagaccagcctggccaacacggtgaaaccccatctctactgaaaacacaaaaattagccaggcgtggtggtgcacgcctataatcccagctactcgggaggctgaggtaggagaatcacttgaatctgggagacattgcagtgaactgagatggcgccactgcactccagcctggggaacagagtaaaactccatctaaaaaataataataaaagaggctgaggcaggagcatcacttaaggccatgcgttcaggaccccatctctacaaaataaaaaaaatactggcatggtggcatgcacctgtcatcccagctactcaggaagtcggaggattgctagagcccaggagtcgaggctgtggtgagcaatgactgtgccactgcactccagcctgggtgacagaacaagatcgtatctcaaaaaaaaaaaaaaaaaaaagaatcattctggctaatggctcttcagacatctgtgcttatgagaacaccagccccttctaagcgtgtgtgtgtgtgtgtgtgtgtgtgtgtgtgtgtgtgtgtgtgtgtgtgttttgagatggagtctcactctatcactcaggctggagtgcagtggcacaatctcggctcactgcaacctccgcatcctgggttcaagcaattctcccgcctcagcctcccaagtagctgggattacaggcacccaccatcgtgcctggctaatttttgtatttttgtagagatggggtttcaccatgttggccaggctggtctcraacacctgacctcaagtgatccaccagcgttggcctcccaaagtgttgggattacaggcatgagacactgtgcccggccactttctaagctttgtgaagagtgggttgatggaacagccaggtagatgtgggttcagatctctgcttctgtcctgctgtgccacgtgctggggcagactcgggcagagagtggacagctgcatggtgcctgctgctagccatttctatgtaaaaccagatttctggtcccttcctggaggccaattctaggtacttgggtgggcctgggaacctgtgaaccaagtaaactgacttagacactccccaccccgccaggcctgtcctagcagccccacacaatacgctcatgtcctgtccccaaacaccgccatcctcaaacacgtgctctgtttccaggctgggctgggatcagatgggaagcggaagctcatcatgaccagaaactgtttccctatggagagcacttggagatggcaatgctgaacctcacactgtaggactcatacacgactccaacgggattgttagaatcaaatcactctcgtgggaagaatttttatatgggaaagcggataaaactttcattggactggaatgtttggagaatgttaaattccaaatcaggaaccacaatctgccctctaataagacatcggctatctaagcatgtgggtgccccctttctgccagcagttctggttcttaagaaaatcaccataaatcagacatgaaaattctggctccaaaaatagcattttctttgtgcaaataaaaacgtgtgtatcaagtatgaygttcccccaacgtggacacactcggttcctcacaaagccaagcccgctgcagctgccacatccctggacacactcggttcctcacaaagccaagctcgctgcagctgccacatccctggacacattcggttcctcacaaagccaagcccgcggcagctgccacatccctggacacactcggttcctcacaaagccaagcccgctgcagctgccacatccctgggcttrtggtgcagcaggtgcttttctcaagacaggaatcaaagtgttaggaacatggcagaaaggtgacacctggagaccaaatgcaggatgaggagtactgcagaggtcacagggaagtcacagaacagtaatacgctagcagggacatggggcgtgaagaacagaagaagacaggaagcatttctgagactccaaagaagaaatcagggccaaccacagcttcccgggtcattcaccaggtggcaccactgccgtcatttcagcttctggccactgggaggcgctgcttgaaagggtttgccctgagactccaaraagaarctgcgggaaggacagcaggggccctggggttttagcctctggcccaggagttatgtgtccataaccaaagggagcacagtctgcacccagctctcatcccatcagagctgctgcgactcccgcaggttcttccggaactggtttagcttgccttcaggatcaggaaagtttgagaaaagcatctgcaaaatactgaagagcagagcttacctcattgcctgtccccaccccatcccaggtcaccacctggmtgaccccagstccccgacccaacaacaamccctcccaagtccctagctccctcacttggacttgagacccttcacaccccagcagcgctccgcctccatcttgacatgctttctggaaacttccccgtatgtcccactttcccacacttggtgccctggagcacctyccggcctctacrtgatgtmcgttcmcctgygagcaccctcctctyrgcctctggccaacacagtcccacccatctgtgggtaacaaggwgksgttcttttcagccttgctaaactgtctgaatcaaggatcacaaactacagcctgcaggccaaakccagcccacagcctgtgtttgtaaataaagctttrttggaacaaagccacaccccttaatctacagatgatctgtggctactttcacaccacaacagagtaccatggttctgacagagactgggggacccagtctaaatgacttctgacctggacctttactgaaaatcctcccaatcattctgttgacaagaatgatgtattactttttgcaataagaaacaagtaacctttgcagaattccacccatctttcaaggctggtcccagaagttcccttagcccacgcactacctgatcctgatcacttcctaaactgcagcctggcccacccggctccagcatcatttgtggagtctcagctccataaatctagagggcaggtggggttgtgtcctaactttaccgagcctactgtaccgaaatgggacagcagagtaggccagcctctgtgacttctgctccctccctagcttttccgccagaccccgcatggtcccaccctggctgtgtgaaacagggatcagggagcatggctcggtgccagtytccagaaccctgtccaccctggcgtggtggcagacatggctacctgcagctgagctgccagttcctytgagtcctcaaagaccaggcggttttcttcatgtttcaccagctcatgtaaactgcagagagaacaaaaggagcccgagagtttcctggagaagacactagacccctggggtgcccagstgggctcccacccaccccacgctcaagccaggctgggggttggaacagggtgtgtggcttctgggaggtggttcttagatttggcatctgaagggtataaaagcctggggggggtgcacatcaaaatggtcaaaccgatttgaggagagagccttaaggaaggtttgtaccttctgtgctggatgctcttcaaggactgaagaattatttttgcatgtttttcttaattccatggccaaggaacaagtaaaggcaaccccctggggactggttcagcacataaaagatgacttttctaggacaccagatttgatcccgacattccctcagctcagctcacacgagaggctcacatccctgaatcccatccaggggccggctcctgagcaggggccaagggckcaacttttgctggggctactgcttctagaatctcctctaactccacccttccaaacacccgtctatgctgggtggagtgaggccacagcatgacactcatttaactgattcaaacccaccacgtgagcttggccaaaagggacatggtgggagagaaagaaacaaagaaaaccatgtaagcctgcaggcaattcccgccaattctactctaggagcaaaagccccgagtgaagttctgttatttaaggtgctttttttttttcatactgggttggtgcaaaagtaattgccatttttaatggcaaaaaccgtgattacttttgtaccaacctaaatgtaacatgagctctaaatggaagcaactacttcagtgaggctcagcccagccacagtaaccgcagggctcctcctcgtggcctccagtgtgtgctggactgaccgaggggcagggcctcactgtgggcagctcactctgcactgcttccccctcagcggtggatctgtgaagctatcmccagaaaaaattcgggttctgctcctaccacttgaagttcacggcacacgcaggcaaacagcacctgaacatgtccaccaccttcatgggcaggtccaggccactggaggacgtgtccagacagacatccaggtccaccgaccctgctaggcaagaggggtgtggccagagcgctggtctctgccccgggaacacaaatcctcccagcacagtgaggcaacaccccccgaggggagtgaaaattggataaggcccccgacatccccaaccacaagtggcttaagctggccaagcagccacacggcctggctgggacatctgaaaatgtaagttgacactttttctacgtaaccacaatttgatttttttgttgttttgttttgagacagagtctcactctgtcacccaggctggagtgcagtggcacaatctcagctcattgcaacctccacctcccaggttcacctcccacctgtaatcccagcattttgggaggccaaggcgggcggatcacctgaggtcaggagttcaagaccagcctggtcaacatggtgaaaccccatctctactaaaaaaaaaaatgtaaaattagcgaagcgtcatggcaggtgcctgtaatccccgctactcaggaggctgaggcaggagaatcacttgaacctgggaaagaagaggttgcagtgagccaagatcgcaccattgcactccagcctgtgctacaggagcgaaactccgtctcaaaataataataataataataataataataataataataataataaaccacagcacacccaccacaaaccagctgtcagtgtgaaaataaagccaaatagctaaacatttctaaagattagctggggccaggcatgatgggtcacacctggaatcccagcacttagggaggccaaggcgagaggatcacttgaggtcaggagttcaagaccagcctggccaacatggtgaaaccctgtctctactaaaaatacaaaaataagcaaggtgttgtggagagctcctgtaatcctgtaatctactcgggaggctgaggtgggagaattgcttgaacccaggaggcagaggttgcatgaactgagatcatgcactccaacctaggcaacggagcaagactgtctaaaacaaagactagctggagaatcctgccaggaaaaggccctcagcctccaacagctctgctcactcgaagctggaagatgtggctctagagacgcatcaggaacaagccacgactccccacttggagaaatcaatggggaaagagacggaggcaaaggagaaccatctcactggtgaggcgacgctgtctgactcatcgtccctgtacctcccaaagccactgccctcccacacctgggcaacagtggccccaaccccaggcccagccctcttgcaggaaggaagaggactgaatggagggcgtggcaggctgaaaggacgtggcttcctcaaaccccttggtaaagggcctctggggccacctggcagggaggggctggcacaccaggaagtagccttctcccgggagttcagctagagcccaggtcctgtccccaagtggcctccagagccaccttttcagaaaaggtacaccccgcccacccctgttccccctgcataaggccccgcctcctccctgagcctcctgctggcctctcacctagaagcgggggtagtcctcggccctccagccaggggatgcagacctggatgtgctggaaatgcttctggtggatgaggcggctgtaatactccctcagaggccctttgccttcacagagaagagcagacactgccatgaacccgtctctgtccctgccacatagccccaggcccaagacactcccccctaggagggatccttttcccagaagctccacccctcggcagctgcagtcaggccctatctgggcctttccagaagcaactcaggagccccaagacctgcaggggtrtgtgcaccctgacccctgatgcatagccctgcacctgcaaccagctggcctcgggctgcaaacaaggcggggtaagcactggcctggcacgcsaccacccactgggtgggcccagccttctgtctgtgttgtgcacaggggacaagaggactccctctgccctggcacagcccccaaaccacagggcgcaggttccaagccgcccctgccctgccacagcccccagagcacatggcgcgggttccaagccgcacctgccctgccacagcctccagagcacayggcgcgggttccaaaccagtcctgggagcctagaggccagaggagggaggagagcaggaccagcagctggcccagaccccgcctcttcccacaccgcttccgcttttctccctcctcactgaatcatcttgaaagggctcagcagcagtaactgggacaggggctcttctgtttgaaaaattaaaagaagcttggttaaggcaccaatgacatggccgggcacagtggttcatatctataatttcagcatattgggaggccaaggcgggtggatcacctgaggtcaggagttcaagaccagcctggccaacatggtgaagccctgtttctactaaaaatacaaaaataagctgggtgtggtgggcacttttagtcccagctactctggaggctgaggcatgagaattgcttgaatgtgagaggcagaggttgcagtgagctgagatcgcaccactgcatcccagcctgggcgacagagtctttgtctcaaaaaaaaaaaaaagacaccaatgacataacaacaaaaaaaagatgcttggaaactactgaaaaagtagaaagcttggtatctacagattcaaatctgggctccctgccctgctgtgaaaccctctgagcctcagtttcccgcatgtcaagcagtgtaagaccctatggcagagagctgcagtgaggattaaggagacaagatcgtgggaagcacagggtaaaggctgtgtgcccctccccctccaccatcccccaaccaaacagacacccagggtcccaggcagtacctgttatcacacagacgagagaaggaaggttctgtccgtcaagagtcagttgttcaaactctgtgtttaaaaaaagaaacaattctacatggaatttctgatttaatttttttttttttttttttttttttctgacagactctcgctctgtcacccaggctggaatgcaatggcatgatctcagctcactgcaacctctgcctcccaggttcaagtaattctcgtgcatcagcctcccaagtagctgggattacaggcgcccaccaccatacctagctaatttttgtatttttagtagagacaggtttcgccatgttggccaggttggtctcaaactcctgacctcaggtgatctgcctgcctcggcctcccagagttctaggattacaggtgtgagccaccatgcccattcagaaaaaaatttttaaataaacagtagccagagtcccctggtcaggtggagaaagtgcactgctctggcagggaggccaccagcctctgtgagatactctcctggagggggcatttcagcctgagggcctggtcactcaatgacccaactggggattcagggcggcccacctccaccacccctactgtccccaggctgccccacccagtagcccaggacaggaacatgctgcagaccaggcaagcagctcacagctcagtggccccgacgagcccagagctcctcaccgcagccacacacctactttctaaagctgccagcaagatagagaagtcttcgtcctctatgagaagaattgaatgtcaggggcctgtttctagacaccactcttccagctcacacgccctccccttctcactgagaccgtggtggggttggggcatgcaggactggcaggggtgaggagaatacaggttggccaggtgcccttcacaccaaccccaagtgccccagtggtcgtgcagacctgtccagcttgtgctgctgaccagcagggctggccgctcgtggagacgcgtcaccagcccgctcccagaatcccgctccgtgaaggccgaccgctctgtgtctgggtcctcaggttctgagctgaaggagcagaaaaaaaccctgtgagaggccacagagcaggcccaggacccagaacgggcatctcctgccatggtgaggcctgcaggctcccaacggttggggtgcccggctgcatcagcagcaccaggccacccctgccaatcgaggcctgggcttgctttctctaatattgttgctgggtgctaaggttacaacagcaaacaagactgactaattccttttctccacaggacttactgtcttgtcatcccctggacccaagatgagggtgctaggacgccctcccacaccaccccagcttacccaggggcaca

SEQ ID NO: 94687 - DNA, 78029 bp, Homo sapiens
  misc_feature (1)...(78029): n = A,T,C or G
tggggtaggcactggagggaatctcttggtctgcaggttgcgaagaccattaggaaaagtgcagtatctgggccagagtgcacagttccccaggttcagtcccttacagcttcccttgggtaggggaaaaaattccccgacccctggcacttccagggtgaagcaacaccccaccctgctttggctcgccctccgtgggctgcacccactgtccaaccagtcccattgagatgaaccaggtacctcagttggaaatgcagacatcatccaccttctgcattgatcttgctgggagctgcagactggagctgttcctattcagccatcttgccagcaatccgatgtcatttttttcttttattcatcttctcaaactgaaactctgtaccaatcaaacagtacctttccatcccctcttctccctgaccctaacaactaccatcctagtttctacgaatttgactactctagaaactatataaatggaataatacaatatttgtccttttgtgactggcttatttcacttagcataatgtcttcaagcttcatctatattgtagcatgtgtcaaaatgtttctttctgaggccaaataatattccattgtatgtatgtaccatattattcactgttttaattaatatgacacatcctaaaaatccacaattagaatttaattcatatattaaatttattttatgtaaaatgtcaagcaaacaatacatatttgcttaatatgtgtctacttaaggtgtcaccttgtgtctactttannnnnnnnnnnnnnnnnnnnnnnnnnnnnnnnnnnnnnnnnnnnnnnnnaaacatgttctatagtcccaaattctttgaaatatacaagttaattcaagatacagaacagagttcttaactctggttccttttatgtacattctttagaatgcctgattagaccagcaaataaaaactctacctttctctttatctacatctcattgtcttaatctttctctttagacttacatagcactgttgttttcttaattttttttttgttttaaaagtgacatgatgcattaccttttgtgtagaaaaacaggaaaaaataggcatttgtttttacctgcatccaatatcttgggagttatgccagaaacagttaatcacggttgcctctggggagagaaactgagtatctgggggacagagcaagaagggacactttccatggtatactattttatatcttaataactttatatcagataaatataatctctattcaaaataattttaaataaacatgagttaaagtccctgattccccctagttccaccctccagatgtagtcactgttggcagtttcatttataatttctcttgacatatttacatatttcatctcaagatagctttgagcagtaactaccaaactttctgaagttatatattctattatatgcttgaatatgtgctccatccttctaagaatgtcactgagaatacattttttaaaaattgggttgataagagttatacttcttgagataacttggattatgatggagggtcatgaagccagcagtgagaaccaacaatgtaggaaataagaccttgtgtaacatcactccagtggtctgtgtgtcacactctcagggtctttccctttggtatatctatgtcaatgtcctcgctggaattataataaaaaatccaagccatgacactataatactacaccctggatcgagtccaaaaacaactaccacaattattctttcaaaaaaaaaaatttttttttttgagacagagtttcgctctttattttgcccaggctagagtgcaatggcgcaatctcagctcaccgcaacctccacctcctgggttcaagcaattctcctacctcagcctcccgagcagctgggattacaggcatgcgccaccatgcctggctaattttgtattttttagtagagtcaggatttctccatgttggccaggctggttttgaactcccgacctcaagtgatccgcctgcctcaaccttccaaagttgctgggattacaggcatgagccaccgcacccagctgaaaaaaaatttttttaaagtacactgtctaaggtacatgtctggcataactataagattatatatggcgtttctcaaaaaaatatacacaaggctatattatagaaaatctggtaaagaaaattacccatgataaaagcaccttgagacagtagctatcatattggaacaattcctttcccttttttttgtagtttctactatgaaataatagaacaaagaagtcctatatatgcttcactcagattccgtgacccttgacattttccattttccatgttctctctcaatatatatacacagcattactttttgcctgaaccattagagttaagttgcagatatactactcctttacgcctaaatagttcctaaaaacaaggccattctctaatataaccacagtataattatcaaaaccaggaaattaacattgatacagaattatgatctaatgtttagaccttattcgcatgttgccaattatcccaatactgtcctttaccaaaaaaaaaaaaaaaaaatccctctggttcacgccaaatccaggatcacatgttgcattaaattgtcatagctctttagtctcctttaatctataacagttcctcaggctgtcattcattgtctgttataaccttgacatatttaaagagaataagccagttattttgtacagtgtccctctggacatttagatttgtctgatgtttacctatgattagacacaggtcatgcatttttggcaggaatccacaaaagaggtatgttcttctcaatacaataaatagacacatgtcagtttgtcccattattgatgatgtaaactttattacctaagatggtgtctgccaggttttttattgtagtttctacttttatctttgtagttgttaagcattttgtgaagagacactttgagactatatagatatcccaatcatcaaactttcaccccatagttttagcatccattgatgattcttggctgaatcaattgtttgacaaatggtgattttctacctatgtaattccttctacatttattagttggcattcaactttagggaagcactttttctttcttccttgttagtggggactcactgattcctattttcttcagtgggttatgatcccttattatcactttattttgatgctcaaattgtctcaaatttggtcactgggagccccttgaagttgactcctgtatcattttaacatgcccccattactttttgagccgttccttactttctacaacaaggtgctcccagttcatcttttttttttttttaataattgccacaagggtatttaaaatgagatctaccttctcaacaaaatgtagtattaactatagacatgatattgttcagcagatctcaagaatttcttcatctcacataaatgtaactttatactcgctgaatagcaacgccatctctctcttctaacagcccctaggaaccaccattctattctgtttctatgagttttaactattttagatactttatataagtaaaatcatgcagtatttgtccttcggtgactagcttatttcacttagcataatctcttcaaggttcatctctattattgcatatgacagctatttccttctttttaaaggttgaataatagtccattgtatgtatataccatattttatctattcatctgtagatagacatttacgttgttcctacatcttggctattgtgaatagtgctgcaatgaacacaagagtgcaaatatctcttctatatcctgatgtcaattcttttggataaatgcccagaagtagaattgctgggtgatatagttctatttttaatttggtgaggaatctccatattgttttccatagtggctataccattttacattcccactgacagtgtacaagggttccaattcttccaaatccttgccaatacttgtttttgtttttgcaataagtcatcctaacaggtgttaggtgatagctcattgtggttttaatttgcatttccttgatgattagtgatgttgagcatctttttatatacctgttggtcctctgtacgtcttctttggaaaaatgtctattcaaatccttttttcattttttaaccagatcatgtgttgttctgcttttgaattacagaaattccttatatgtattttggatattaattatttatcagatacatggcttggatttctcccattctgtagattgccttttcactccattaatcatttcctgtgctgtgcagaagctttttagtttgatgtatccatgctcttgttatattacccctgctcagccctggagttggtcatttctccaagacaccatgactcctgagtggacagtggtacttggaaaccaagatctaggtaatagatgtgttctttgctattggggcttccaatcttttttcatatgcattttttacttagtcatattaactagatatttgcaattttgaatcttgtgttttctacttttaaatctttttcatattaatactcaaaaatgtttaatggttgtataatatttctttcagtggaaataatataatatggtcttggtttgtttcatatttttcataattaaaaaaacctggaataaacctttctacctcttgaaaatagccttctcatatttaggattaaaaggaaaattatttggtgaaaggttattggcaatttaataactcttgatacaaactgcaaagctgccctccaaaaggagtgtcctgatcacaatacaggagaatcagtttgctttattttacacttacttctatggggttattatcattaaacttttaattttgctatttgagaatcatataagcatttcttggtagtcatatctcctaccaagaagtacaagataatactgcccttgtagaatgacttagagtgtactaaggtctttcatttccacttaatccataccctgttattatttctgtgaggtaggaacctaaatttcaggaaagtggtttgttcaaagtcatacatctactaggtaaaatgtctaaaagaagaatggactctggcatcagctttgtgagtctgaatcttgattccacagctgtgtaaccgttaggaagttatttgaaccctccagccctcaatttcctcatgtgtaaaagacggataatggtacctacctcataaggatattgcgactatgaaatgggttattctatgtaatacataaaagcacttaagagtagtatctgccacataagtcctatctaaatgttagctgctgttatcattaagacggtggcaaactacgtgttttcaaaggaactaaattctgttgcatgtctacgccaattgtgtgatggatgtttttaccgggttctctcatttaaccttcccaattctttgagacagaattttatgcttgtttctgcctattttgcagcttaggaatagtaagttccgagaagtaaaaagtagtggaatcccaatgtgcaaatacctgaagctaagagagcttaagtcactggacccagcggcgaaggctgggacttgaaccccggcctgacccgaaagccggcgctctagagggctacgacgatttaaacagaaacacatctagagaccaagcggctgtgttacgaaggtaagattaggtgtttcctgcacctctgtcccagcacttaaatgtcgccgcacggtctcttttttcgagcagagttttacaagtttctggcccgaaaacccccctgtccctctccatccccacagtggactcctcaggtcctcagccctcacccggcccagttgagatccggacatgaccatctctcgcagcctcagagaagcccagaccgaggtaagtgaagcctcacagaaaaaacaaccgccgtgggctcccggaccttcttggcccgccccccgagcttccgcttccggaaaggatcacgccgaaggccgcacttcatagtctccgacgcacctccaarccctttctcctgctctaggcccagcgccttggacgtgcacagtagatccctcccggcttcccggcttcccgtctcgtcaccctctggtaggggatgggagaagccaatagccggcaaacggggcgggggcgaggcatggctggggcggggccggggcggagccgccgagaaaagggttaagaagccgttccagggcttgcggtgggggttcgggacgaggacccgccagcgccagaggaagggacaggagtaggaggcggataggtttcagaaggaattgcgcgcaactttttggattttcgctctttatttttagtttggcatcgtgtgccttttggatgattttgttcttgatattctataaaaataagacctccaggttgttatcttgcgtagatgtgatgccaatttcagaattattccctgtggccactgatctcagaacgatgctcgttagttgggattttgggtttacttccatgcgtacttgtctcctcttgtgttgaggtaattacttttgatgaagaatgacacaacattcttagtattggcatgtgcactcattttaatgaggattttagtcattggttttggggtttaggaattgggttttgggttgatgatttaaatcaagttgaagagggagaactcagttgattccatttcaactgtcgcccaggctggagtgctgtggtgccatcgcagctcaatgcaaccttcgcctcccggtttccagcgggattctcctgcctcagcctcctgaggagctgggattacagatgcgctccaccacaggcggctaatttttgtatttttagtagagacggggtttcaccatgttggccagtctggtctcgaactcctgacctcaggtgatctgcccactttggcctcccaaagtgctgggattacaggcgtgagccacgatgcccagcctcgtttctttttaatggagaaaagagctaccctttaaaaatctgttacaattaatgtcaaagcccaggaactaaaatatgtccaccaatatatcacacacttatcctgagtgattttaggaaacttgagtatttcacagatttagttttgaattagatcaaactgtgaaaacctctcctttccttccccagccctcacataacttcataactttctaacatattcacctgaaattaagggktttttttttagttgttggtttttaaaaattcatgttgacttttcttaatacatgtttattttagaaaatatagataagcaaaaaggaaaagaccacccataaccccattgcccgtgagttatcactctgaacagcttggtgcattcccttcaagattttttccacctacgtatatatgtataaatgtattacaacmatatgaaataataggtattactgtaacatgagtgttttctcttaatatctaatcaacattgtttctcattaatctacagttataaaatggctgcctggtgttccatgattcatttccctagtgttgggaatgttatgcccccaccccacttttcattttgttatttgctattataaataatgttgcagtgagctgagatctgcaaatgaactagagagtggagagcagagtattctaaagatgtggagacagcatgatgctgagaaagagaaacccagagaggctcttgctgctgaagtatagacagtggggatggaaatgtatgtagggccagactatacagtcctcataggctacatgatttggcttattatcctaaggccattgggaatatgtaaaagttcaagcagggggcacagtgaactgactggggttttacaaagatccatggctgtagtgtagagcaggaatctgaaatctacagtccctggctaaattcagtctgccattcttggatacagcctgagaacaattttcacattttcaagtagttttttttaagtgaaaggaataatattttgtgatgtgaaaagttacctgaaaatcatctcagtgttataaagttttattggaacacagtcacactaatgtgtttacacattatctgtgctacaactgccaaagttgagtatttgtgatagagaccacctagccggccaagcctaagatatttactatctgtgcctttacagaagtttgctgatcactagcatagaggatgcttgagggaaaggcaagtatgggtgtgagcaagttctctcctcctgcatccattctctgtcctccccttggaccgacatcagtcagacatgccctccagcttcaggttctgtttagtcgayagaagagggagagaatgggatattcctgctatctcagcaccatttggctgatgcactggccctctgcatcatcaggggagcccctggagctccagtcttctcacactgtaataacatgtccttctctttgtctcttcagtcttagggatgataacggtttgctagtccctgggtgcctcaacccccttgttgttttccttgtccattctgtaaaacttttaattatcttcaaaactctagattgtcttctgttccctttgaggaccagattgatagaaagtccagatgaaatatattggttgctgggaggggatgaggggacctaagggaggtggtggtgagggaaagtgaagaggacatatttgagagatgcataggagataaaatggagaggacttggtgatagagttggaaagtaaggcagggggaggtatttgttgaccctggtttctgggttttgtatcttggcagatggtgggagaggtccacatttagtaaggaagcttatgaactcatttctctccaacattttattatgaaaaaaatgcaaaccaggaaagtcatttttggatttgttaaattagggagtactttggcgtcatccaagaaaagatgtcaagttagctactgtatagttgagtctggagcgtggcaaagatgtgtgggctgcaaatacacctttctgagttgcctgtggcttccgaacttgctctcaaattacttcctcaagaaagcttctctatcctgcccctgcaaactagctgtgtgccccatgcttctacgtagtagcatcgtttctcacaattataaacttgtgtttagttatgtaatgtctgtcttcctaagtataatttaatctctctaaaagcagggacttcaccttgttcagagcagtatccccagtgcctagcacaatccttgcacttgtaggaatttctgaattatttgttgaataaaccaatgaatcaactattgtttggactgctttggtgcattggggctgacagctacttgaatgtccgaggctcgggattatccaggactagccctttgagcttggtcyggaggtttagtccttctagtatcatggatacacaactctgcttgtctatccagtctttcataattcagcacattgaaccaattactttgccaattggctcacctctgaagtgtgaaagtctctgttcaggtttgaccatgttccagtttataggaaatgaccaaagttgaaagtatatgaagatctaaactaaaaacaccgatttatggccaggatctaagattcaaaaagtaagaggctgtggataagaagtcacatgttgggagcgtgagctcagttctgcttggaaagatctgagagactgtgctgttgtctttcctcaagccatttagtgctctctggggctattttgaacccaaaggttcttggccttttgagataatatacaactttgagaaattgctcaaagccttataattttttcttcagaaaaatgctaatgagcacattttggagacatgattacatatataatgttatcagaggcactcaggagcctctccaaggatttcaggttaagattcctattctaacctaattcaaaaccagccttccacattggggtgtccagctccttctgttgcagggccctggtgatcctggaagtagttggttaactagggatggtaggtccctgatggaatagcatcaaggagaggaagggcatggagcatagagaaaatggaattgggccataatctttgcatttcccactgaagcttatatatctgcagtcttcactttaatcaaaatagcttaatttaggaaagaaagagcccactgtttttgctttataaaatcctgattttattgcttcctgaaattttttttaaaggagaaatacaaaccatacgttgcaagggccttcgtttgacagtttaactggggtcatgctaggactgtatagatattgctgattatgataggaaagccagtgggatgggtctgacaaggatctgttggcagcaagaatcaagggaccccctttggaatgatcccatcacaaggaagaaatggttggggacaatgtgtcatgtttgtgagtcagttgtgaattttaatacagcacaatgatggtcacttattgccctgcagaccctgaagacttctgcgtgacccaaagaaagaaacattaatagtgattaaaaaatgttaaaactttgttgtattaaaatatctgtaaggcagtgtagcagatgcaggtggcttcttattgtgatcatctatgacttcctggccgagagcctttttcctggagcaaaagaagcaagctgaggcaagctggaaaggcagaacattaattcacctggaagaagccctcagtcaacgacaggtggggattatccagtgatggatgaagagcttcctcacccttcgattgggataactctgagatgtgttctatgctgtctcccagagttccccagcagtattggagtacaggggtaactggctggataacacaccatttattagctttcttcccatcactataatatcttacttttcctatccctattccctgttcctgggatcgcctcctaaagaaactatttgcatgtaaatctctgtctcagggattatttcaggctgggggtgggaggaatcccatacctagacaggcactgaggatatatacaaggcatcataggtttggagtcagatctggattcaaattctttctcaccagtgacattgaacaacttaatttatctaagattgtttgttagagataatgacactgacctcataaggtcatattgtaaggaaaaatttgagaatgtataaagccgtgtacacagtggcttacacatggtaagtgcttaataaatgttgggtattatcattaatacagtatttataatattgttaatacagcatagcccaggtagagggcaaagcacaaagctgttttccatccttggggtgactgcagaagcaggttgatttggcagatgtgctgtagatactgtgtccctagtgagcagctgtggcatagcaatatcaatagcttagagcaagcattgccccagtgagccagggcaggagaggaggaaggtggtgcacaccaagtggtggctcaaaagatgagcaattggcagtgaacaatggtattgccaattgtgcttagtctcagtaagcacggatagctacagcaccaataacttcatgtctgtgtctagtatacacttgggtcgttggaatttcattagcctcaytcttgagggattatgttcaaggctaccaagactaagtttctgatttcaacctgttttcccaaatgtacaagggactcttgcttttgttacatttatgaacctaatttgttattttaaggtctttcaaattggagctgtctcttctgtccccctttattccctatttgcagacaagaccatatttcagttctttggccacagtgaaagagaaactgagacaccaagaatctgaggcaggttaaaggatttcactcgttctctaatcctgattaattacagtgtcaggtttcacctgtagtgcttcagacttctcaaacagccttaggttccagagcagatagaaatgaggggccactcacatgtatacatatgtaacaaacctgcacgttgtacacatgtaccctagaacttaaagtataatttaaaaaataaagaaatgcggggccactttggctaggaaggyagacagcaggtagcattagttgttgcccatcccctgcaggtgcagcccactgctatgggggaagaatttgtttcagtctcttttattgcttcactcgagtcagaaatcaaggaccatggtaacatccaatcacaatctcctcttacctttagacactaatagacagatttctcctcaattgatgtagagagacatatgcatgtaacataacatgatttttgaccaaaagcaacttttaagaggggatagtattacaaatacaagggactgacccagcgaccttggcacacctgacattaagaaccagaatcacagtctattaatctcatctgtttccttcgagaaaggaaaatgtttaagaccttgtcagaaggtcttaggctcatgtaggggattttctctagtgggttccatgacatctgtatatggtttcagaaaaatccattgacattgacactttctggaatactgttagttcttctcaaggccatttgcatgaaagtaatgtatgttcatggcttttcttatgttagactgtgagctccttgaaggcagaattcagatattatttgtatctgctcagaagccagcatagttcctggaatgttgccatgtttagcaaaaaacaaaacaaaacatttgctgtttgtctgaaattcaaatttaactgggtgtcctgtattttttctggcaaccctattcctggcacatagctaacctcaataaatattgatgagtgagaggatgaatgaatgactaacacagtaccaacaaatggagaaataaactggtaaaaacttcaattgaccatataaaagacactcatctaaattatgcctaacaatcacagaacaacactgtgtctggttaacatactgctttttaaaatctgacagtctggctttaatgggaaatgcattttctatccatgctttgtcacccacttttactcagggtccatgtgggaagaatactaatctcctggtaatgaaggtgttttgttccaacaatttcacatcttaattccgcacatttctgatctcacatgtttgtttattagtgtgtaccagttgtacaagaaaattgattttaggtggtatatgggtttatcattctgaagtacaatcacctctgtatcttcctttaaaattgccaaaattgtgctgttactccagccaaaccctggggttttgggtaaagtcattcaccgtgattaaaccatcaggaccaattctgtttggataaaggtatatctgcagttagttcattgacagttaatcttaagaaagacaatatgcaaacaactctcatttcacattaattctgctgttgctcctttttctcttaactttgtttttctgagacagggtctggctctgtcstccaggctggagtaagtgatgcaatctcggctcactgcaacctctgcctcctgggctcaagccattctcccaattaactgatacagacacacaccaccacgcccagctaatttttgtatttttagtaaagatggggtttcaccatattgcccaggctggtcttgaactcctgagctcaagccattcacccaccctaggattacaggtgtgagccgccatgaccagccctcttttcctcttaactcttgacttgctgctcctcctctcatcctcctcctccacttctgttccactggtcatagctaagcatgagtcagagttactggaggggcttataaatacgcagattcctgggctccacccctaacagtttatgattccatgggtctagggtgtagcctgagattctgcatttctaacatgttctcaggtgccgctgccgctactgctagcctcagtagcactcaaagaattattgkcctatatcattcttttccttcctcttctccttccctttctccttttctttcagatcgatatttcatgtcctcacttttctgttcccagagcagtataatacaataatctcactctgtcttggccccatagatttgttttcctggtattctttcacctccaattggtaaaagttaacttacacttcctgttcaatgtagtttagcatcctgctgacatgtgatgcacagatctccccatccacttcggcaatatacgtgtagagaaactggaaggtgctgaatgggattcggggcaacccaccattgtggtcacatgataagacctcacacactatcttgagagttttggtaatagtctataaaagttacrtaaaatgaggagaaagttactcttccaggcaatattcctgagatccatttagatacaagaaagaaaacaaaaatattgctcttataaaatgaagtgggaacaatttaagattctagaaagcttgaaatttttacattcaaatgtcactaattcattctaaaaaatattgagtattgggtayctttatttttctttctttgttagaagactactcaaggaattaaatttataaattcctaaatactttaagatatttgttactttagtctgaataccctcactaaaggagggaagttgatttgcattctatataattagaattatttcttattaccctccaatcttatctctaaagggctgagataaatggtctagcctatatactccagcaagacacagtagaggagaagaaggtaagagaaggataatttccccaggaaaatagagtcccaggaagatactggaaaaaaggtcttgaacatcaagataaaccttcctccaaagcatctgggtccatctaaatagaatcacctagtgctttatttcattttacgtaatactaacccttttatygctggggaaatattggttgagaatgagtgccaggaattttaacagaagggttactacagaagcaaaccctccttacaatgaaacttgaacattaaaggagcatgctcagaactcatctcatgtctttaaataacccaccctttgaataaatgttacaagcaaaagagttgtgaaatgaagctcagcatacagatcttggtggtttactgaaactggtgatgtacggatcatcctgacacactcttccagggatcagtgaaagatcagtcctgagtggtgacttagggtgagtgaaaaagcagctgctgtatcttcccacatgattagtagaggagacttgtcctgccttagcagttgatgtctgctgttctcctctcatcctctcccagaacagaatgattgcctagatgaggcttctctaactgtggtatgtgttacccaggagcataagtctatgtcaggaggtactgaggatgtgaataaactcttccttgagtgatagttttacttgatggcaagtaatttaaacataatttataataattattaattttaattgagttaatatttaaaattygtttctttacatttagtaagcattgttattttatgaaacagaatcttcaataaaccacacgatgtcaaaaaaaaatgagtttgaggcaggccaccttcctttcctctcctctgtccctgggggtcctatcatggaaatcattgtgaaacactgcatcttctaggcacttccacttaattcagagcaggtgggagggcaggcatggggctaacaagtatatatgcggctatctgggaggatggtaagtcatgcttgtgagtgggagaatgctttggggtagatttgcaagcacactctgaactttataatttccacccacagctcacccgtttctgtaaaaaacaaacaaacaagcaaacaaaaacaaccctctgcacccctaatgctttgttctgttgccctctccatggggtggtggtatgggctgaattgttccccctaaaattcatatgtcaaagccttaaccccagaactggagaatgcaattgtatttgaacatacgacctttaaaaagataagttaaaatgaagtcagtagggtgtctttttaagaagaggagttaggacatagagagagccaccagacatgtaggcacagagggacacagttcgagaagctggccatttttaagccaaggagaaacgtctcagaagaaagcagtcctgctgacagcttgttcccagaacttctgtcctccagaactgagagacaacaaatttctgttgttcaagccaccaagtcatggcagccctaacaaactaacataggggctttcaactctaaacatcatcttttattgattattcaaacaataacccttcaaattctattgcctcgtaagatttttaaatatttttaaagatttaataaatggatgagtggataaataactgtactagagctatttggtaaactgacataaatctaaaggaaacagatcttcattctcttgcacaatatttttttggggatccacttcacagaggtagtctttaaacatcttgygagcttcattttcaaagtcagaggtgaaagccttgaaatgtgaataatttgctaaaaaaaagtcattctttccagtgaacatgattattttctacatacgtgatctcttccttttttaataatcagttcagtggaacaggaggtggcataggccagtccagaggaaggagtgctgaaggggggaggaatacaggtctgtgtgccatcgcattctgaataatgtgtattcgacgcagagagctcaagatggagtaaatgtacctattacctaccggagtaaaaattcctgttactagactcttctacaaggaacaaactggcttttctagatgacacagagatcctgtcttgccrttgaattcgcaaaggaaagagaaactctgggcttgcctctaaggatatatgaattaactaggatgcaaggtctccaccagatggtgacccctgacttagtctcagctataataaaataccttagactgggtaatttataacaacagaaatttattgctcacagttttggagtctgggaagtccaagaccaaggtgccagcagatttgctctctggtgagggcctgttcctcatgaatgatgccttctatgtgtcctcacttggtggaggggcaacttttataagggcactaatcccattcatgagggctccaccctcatgacctaatcaactcccagaggccctacttttaaggccatcatcttggaagttgagatttcaatatatgaattttgggaggacacaaacattcacactgtaccactgaccaaccccacatttaagatcccagaaacagtccagcatgatagaaatgaatataagggtattgattactggattcatagggcaccccttatttacagacttaacctccaggctgactttacctctaggggttctttgcacatggggatgatgaggagcaaagtcagatatgtcaaggcctcttagaattggaggagctcactgttattcagaggtaggcctgagggtgtctcagaggaagcagagaagtggggatagaatcacaggatgtcagaggtagatgaatctcatggaacattgaatcccacctccttgttttagaagggaagtagaaagatccaattcacctcatgatttcccctctctagtttgggaggcaggtacatcagaagaaacttagcatctacacggtgggctaagcagagggagggttggaatttgactttccaaagtcactctttgttactctgaggtatggggataagggaagggctcagacacatcacacactggtgaggggctgtgaagtagaccaccagagccagggagcagatagcacaccctggcggactcaaagaggcccttgacaccattgagaactgaaatgagccagctcgggaggcatcctcagactttcaccaatctgggagagacgagaccaaaaacttaagctgcargcagctagcgaccagacagayaggcattaccatggagaccagagatgccagagaagactgagggatgtgagaaacgactgctctgtggtcctctttccatctacattcaactgccatcttggagaagagagcgtggtgaggaaaaacctgagatactgggaaatgtacctttaggctgtttcagttactgcatcagactaaaatttcaggattggattgaatttatttattttcttatttgaccctttgtgggtggggtagacaagatcagaattaactgcagataaaattttaaaggtacattttcccccaaaacrtctccaaatgtggtgtgaaaaaaatctgtaaacctatgaaaatttaataaaatgtgttcatttttttatcttcccgtttgtgattttcccgtcctgattgacaactcataggcctctgctgcttactttcctttcctcctcagaggatagtgatttattcagtaataaatgctataaaggacaatgaagaaaaaaagccacaaatgtcctcttgttcacttctctttaaagcaatgataaacattgtaggggaagctataggaaaagttggactacaatatttctgctaaattttctcagaaacaaacgtgtcaaatatgcattccaagcatatttgagaagaacaagattatgtttagatatgctgaatgattcagactaccttttcataccatttgtttttggcagaggcaattattttctcaataattttcaaacttttatgtatctcagggattctttttaaaaaccatgtttttgattcattttattttaacaatgtttaacaatgtaagtccacatataagatacccaagctttaaatatctatacatataaactgatttcaacatctttggcttcaaaacagtaaaattgtttttccaatatcaaacaagtcaaatttggaaaaggcataaatctgtatgaacatcctgtatccatggagatgtcatgactaaattcagaaatagcctcatctctctttgtttttgctttcttatgtctgagttctgcatccaattctgtttattacatagttttctataagattgtaccccttttaaacagtgtctattgatatatattctaggtgtctggaagtctttttctacagtcggctcttggttgtctctgggaatatgaatggaaggagcrgagtgaaaataaatctgagggcaatattcataaataatccaagagctacactgtagtcaactctccccagagcctgaccacagtgtttccctctctcctcctcccaacccctgccactgcctgacgagcacagaaatgaccttgctttagagaggagaaggacaataggagaagaggcatgtttatcatcagccctgcagagttgaccgcgtgtatagatgcactgcccttccaggcccagagggagatttccccttcaggaacaaaaaacagtcaagctaacttacaactcccagagcgctgcaagcaagggctaaaaacttcagccactcgatctcctccgtgaagcgacccacattcatcacactattaaacagatctgttgggagattcaccactttccacatctgggccagctcctctgcacggatgatcagtctgccagcaacctgcagggcaggggacagacacaacacagaggttgtgggagaagttgagacaaggccctgagaaacaccctgtccccaggccaggtccacatctcccagcacatggcaaggggcgggagggggtgttaggaaggtaaagatggctctgtgtggcagttacctttgcaaatcctagtgaagagcatgctgaaatataatttattaattgtcaaactttaggtgtcagaattatgcaaaagatatacatttatattacattttaatttctggtgatgcttttatctgctattgtattcctaaattgttttattccttatatgacagatagaagagcctgaaaacaaaaccaaggggtagagggcttacctgagaccactaattaacggtaaaattagaacaagacataggtctgtttcttcccgattgcactgagttcttagctctagacctcaagtgcatccctcatgctttcccaggaatgatatggggtatgtggctgacccacggggatttgatctggctgcctaatgttacttgatcccaggtattttagagctctgtcatgttcactgcacaaggtgcttggtggacaaaaggagggaagatgactggttgttggccaccaatgcaacaagagcacagatgcccgatgaagtgctccaacacctttcctgactgtctgattctagtgaaatgctaagcctctgggaccaaggtggttagccaagccagtcctaaatcaccccaaaccgctctgtcctggatcataaagcagggtttggtggtgctcaaccatatttcctgggaattggccaaaccacaaactttctcaagccggaccctcctcatgcattcattcaccaggcagctcccaggatgatgtggctatgaagaggctcacagcctctccctaaaagctaaaagcaatgtctggacctgggataactggggagctaaaatatgcccttccccaaactgtgattggcatcatattatggtcttgatcagtaaggagacactgtcgagtgactgaggacctgcacttttctggagagacaagattagcattgcattgagcccctgtacattctgccagcttcaaggaaatctgggatgaccccaccaatgactcagcctgcagcctatttcaaaattattcccatttccccaagggaagatttactttcagtccacggtttagtgtattttagggtggkgctaagtggtcagctgactggcaggagaacagagggctttcgtctgtacccacccagcctcaacactgtccctacattctcctcaatgctgcagcagggcccttacctgagaatgcaggatctttaacagctcaggtgttagctctgcccagttacacaaagcgactcgctcrgaccgctctctcaccggaggcgtctctccacgggacagggcctcaaaataactacaagaaaaaaagtcagagagtaggaggatcctatacaccagtggcctctggctgttctagcaatccttcccccttcttctgagggaaggaggtagagaaaggaacctttgtaaagtggcttctatgtgtcattgtgtttagttcacttacatatgggaaaagtctgaatgtgttactctccacttagggcacagagaatgcttagagaatacaaagctttgttcttctctaaggatgaggaagaaccaagaannnnnnnnnnnnnnnnnnnncagtgcttttcatgtctggatagaatggagggggctcttaggtcatgccctcctttttcattgtggttaaactccaaactaagttttcatggatgtctaaaaaaattatagcacgtgatacaatacgagagcaagcagtctacaatagtggaatgcctcttccataaatgtcagggacaatactaagcaatgtcattttgcttactataaaacggcagcacaagaacaatcaaatgggtttgaaactaacgtataagataaagtctgtctatctgactatgccaaaataaattagtcttctgaagctaaagttcaatcttagaggcaatatataaaatttagaatggaaaactaaacagggcttattactaggcaaagcaacccccatttatgtttctttttatgagcaccactggcctattttccttccaattgtaaaagctgcatcctaatccagaccaggagcacaacactggctcagagactccgaaaggcccctcttaggtgccattttgtgtcttctcaaaggtgtccacactctccccaccatctgcccaggacacccactcacaacctcagcctgaggacatcttcccttccccaactcactggctttctctcaacggcctctctcactctcactttcccactgaaaccctcctaagcagggaatcatcaaacagtaaaaatagcctgaaaatggtccgtgaggtctagttatcttccaactcctgtctcaagtcctggttccccagtttcaagcaggcaagtttgtccaaggagcaatttcatagctgagaggctttctgtgcaaagctacttcaatccaggcccgcagcgattgttgtgtaagctccatctactgagcagcctctggaggtctctcctgaaagaaggcacccgtgtttgaggcacactgttttcagccatgcctgaggaccccatcactctgcctggcctttccccagaatgcagtgtgtactgtgaggacatcattatgttggcagaacaaatcagttcagagaaacaccaaagaaaataacaataatttcctcaaagatacaaagcctctttggttgggtccaagtatgagttttaacagcaggggaggaagtgtctccttaaaggagtgaactagcaggactggtcccaccccatccacccagggctgtcgcttccctcccccggctgcactgctgccatctagtggtgagacaggagaatgaagaaaggcagattaagctgcggagattcccagcccttctttccaccgagagtgggaaaaggcgtgcagggaggaggtgggtgtgcatacgctggtgtgacgcggtcatctaacttgctgcttgccccaggacacggcctattgacctggcgtcctactgctcaatctggctcgcttaggggaggcatcccatccttgcccggctagatgtagtatttatgtgtggattttaaagcatcaaagcaatgcaagagctaaaacaaagacgatgccagttagtcccgaccccctggctgcagccatgacaacctccgcggttttmcaggaccctctctccccgcccgtcctccaagagatgaaggcgagaaaggagcacgtactcggccccccactggatgaggtcctgcggctgcgcccgaatggcggctttggcaaactccttcagcattttcggcagctccggcgggatgcatgttggcttatctgtctgagccattgattggttgacctattctcaggagaaaaaatacataagatgaaaacttggactcataagatgagagcaatcctggacaggaggtcacccagcctctgtttgacactcaattttggggactccgcaagacaaatgcattctattgttacacaacggcaaggttagaaagccgtctgctaacccctactttttgttgtaaatagttatatcctttacgtaaaaattacacagtccttttttatttaaaaagtggaagtcaacaaaaaaatccctaatggtatcaccctaaaatattggatgtctccttccagaatttttcagtataaatatatatgtttgtaaaacaaaaaaataagattatgcaaaacagcttatttactcaaaagtatatcatgaacatctttgcatgtcatccagctcttattagctaggtaagaattgtagcaaaatttactctgaaccctctatgaattaacattaggttatttccatataaaaatagtcattaaacagccatttgatgagcgtctctgtttatagctgcatgttttttcaactctaattgtcaggcggaaaactcgtacattttctctcaaaaagttccaggacaaattgaaacaaaacatgaacatccataaaatatatacaattccatccacaaataaacaacagatcaaaagatttttttctgcttttagtagagaaagggacagactagatatgctaaaaagctgtccctcttcaaaacacctagaggccagacaaatctcagtacaagcctttcacattgccttgctgggcttgcagtgaagtgagagaaatcttccagtggccaatgaggtgaggaaaggggaacccgcagtgctgggcaaatgaagaaactagggctcacctgggcacatgtagatggcaggaacttgaagctttgagataaattgctaggcagggtggatagagaccaaggattaggctcacaaaaggcaaatgtctggactaaaggactccccttctgacctaaacttgagacccgcccagggactacaccctcagcgtgaaaaggtgtggctgaaaatatcygcctacaggctggggtaagcaacaaagaaacctgtctccattgctgcttctagtcaggagagaaacagtcccccaggagttggtagccacagactagttctaagttttccatttataccaacaccagcatggctcggaaatcccaagacaagaaactaaagtggtcttagattggtgggacttcatgaccttttactttatttatgttcttttatttggaggaaaaggatgataaaataatgattaattttagactttgcaaagtattagaaaagttttaacagtaataaccactaaatctgtacagaggaaaaaaggattttttaaaatttttttagtatttattgatcattcttgggtgtttctcggagaggggggaagaaaggaatttttwaaaaacacaaaaaagcaaacaaaacatgcctcccaatgtgaaatggcagcccaacgtatacctgccaagtgctgaagaatgtaggtcttaaaatagactgtatagtcttgtttcagggatttctcacttgtttttattggtatgggctaaacagggcttccatttcataaatgaaagtctccattacatgaatgaaaggctccagggcagaatctcagagggtttctatgagcggcttggaaccaagcacagacaactgcacatccctgtttgggttyggaattggaggtggtgggtttgggatgtggttactcttgtttggaatgcattctcctcctcttaacaggttgattcttcctttggaggtctgcttaaccttccctgattaccctgtcagttccattgtacatacccttccagagcatcacttacctatccttagtgtgattctttgagtaacatgtgtctcccccagcaaactccacggcaggactggtcagtttttgctcaccacaccatcccagtgcctagcccagtgcctggaacttagtgttcaataggtactagtaaaaatgaatgcgtgatagcagtctatgaagtgctagctataaaatgaacacgtgataggagtctatgaagtgctaggtataaaataatgcgtgataggagtctatgaagtgctaggtataaaataatatgtgataggagtctatgaagtgccaggtataaaataatgcctgacaggagtctatgaagtgctaggtataaaataatgtgtgataggagtctatgaagtgctaggtatgcccattggtccacatgacaattcacccagaggtatttttatatccctgtcgctgatgaaaaagcagaggtgtggctcctcggtggagggnnnnnnnnnnnnnnnnnnnnnnnnnnnnnnnnnnnnnnnnnnnnnnnnnnnnnnnnnnnnnnnnnnnnnnnnnnnnnnnnnnnnnnnnnnnnnnnnnnnnnnnnnnnnnnnnnnnnnnnnnnnnnnnnnnnnnnnnnnnnnnnnnnnnnnnnnnnnnnnnnnnnnnnnnnnnnnnnnnnnnnnnnnnnnnnnnnnnnnnnnnnnnnnnnnnnnnnnnnnnnnnnnnnnnnnnnnnnnnnnnnnnnnnnnnnnnnnnnnnnnnnnnnnnnnnnnnnnnnnnnnnnnnnnnnnnnnnnnnnnnnnnnnnnnnnnnnnnnnnnnnnnnnnnnnnnnnnnnnnnnnnnnnnnnnnnnnnnnnnnnnnnnnnnnnnnnnnnnnnnnnnnnnnnnnnnnnnnnnnnnnnnnnnnnnnnnnnnnnnnnnnnnnnnnnnnnnnnnnnnnnnnnnnnnnnnnnnnnnnnnnnnnnnnnnnnnnnnnnnnnnnnnnnnnnnnnnnnnnnnnnnnnnnnnnnnnnnnnnnnnnnnnnnnnnnnnnnnnnnnnnnnnnnnnnnnnnnnnnnnnnnnnnnnnnnnnnnnnnnnnnnnnnnnnnnnnnnnnnnnnnnnnnnnnnnnnnnnnnnnnnnnnnnnnnnnnnnnnnnnnnnnnnnnnnnnnnnnnnnnnnnnnnnnnnnnnnnnnnnnnnnnnnnnnnnnnnnnnnnnnnnnnnnnnnnnnnnnnnnnnnnnnnnnnnnnnnnnnnnnnnnnnnnnnnnnnnnnnnnnnnnnnnnnnnnnnnnnnnnnnnnnnnnnnnnnnnnnnnnnnnnnnnnnnnnnnnnnnnnnnnnnnnnnnnnnnnnnnnnnnnnnnnnnnnnnnnnnnnnnnnnnnnnnnnnnnnnnnnnnnnnnnnnnnnnnnnnnnnnnnnnnnnnnnnnnnnnnnnnnnnnnnnnnnnnnnnnnnnnnnnnnnnnnnnnnnnnnnnnnnnnnnnnnnnnnnnnnnnnnnnnnnnnnnnnnnnnnnnnnnnnnnnnnnnnnnnnnnnnnnnnnnnnnnnnnnnnnnnnnnnnnnnnnnnnnnnnnnnnnnnnnnnnnnnnnnnnnnnnnnnnnnnnnnnnnnnnnnnnnnnnnnnnnnnnnnnnnnnnnnnnnnnnnnnnnnnnnnnnnnnnnnnnnnnnnnnnnnnnnnnnnnnnnnnnnnnnnnnnnnnnnnnnnnnnnnnnnnnnnnnnnnnnnnnnnnnnnnnnnnnnnnnnnnnnnnnnnnnnnnnnnnnnnnnnnnnnnnnnnnnnnnnnnnnnnnnnnnnnnnnnnnnnnnnnnnnnnnnnnnnnnnnnnnnnnnnnnnnnnnnnnnnnnnnnnnnnnnnnnnnnnnnnnnnnnnnnnnnnnnnnnnnnnnnnnnnnnnnnnnnnnnnnnnnnnnnnnnnnnnnnnnnnnnnnnnnnnnnnnnnnnnnnnnnnnnnnnnnnnnnnnnnnnnnnnnnnnnnnnnnnnnnnnnnnnnnnnnnnnnnnnnnnnnnnnnnnnnnnnnnnnnnnnnnnnnnnnnnnnnnnnnnnnnnnnnnnnnnnnnnnnnnnnnnnnnnnnnnnnnnnnnnnnnnnnnnnnnnnnnnnnnnnnnnnnnnnnnnnnnnnnnnnnnnnnnnnnnnnnnnnnnnnnnnnnnnnnnnnnnnnnnnnnnnnnnnnnnnnnnnnnnnnnnnnnnnnnnnnnnnnnnnnnnnnnnnnnnnnnnnnnnnnnnnnnnnnnnnnnnnnnnnnnnnnnnnnnnnnnnnnnnnnnnnnnnnnnnnnnnnnnnnnnnnnnnnnnnnnnnnnnnnnnnnnnnnnnnnnnnnnnnnnnnnnnnnnnnnnnnnnnnnnnnnnnnnnnnnnnnnnnnnnnnnnnnnnnnnnnnnnnnnnnnnnnnnnnnnnnnnnnnnnnnnnnnnnnnnnnnnnnnnnnnnnnnnnnnnnnnnnnnnnnnnnnnnnnnnnnnnnnnnnnnnnnnnnnnnnnnnnnnnnnnnnnnnnnnnnnnnnnnnnnnnnnnnnnnnnnnnnnnnnnnnnnnnnnnnnnnnnnnnnnnnnnnnnnnnnnnnnnnnnnnnnnnnnnnnnnnnnnnnnnnnnnnnnnnnnnnnnnnnnnnnnnnnnnnnnnnnnnnnnnnnnnnnnnnnnnnnnnnnnnnnnnnnnnnnnnnnnnnnnnnnnnnnnnnnnnnnnnnnnnnnnnnnnnnnnnnnnnnnnnnnnnnnnnnnnnnnnnnnnnnnnnnnnnnnnnnnnnnnnnnnnnnnnnnnnnnnnnnnnnnnnnnnnnnnnnnnnnnnnnnnnnnnnnnnnnnnnnnnnnnnnnnnnnnnnnnnnnnnnnnnnnnnnnnnnnnnnnnnnnnnnnnnnnnnnnnnnnnnnnnnnnnnnnnnnnnnnnnnnnnnnnnnnnnnnnnnnnnnnnnnnnnnnnnnnnnnnnnnnnnnnnnnnnnnnnnnnnnnnnnnnnnnnnnnnnnnnnnnnnnnnnnnnnnnnnnnnnnnnnnnnnnnnnnnnnnnnnnnnnnnnnnnnnnnnnnnnnnnnnnnnnnnnnnnnnnnnnnnnnnnnnnnnnnnnnnnnnnnnnnnnnnnnnnnnnnnnnnnnnnnnnnnnnnnnnnnnnnnnnnnnnnnnnnnnnnnnnnnnnnnnnnnnnnnnnnnnnnnnnnnnnnnnnnnnnnnnnnnnnnnnnnnnnnnnnnnnnnnnnnnnnnnnnnnnnnnnnnnnnnnnnnnnnnnnnnnnnnnnnnnnnnnnnnnnnnnnnnnnnnnnnnnnnnnnnnnnnnnnnnnnnnnnnnnnnnnnnnnnnnnnnnnnnnnnnnnnnnnnnnnnnnnnnnnnnnnnnnnnnnnnnnnnnnnnnnnnnnnnnnnnnnnnnnnnnnnnnnnnnnnnnnnnnnnnnnnnnnnnnnnnnnnnnnnnnnnnnnnnnnnnnnnnnnnnnnnnnnnnnnnnnnnnnnnnnnnnnnnnnnnnnnnnnnnnnnnnnnnnnnnnnnnnnnnnnnnnnnnnnnnnnnnnnnnnnnnnnnnnnnnnnnnnnnnnnnnnnnnnnnnnnnnnnnnnnnnnnnnnnnnnnnnnnnnnnnnnnnnnnnnnnnnnnnnnnnnnnnnnnnnnnnnnnnnnnnnnnnnnnnnnnnnnnnnnnnnnnnnnnnnnnnnnnnnnnnnnnnnnnnnnnnnnnnnnnnnnnnnnnnnnnnnnnnnnnnnnnnnnnnnnnnnnnnnnnnnnnnnnnnnnnnnnnnnnnnnnnnnnnnnnnnnnnnnnnnnnnnnnnnnnnnnnnnnnnnnnnnnnnnnnnnnnnnnnnnnnnnnnnnnnnnnnnnnnnnnnnnnnnnnnnnnnnnnnnnnnnnnnnnnnnnnnnnnnnnnnnnnnnnnnnnnnnnnnnnnnnnnnnnnnnnnnnnnnnnnnnnnnnnnnnnnnnnnnnnnnnnnnnnnnnnnnnnnnnnnnnnnnnnnnnnnnnnnnnnnnnnnnnnnnnnnnnnnnnnnnnnnnnnnnnnnnnnnnnnnnnnnnnnnnnnnnnnnnnnnnnnnnnnnnnnnnnnnnnnnnnnnnnnnnnnnnnnnnnnnnnnnnnnnnnnnnnnnnnnnnnnnnnnnnnnnnnnnnnnnnnnnnnnnnnnnnnnnnnnnnnnnnnnnnnnnnnnnnnnnnnnnnnnnnnnnnnnnnnnnnnnnnnnnnnnnnnnnnnnnnnnnnnnnnnnnnnnnnnnnnnnnnnnnnnnnnnnnnnnnnnnnnnnnnnnnnnnnnnnnnnnnnnnnnnnnnnnnnnnnnnnnnnnnnnnnnnnnnnnnnnnnnnnnnnnnnnnnnnnnnnnnnnnnnnnnnnnnnnnnnnnnnnnnnnnnnnnnnnnnnnnnnnnnnnnnnnnnnnnnnnnnnnnnnnnnnnnnnnnnnnnnnnnnnnnnnnnnnnnnnnnnnnnnnnnnnnnnnnnnnnnnnnnnnnnnnnnnnnnnnnnnnnnnnnnnnnnnnnnnnnnnnnnnnnnnnnnnnnnnnnnnnnnnnnnnnnnnnnnnnnnnnnnnnnnnnnnnnnnnnnnnnnnnnnnnnnnnnnnnnnnnnnnnnnnnnnnnnnnnnnnnnnnnnnnnnnnnnnnnnnnnnnnnnnnnnnnnnnnnnnnnnnnnnnnnnnnnnnnnnnnnnnnnnnnnnnnnnnnnnnnnnnnnnnnnnnnnnnnnnnnnnnnnnnnnnnnnnnnnnnnnnnnnnnnnnnnnnnnnnnnnnnnnnnnnnnnnnnnnnnnnnnnnnnnnnnnnnnnnnnnnnnnnnnnnnnnnnnnnnnnnnnnnnnnnnnnnnnnnnnnnnnnnnnnnnnnnnnnnnnnnnnnnnnnnnnnnnnnnnnnnnnnnnnnnnnnnnnnnnnnnnnnnnnnnnnnnnnnnnnnnnnnnnnnnnnnnnnnnnnnnnnnnnnnnnnnnnnnnnnnnnnnnnnnnnnnnnnnnnnnnnnnnnnnnnnnnnnnnnnnnnnnnnnnnnnnnnnnnnnnnnnnnnnnnnnnnnnnnnnnnnnnnnnnnnnnnnnnnnnnnnnnnnnnnnnnnnnnnnnnnnnnnnnnnnnnnnnnnnnnnnnnnnnnnnnnnnnnnnnnnnnnnnnnnnnnnnnnnnnnnnnnnnnnnnnnnnnnnnnnnnnnnnnnnnnnnnnnnnnnnnnnnnnnnnnnnnnnnnnnnnnnnnnnnnnnnnnnnnnnnnnnnnnnnnnnnnnnnnnnnnnnnnnnnnnnnnnnnnnnnnnnnnnnnnnnnnnnnnnnnnnnnnnnnnnnnnnnnnnnnnnnnnnnnnnnnnnnnnnnnnnnnnnnnnnnnnnnnnnnnnnnnnnnnnnnnnnnnnnnnnnnnnnnnnnnnnnnnnnnnnnnnnnnnnnnnnnnnnnnnnnnnnnnnnnnnnnnnnnnnnnnnnnnnnnnnnnnnnnnnnnnnnnnnnnnnnnnnnnnnnnnnnnnnnnnnnnnnnnnnnnnnnnnnnnnnnnnnnnnnnnnnnnnnnnnnnnnnnnnnnnnnnnnnnnnnnnnnnnnnnnnnnnnnnnnnnnnnnnnnnnnnnnnnnnnnnnnnnnnnnnnnnnnnnnnnnnnnnnnnnnnnnnnnnnnnnnnnnnnnnnnnnnnnnnnnnnnnnnnnnnnnnnnnnnnnnnnnnnnnnnnnnnnnnnnnnnnnnnnnnnnnnnnnnnnnnnnnnnnnnnnnnnnnnnnnnnnnnnnnnnnnnnnnnnnnnnnnnnnnnnnnnnnnnnnnnnnnnnnnnnnnnnnnnnnnnnnnnnnnnnnnnnnnnnnnnnnnnnnnnnnnnnnnnnnnnnnnnnnnnnnnnnnnnnnnnnnnnnnnnnnnnnnnnnnnnnnnnnnnnnnnnnnnnnnnnnnnnnnnnnnnnnnnnnnnnnnnnnnnnnnnnnnnnnnnnnnnnnnnnnnnnnnnnnnnnnnnnnnnnnnnnnnnnnnnnnnnnnnnnnnnnnnnnnnnnnnnnnnnnnnnnnnnnnnnnnnnnnnnnnnnnnnnnnnnnnnnnnnnnnnnnnnnnnnnnnnnnnnnnnnnnnnnnnnnnnnnnnnnnnnnnnnnnnnnnnnnnnnnnnnnnnnnnnnnnnnnnnnnnnnnnnnnnnnnnnnnnnnnnnnnnnnnnnnnnnnnnnnnnnnnnnnnnnnnnnnnnnnnnnnnnnnnnnnnnnnnnnnnnnnnnnnnnnnnnnnnnnnnnnnnnnnnnnnnnnnnnnnnnnnnnnnnnnnnnnnnnnnnnnnnnnnnnnnnnnnnnnnnnnnnnnnnnnnnnnnnnnnnnnnnnnnnnnnnnnnnnnnnnnnnnnnnnnnnnnnnnnnnnnnnnnnnnnnnnnnnnnnnnnnnnnnnnnnnnnnnnnnnnnnnnnnnnnnnnnnnnnnnnnnnnnnnnnnnnnnnnnnnnnnnnnnnnnnnnnnnnnnnnnnnnnnnnnnnnnnnnnnnnnnnnnnnnnnnnnnnnnnnnnnnnnnnnnnnnnnnnnnnnnnnnnnnnnnnnnnnnnnnnnnnnnnnnnnnnnnnnnnnnnnnnnnnnnnnnnnnnnnnnnnnnnnnnnnnnnnnnnnnnnnnnnnnnnnnnnnnnnnnnnnnnnnnnnnnnnnnnnnnnnnnnnnnnnnnnnnnnnnnnnnnnnnnnnnnnnnnnnnnnnnnnnnnnnnnnnnnnnnnnnnnnnnnnnnnnnnnnnnnnnnnnnnnnnnnnnnnnnnnnnnnnnnnnnnnnnnnnnnnnnnnnnnnnnnnnnnnnnnnnnnnnnnnnnnnnnnnnnnnnnnnnnnnnnnnnnnnnnnnnnnnnnnnnnnnnnnnnnnnnnnnnnnnnnnnnnnnnnnnnnnnnnnnnnnnnnnnnnnnnnnnnnnnnnnnnnnnnnnnnnnnnnnnnnnnnnnnnnnnnnnnnnnnnnnnnnnnnnnnnnnnnnnnnnnnnnnnnnnnnnnnnnnnnnnnnnnnnnnnnnnnnnnnnnnnnnnnnnnnnnnnnnnnnnnnnnnnnnnnnnnnnnnnnnnnnnnnnnnnnnnnnnnnnnnnnnnnnnnnnnnnnnnnnnnnnnnnnnnnnnnnnnnnnnnnnnnnnnnnnnnnnnnnnnnnnnnnnnnnnnnnnnnnnnnnnnnnnnnnnnnnnnnnnnnnnnnnnnnnnnnnnnnnnnnnnnnnnnnnnnnnnnnnnnnnnnnnnnnnnnnnnnnnnnnnnnnnnnnnnnnnnnnnnnnnnnnnnnnnnnnnnnnnnnnnnnnnnnnnnnnnnnnnnnnnnnnnnnnnnnnnnnnnnnnnnnnnnnnnnnnnnnnnnnnnnnnnnnnnnnnnnnnnnnnnnnnnnnnnnnnnnnnnnnnnnnnnnnnnnnnnnnnnnnnnnnnnnnnnnnnnnnnnnnnnnnnnnnnnnnnnnnnnnnnnnnnnnnnnnnnnnnnnnnnnnnnnncattgacggtgcgcttttgtaggtgagagggcagaagtggagcttgatctttcggcttgtggaaagtggacaggtgagaattcctcaggaatcatagcaacaacacytcttacaatgcgtttttggtgccaggaattgttctaagtgcattacacacatgaactcatttcatccttactgtcaccccatgaggcaagtactattgttatccccatttttacagatgagggaactgagcacagagaggttaaacttgtccaagatgacagtcagcaagtgacagagtcaggatctgaatctgggttgcgtggtcccagattcctcactcttgaccttataatgctaagaaaggggcatggagtggataggaacagagcctgagatgcctggggacaacagggaaagatagaaaatatttatagggtagaatgtggtcactgtgccagggcacttttacaaacatgatgacatcaaagtttcacagtaaactctgaaggtagatattaccttcgttttagaaaacaggctcaaggcttcgagtaattttgcctgtgatcaaacagctggcagtagggcccagggcccaacttgtctccaggtcttctgatttcaagactgttgtttttgttttgttttgttttgctttgctttgttttgagacagagtctcactctgttgcccaggttggaatgcaatggggtaatcatgactcactgcagcctcaatctcctaggtctaagcaatcctcccacctcagcctcccaagtagctgagactacaggtgtgtgccaccacaccaggctaatttttatatttttataaacagggttttgccgtgttgcccaggctggtcttgaacccctgggctcaagtgatccacccccccttggtcacccaaagcactgggattacaggtgtgagccaccgcacctggcctcaagactgttctttttaagcacccaaagaggcaagaaaagccccatctttctctgctacaccccgtgtcacttcacacccatwtgaaagctgctcattgcatcatgtaatccttcagtccatttatactacagtgtgtattagtctaaatcaattaattcacccarggtcttcagagctttctctggttgtgagatgaaagcctttgtctctccctaaagcaattttaagcatcagtgaacaagtgggggaactagatttttggcttatgcatgcagaaagcttttcacagcctgttgtcatccatttgtaaagaggccactctgctggcatttgtcaaaatcctgcaggtccttgcacacctggagaatcctggatggtctggggacggccactgcccacagggcaagatctggggatgaaagaaacctagtcactagctatcacctatctttctgaggcctctgtggaggggctaccaggtgttggtacaggcacctgaccaacagagtgtgccttaggttgggagggggaggctggaggcttgagggctgcaggtgcatcttccaggataacaagaatgctctggccactggagtctgttctgttgtatgcacatgagatgaaggtgtgccaatctcttcctgctttcatgctgagtaaataatactgacaggaatgaataataatgatctttgtgcagaagaacaggtttttcagacaaagcactaacagctggagatggaagatgaaataaaatagaattttagagtagcargttaaacacaagggaggaatttcatagcactgtctgactgaggtgatttgatgtctgtctgtaggaggccaggttgagaggcgtaggttagattatccttgatctatcagtcaataaataacaggatacaataaataacaggatacagtcaagagaatataattttacagggaaacgataataacacaattcaggaaagttgctttcttctaaaacagaggtaagagtagagagggaggagcacatagatgttaccggtartggtccagctcttggggtggatggtgggttcatgggtgtttattatgtttcagtaaaaaaatctgtcttatatattacaataaaaacttttattacataaaatcttttatcaagtaggttacattgttttctgctattttcttgtacaaatgaatatcctttcttatcatttcccttgttctactagataattcccatcaatatacaaacatgctctaatttctcccatcattttcctcttcagctttcacccatttctctgcttccctttattgccaagttctttaaagagttgcccatacctgccaccgctaatttctctcttccaaatctctttttaatctacttgaaccaggctttcatccccatcactccactgaaatgacttgtgtcaaggtccccagtgacatgctgttaaatccaacatcatctctcagcctcggctcaacctatcagcagcatttgatcctgttgatcactttcrcatgattgaaacactttctttccttggattccaggacatcacactcttggtttttctcctttctcattggctgttcttttgcttgttcttcctcctctccctgacactttaatcttggagtgccccaggatttacacttggacttctctatctacatgcactctcttttttatctcattcagtttcatgttttggatattacatttatgtcttcasccctaatccttccctaaacaccacagtagaacatccaactgtttactctgcaccactggatgtctaataggcttctcagacttaatacaccccaactgcactccaagattcctcyccaaaccagctcctccaggcttcctcatagcaaaatatagcaactgtaaattctagttgcccaggctaaaaaccttggcattatccttggctgctttttctctcacaccttaaatccaatcagagcaaatgctattggctgtatctccawaagtcattcagaattggagcacttctctccacttccatcaccttggtccaagcaaacctcatctctcacccggaccactacaatggcttcctaasccatctccctgtttccgcccttcccttccgatggtctgctctcatcacaggtgcccaatcaaattactgaaaacctaagactgatcatgtcattcctctgtttagaaccctcagtggctgccacmttatgcaagtaaaagtcaaagtaacccacaggcccttaaactctctgaacccatcatttcctcttttctccttcctcacttccctccagccatgctggccatcttattatccctcagaaaggccagaccctctcctgmctcaagacttgtgcacttgcattttgtctgcctggaacatgatttcctcaggtatccacaggcttcactcgttagcacctttagttttgtatccaaatgtgaccttctaagggagtcttatctgactcttttaagttgaacaccaatatcccttccaactcctcccttgctttacaatcattacatactatgtatttttaaatttttgttttattgatttctctatattttttccctggagtgcatgggattctgtttgttttagtcactgatgtatttcgggagcctagaacagaattgtgcacataatgggcaccataaatatttgtttactgaattaaattctcctttttttctctccttccaccttgcttccctttccttccttcttctaagaggcccttctgaaaaatgatacttcagtgtccattgagatttgcatgttcagtatcttagggaccaaagttctatttggccaggtgacgaccggtctggcaccagagagtgggaatcctgacggtcttctctaccatctcagccttatactaagtatcaactgtctcatactagctatgagctcagaaaatcagttctccctatcctgtgtgkcttatactgtggctcacttcccccagatcttaagtgtgccatttcataggaggaaacgagagtgaccctgtcccacctgctgcttggatcatggtgaggctggggctgagcagtgatgatgggtacaccatactcgggaccttggctcaggttcagcacaattctgtgatttaactgtggggtgtggttgttagactccccatggagccaatcaaccctgtgtacataaactcctttcacatatacatttgttttcttttgctgcattgcaaattaccacatacttagcagcttaaaacaacacagatttctgatctcagtttccacagggcaggagtctgggtgggttagctgggtcctccgctaagggtcttgcccagctaaaacccaagtgttggctagggctgtgctctcatatgagccttagggtcctcttccatattcattggttgttgacaaaattcagttccttggggatgtaggactgaagtccctgttttcttcctggattttggccagggattgctctcagctcctagaagccactttcacgtcgcagttccatggccccggaatggcagtttattgatgtttgctttcttccaggccagcagaggcatctgttgttgtttcttttgtctgttttttaaggctcacctgatgatgattaggtcagatccacccttttgactaactcagagtcaactgattarggaccttaattatatctgaaagttctcttttgccacataatattaattacaggggtgatatctcctcatattcacaggtctcacccacacttacaggggtgatgagattatacagggcacatacaccaggkggtggaaatgttggaggccatcttagaatcctgcctaccacaatatgcccctttgtgagagaaaatgatgaggtttgtcatctctcctcagagttggaaccattgagacgacaagcacagctactcattgtggttctggatcccstcctcttcctgctacctctgtgtgtagtcttttttcagaacctaggagagcaacacctcctataaccactcagttatgagaaacaaaccacaaaattccacataaatgaaaatgtctacctaatcaaagtctacttctttaaggacttgagtgattgaggggaaaaaaggagaattttaccactgggaggtggggtgagttgtgtggacaaggttcctcccttcttgacacctgtgtcttctgtggccaccctgattctcctcaggactgccctagcctttatggcacctttgcatacattagaagggggcagacatagccccttgggcatatggcctgacaagcagggtaggagctgaacttcagcccactctcacccctcagaaaactgcctggttttcctgcccccagagccttctatttctatcccacattattcatcttctaaatatccacaacactccttgctgcccaccatcaccaaaaacaacaacaacaacaaacttcagtacttggttttctatcttcccttcatgagaactactatcctcctatggatacaagtttgccagctagttctctgcgtggatgactcaaatctacacctaaagtctcaacctccctgctcaactcagtcccttgtccaaatgtcctggacctcattcaaacaagttcacaaagggcacatcatcttccccagggccagcctcagacattcatagtgctgtcagtggagacatcctcctccctcttatcccactacaaacctaagaatcacccttagccactcccctctgcctctcctcacacagcccatatgcttctcacctacaggcaccgtgcctttgtccatttcttgccggtctcactgctccacactgatctaagcccttagcatcnnnnnnnnnnnnnnnnnnnnacgccccacggccccgcctgggggggggggcggggggcgccccatgcgcgctggcgccgtattctggcctagcgggaggcgggctgatgggcttctgggcgcctggctcatgagaatataactctaattttaaaaggaccagggttatgaaagggatgttcacatttcacagaaatattatcctaaggaatgagggacaatttttcctaggaaaagggggcaatgccagatcatttcatagagttattgcgtcttatccatcagtattgtaatggtttttgtgggagcaatttaaaaagctttttctatttttgcaatctatccatctgacaaagggctaatatccagaatctacaaagaacttaaacaaatttacaagaaaaaaacaaccccatcaaaaagtgggagaaggatatgaacagacactttcaaaagaagacatttatgcagcccaacaaacatggaaaaaaagctcatcatcactggtcattagagaaatgcaaataaaaaccacaatgagataccatctcacactagttagaatggtgatcattaaaaagtcaggaaacaacagatgctggagaggatgtggaggaataggaatgcttttacactgttggtgggagtgtaaattagttcaatcattgtggaagacagtgtggtgattcctcaaggatstagaactagaaacactatttgacccagcaatcccattactgggtatatacccaaaggattataaatcattctactatagagacacatgcacatgtatgtttattgyagcactgttcacaatagcaaagacttagaaccaacgcaaatgcccatcaatgatagactggtaaagaaaatgtggcacatatacttcatggaatactatgcagccataaaaaaggacaagttcatgtcctttgcagggacgtggatgaagctggaaaccatcattctcagcaaactaacacaagaacagaaaaccaatcataagtgggagttgaacaatgagaatggacacagggaggggaacatcacacaccggggcctattgtggggtggggggctaggggagggatagcattcggagaaatacctaatgtagatgacaggtcgatgggtgcagcaaatcaccrtggcacatgtatacctatgtgacaaacctgcacattctgcacatgtaccctagaacctaaagtataataataatttttttaaaagttgtttcttctgctctctgccaaatatgtctccatctgcctaattctactgtgagggtctctgttttatctcatggctctggttattttcatgccaaaaatctacacccaaagtctgtttcctctttaccagaatgatgaagaagatgattagagaggaatagtagacattttggttcataatccaccttgatgatttcatggaagggcgtagaaaatacgaagctgaaatataggctaagtgaccagggccatgttgtgatttttgtgggcagtaggcgcttttgccttcttggaccttttcctccattaaaaaaatgaaaaatcatattttatgactgttttggaataatgacaaacacatgaatataatatgttaaaacatcttgtgtacccctaasagtattttggtccctagctactgtgtctcctgtgcctaatgaatgagttggccctgtttgcaagcaatgggaaaagaatgtagcttaactcctttctcagagtctgaagataccaaggttccaatatgttctgaatgatggctgagttgggaggttataatcataaataaggcaaattcctgttcttcctctgagaggctttggggggctttggaggggttggcagctrtggaccacaaagcttggscacctccmaaacatgggctgctcatctcttcaccttgtcctagagtgacatcaccttctccatatgtgacagatagtgttacagtctctactctrggaggtccagagtgactgtccccattccatagatggggagcctcaagcatggtgagatgagcctgggtagcttgctcttctgccttgattcagattctaatgccttgctgctttcttggcagcaggaaggaaacatctttaaaatattttttttctgactgtgaaagtgacactggtttattatgaaattttgaaaaatataagaaattgagagatttttaaaaaacaacaactcccttgatccttcctcccagagccaactactgccaactgcctcatgaggttgtataaatgggtgcaccataccatgggtgggataggactatttgacttcccgggagccagcccaggagttcctgtcattgctgctatttctgcctgatggcacctcaactgtaaaatggctggattttataatatcctcccctcaaatgcttacaagctacaatgttaactggaaaaggcagattgcaaaatgtttatacagtatgatctcaattatggagaaacatgcataaaaaattgaggaaggtaatagataattatatcaacagtggtattagctgtccctcagccatgggagctcctgtatgggtgaggaacagctttttggggagatggtagttttccagcaccacataacatcccccagaaggcaattttctcattttcctttgaataaaattcctcctgttttcactccttagmagagggcaagaggaactgtgatgcctccatgcctgaacctcagacctttggaggttgttgtcctctttcatctcctcttccctgtgcccacccatgaagcagcagcttctgcagactcctatttgtattcgaggctagcagtgggttttcccagccatcctctggggaatatgaatctattctctacataaaagcaaagatacaattaaagctatgcatcagagagcaatgaagggaactaacractccacattaccatggagaggatgctatagaacaaggtcagtttctgctaggagacttyttcttactrttgccacaaatgcagaagaacagctcctggtgcctctgcagccactcaagcctggcttatccgagagtgacgggcatctgcagacaaaatattttgtcttcctcagcagcttgatccagtgttttaccatgtttcccttagctcatacctacatcttgcctagtaaagtcatcatcccatgtctgttttccctgatgaagacaagacagagaacattggcctgtgcatctccacaggataaccttccaaaacttgatgctgggttgcttctaaagtgtctatatcaagccctgaatattagcatactaccagattaaggaactttgagtctaaatggtacattcaataatttaattcaacaactatttgtttgaacatctactatgtgctaagcaggaaagaaatagtcaaggggaacacagtctgcaccagaagtcatcagcatgtgctacatcagatgccgtgttcaaagatcccannnnnnnnnnnnnnnnnnnnctacaggcaccgtgcctttgtccatttcttgccggtctcactgctccacactgatctaagcccttagcatcttacattcaccctgtgtttcagtggttttctgatcacggtctcctctgtttcctctcccagtggttctcaacttgggggtagttttgcatctctagggtacatgtggcaatgtgtgatgacatttttggttatcacaagtgggagtgtgataatagcctgctgttagcatatggagggtaggggccagggctgctgctaaacatcctacaaaggagaggacagtccccccaacaaataattatcctaccccaaatgtcagttgtgctgggataaagaaactctgacctatgtcaattcctccaagcttcctgaatgatatagccttactcttcttaagaaaatgcactgtgcgcatattgcctcctcactggaaaaacattatttcccatttcctatatgcacatgtctacttctgcttaagatgatctcccccttccttttctatgccaatatatcttccctttctcttaaagccttgctggatagcaagccctccagcctgtgtgctgggctagcctccatttgtcctgctaggtccactctgcagtcttctctaacctggtgtctgcaccagaattgtgtcrcctgggcttccttgctctctagtagctggatttggcctattggaggtatcagcakgtgatcagacattgggtatttatttcccaactcccaaastgagcttcttgccttgcctccatagcctcagctactgtctagcaccccattttccatggaaccagttctcattggctccaataacatcmtttcctcccttgccctttcaggtctaggggtggtaacagcttcccacaattgctagtccctaagttcaccactgtgtttggttcactcaactctgcccattcttcagtaaatatttccttagttaaactctctagtgtgtgccatctgcttcctgctggatcctcaatgatgctcagtcacttgaggattttctcctcttggctctcatacaaaacttacagttgggaccactcctctgtcattcagcatgtacgccttgatattgctgtgatccacttacatccagtattttcatggtttctaaccatgttgcgaactcctgtgggtcagggctatttaatacaacatttccactctcttcacatagtgttgtgctcaatcaatgtttgccaatgaaaattacaataaaatgctgcataagggactctaagtaaaactggggatttctctactggcttcctaccttgaaacctgtattccgtcccttcaaagccccttgctgcgttatgctatgcctcgtctgcagggagcaaatattctatgtgctccctacgtctaaagcccgctgctgcatcaaacatgtgcttcataaatgcctttctgttccacgattcacttcaatgagtttttatttaaatatttaatgacrtartaagtggtgtaagtacctccttagggaatcttggtaaagtacagggatgtaatcaaatggtttgcaaattgtacttatttatttataactctaatttttttgttataaaaaatggtgccatggcactttttattttctttaatcagaaaaataacccctgcacttctgggatggaggccccaggtgagcaccggaggaaggggcctggatgagcagggagtgagggggccyggggcccagggcccagagcaaatgctgcaccagagcctggtcaggacccaggagggcctgagggagtggggtcctcatgagcaagtgctgggggctggaggtcagcagctgcctggcctggaagccaggaacacccacttcctgacacctgcggtcgcccagctgggcgagatcaggcctgcgcggccaggacctctggtcacaatgcaggggttcaggtggccaaagctgctctctggagggcctctggctgcagcccacccagttcccctgaggtctggagactcagagcacccccataaaacaccccctcccttttgggccagtggcatgcctcggactccagaagacttgagtggggctccctccagaccagggcctgagggggtggcaaaccctgaccacagatggggggcgtagaaggagcgggaatgggcccagggacagctttgtagtgtgagrtctgcccgactgcatctaggtcaacagccagacaggatgctgcaggggactgtggggaagccaggagaaggtgctgcccatcctgcaggctccccctcatctggagaccctgcgggcaacccttcagtgtgtgcccacgggggtggcggaggcagagtcctgagagtaatgtgggagcctccgggccccctgcagctcctgacccaccagatgggcctgtgttccccctgtagcttgggggccctggaggtggacaccagtaccacctgactgccagagagaggggctggactgaaacccacaccttcaccattcaccactgggcgattctgcctgagggcaagaattgcatcttggccaaaggggtggggcctgtgaagagcaaggcctgcagcaaccacccccacagatccttcatgcccagcacaccactcactctcacacccactcttgcacacaagcatacactcacagggtgcatacaccatgctcacgcactctacaaaggtggcacagctgggacaatcatgcacggagactcagagatgcaaggacagtactggcaatttagagacacagacgctgaggggcacctagcaagctcccggccctcaggggctgtgttcccttcccagggcatgcacaccacaggcagcacacgcaggtgggggcactgtgacaccagtgggagagggcatggtggggtggcaggaagatgccgggttcatctctcctcctggcgtggcgggcctctgcctgatcactgcactgcaggggctcccgcctcaggctgagcctcaatttccaamggcaaacagcctggccctgtctagagaaggcctcgagctagtccggcaaagcatctctggcccgaagggtgaggcggccttggctctcggggccctgccaagatgcagctctaactggggtggcctggaaaacgcatccgggaagaggcccgcaggcatcacgctccagggctcacagatgggggctccagggctcacagatgggggctccggggctcacagatggggcctgacrgaccaccccaggggcacaggatcgggttcgccgtgacctcaggggccagcagggatggcccaggacaaggagtgagagccggggctgaaggggccggcaccagatccaacagggactgcagyggctggcacaggggcccctgaagaggccggcagggtgcgcctgggtaccccaggagcgaagggcgatcgggaatggggagcaacggctggggtttgcaggctttgttggggtccatgagcggccgcagggactggcagggctgctccaggcccatgagccgccgcttgggtgggcaaggctgctccacgcccatgagcggccgcttctgctgccttggctgtcccgggcccaggagtgaaggcgtgagtgggccctacagctctggggcttccactaaccactggggctacctgaggcgcagcagcgaccgccggggcggctggcctggctcagcagggaccttcggggctggccgtactgacgtggggctaggaaggcccaccgggggcagcagcactgtcctgggaggaaactggcgggccgtcgccgtggtcagagggtgtagagtggccgtgggggctggtacccccggcactgggctagcagtgaccacaggggccggctgcgctgtcctgaggatgccctaccaggctggccacagtgacacgggctggcccacggccgcaggggccggcagcggtgccacagggtcagcagagaccgcaggcgcctgcagcggtgccttggggccaggaggaaccgcaggcgccggcagtagaggcaggggtccagaagggaccgtgaggccaggagggacctgggagtgcccaatgcggccggcagggctgagccaggcgtgactgttggggctggcagagctgatctgggcctggaaggagccgctggggccggcagggctgaccggggcccagaagtgaccgccagtgctggcagggctgtttcaggccccgaagtgaccgccagggccagctgcgctgacccaggagtggccgctgggagggctggcagggctgccaggagtagggctgggagggacccctggggctggccgggctggctgggctggagctgttcctggcgctgggcggggctcttctggtcccagtggctagctgggagcggccccccttctggggagcacacctgcttggaggactgcagcgggaccttcctcgccccatggcaagcgggctcgaggtcctgccgggggctgcctgcctccagggtccgcctggtctcactcggctccgcaaggaggcaggtttccaactcccggggttcttgataagrcgacgttcccatttctccttccgctcctgtggctccagggccatatctttctcagggcctccagggtgctgaagctgggtatggcgaagccgtccatgacctcctcctcctgcgagttgaacttccggccgtcgtggcgctaggtgggtgggtgggggggcgcgcggcacgcgttctccttgcctgggctgggctcggactcgttgccggatgaggggctctgggcgcgggcgtggcgggtggcctccaagcgccggtcactgtctcgctgcgcacgcgcgggcgccggctcggagggtaccttggcctccgtggcgctgcgtgcgccctgtcgggccggtgaccttgacgcccagcgcctagctcgcggcagccgggcttcctcggctacgcggcgccgcggggctcgggccctgggcggaggcaggcggcggccccctcgccggcggggcacgctgggcgcggggtacggctcagcccccgcccggcgcagcctgggatcgctggcgcccacagctgggcgtatcagcgggggcggggcccggcgctcagcggccccaggccgccccacgccccacgccccgcctgggggggggggcgcggggggcgcnnnnnnnnnnnnnnnnnnnnttcagcagagggagaagtcatccagttttggtgaaggcaaaaaattcaaaagccatcattccaagagcagtggaaggaagggaggaagtagaaagtatgaaagtggtgaaaagtatagaagtgggaagagttgagtgagatgtgaatagaggggtgggagggtaagctggcctcccgggcagatgagaggaaaccaaagagaaaagcccagggctaggacacagaatgaagatttacccagctggagagaaacttgaaataacaagatagtaacaacacatggccagacagggattgtgttggaaaagaattaaaaagcttaaacccggctgggtgcagtggctcacgcctgtaatcccagcactttgggaggccgaggcgggtggatcacgaggtcaggagatcgagagcatcctggataacacggtgaaaccccgtctctactaaaaatacaaaaaaatagccgggcatggtggcaggcacctgtagtcccagctactcaggaggctgaggcaggagaatggcgtgaacccgggaggcggagcttgcagtgagccaagatggcaccactgcactccagcctgggcaacagagcaagactccatctcaaaaaaataaataaataaaataaaaaataaaaatagaaaaagcttaaaccctaaaaatrgaattaggtgggaaggctaatgtgactgtgagataaaagacccaggcctgatcagtaacattcccaggtagctccatttaccttttccccaaagcagaccttgaccttcagctttcaaggtgaaacttggccttcacctttcaaggcgaatatcttcaaaggtatttttgaatctgtaatgaggtgtcatttcatcaggtatggggaagtgttctasctgtggttgaggaaggcttagtgggaaaaagtcttgaagttggaggtgggttctggtcccagcattgccatcaactagatatgtgacctcaaacaagtcacttgactagcctctgtgarctgggtttggatatcatctcwtccatgaactgcctgtttaatcttggtctatttacttcctttatctgtaggctttcacagctttcttcccttcagcagaaggagaaaagccatccatccagttttggtggaggcaagaaattcaggagccatcattccaagttaagtgaaagggaaggaggaaataaaaagtatgaaagtggtaaaaagtatagaggtgggaatgcgatgtaaacagaagggtgggagggtaagctggcttcctgggccttcatagctagtcttcatttttkttcaaatccacaaaatgatgggtattagactctatgttttaaaagctgctgcctgatgtaaagtcctacactttaatacttgaatgaatacttagggtgagagagaatagtgactccctaactgaatttgttctacaataggaaacagctctcatggaggtcattcagctgagatgctggatgaattgacagctttaagtcctgctatagtcagaatatgtctcctctccacctgccagagatccatgcctcccaccattgctctgttgcaggggtaccaactttggatctgtgctgctggagtgggggagctcccacagtgtttgttcatacaagagggtttttagcagctacycacccagaataatttgggaagaaggcctatagatgccataaaatggaggttcctcaaggaattctcaggggaaatgttacaacagcactctgccgaggagatgagatgcacctggttattttgtaagtagaaggtgtggaactgcaggtatggttctgctttgttgccccacagtratcaaagttttgcagcccaaacaaggatttggggaagtcacagctcagagaacacccaagcacatcaatgttcaaaagtgtagtatgaagtggtactgcccaaaytcattaatcaggaacagccacgtggtatatataggaacttgcattcttttaccttacagattacattatcaattcaccttgatgcaataatgtgtcctcccattggtccttgagctttactaagatagtttctttggccagagtccctttgaggttgctataaagagaacccaacttacctatggagattctrttgcttctgctctgtcttctgctcatctattatttctcagccctaatggaactagtatgcaaaacactagtagggagataatattgaatcttgtcagcctttataacttgatctagtaaggtactcctcaaatagctcaggtaatctgtcccaatatagtcctgattttscccaatcaaatacacttctgacaatagatatgaattcagacactgggccactgagtcacactgtctggggggcatcagtcttggaggttaggagtcctggccggggaaacaggagactgactatcctatcatgkattgtatacagcacacccatatgtggggatggatgtgggtcttggtcagaaaccatccttgtgggaaacsgagggcattcctagtagatgaagtatcctctctgctgggggtattttgtcacagtgacaaagtatggtgttttgcaaagctagttgactaccgtcacctcttagaaggaggtaaacccatcataaagattgattgatggcagggtcagactgactatggcttacaattggagctctggttgagttagggtcttgctccctaactcaaacagaartrcagccctggacaggtagcattagcatcatctggaagttcgtgaaaaagcagacttaggcctcatgccaatcctactggatcwaaactcaatttgacaagattcccaggcaatttatmtgcccattaaagtttaagaggccctgggttagggtgcttcttttgaaaagaaggtaagtatctcttctagaggccagtcatttacaytgtagtaagaaagcttaatcggaatacttctcatttatcctttagctaaaatatgccagaatgggaatttttgttgcaaggagggaacatcaccaaacccccaactcctgaccgctgctgtaacttcagctcttaccatggggatctagcacacagtagcatcaacatatcttttgtcatttggctgaataactcattcacaatgagaaagaatatgtggctttgtgtttttcagtatttgactcatgctcaggtgtggtgggcagaataacagactacaaatgtccatgtcataatccctagaacctgtgaatatgttaccttacacagcaaaggggagtggaggttgcagataaaattaaggtggctaagcagctgattttaagatagagagagtgtcctgggtgatccaggtgggccccatataatcacaagtgtcctgaaaagtgaaagagggaggcagaagagaaggtcagagtcagagaaggagatgtgagaaggactagcgctgcccttgctggctttgaagacagaggaggagggccctgagttgagaaatgtgagtgatttctagaagctggaacaggcaaggaaactctcctagagccctcagaaaagaatgcagtgctaccaacacgttgatttttgcccaataagacatgtggtagactttttacctatggaactgtaggacaataaatttatgttgttttaagctattaagtgtatagtaatttgttatggcaacaatagaaaacctgtaaaacaggaaacagttcctttgttttgaatgtgaaaaacagacaaaatgctagaattatgtcttttttttcttttttatatcttttggaattcacctgcacatgtttgaggtaatcctgcttctcagttcgtggaatattatcatttattcatagaagaaccaacctttttgtgaaaacatttttttaaggtttattgtttttttcccttcatctatcattcctaatcccactgccctccttgcacaggtatccactctaatacatgtaatatagttcttccaatccatccaacagatgtttatttagatatatgagcgtccttacaaaaatacacaaggctgctttatgtgtgtgtttgatagataaatggaattgtgctataaatcccattctgtttttgcttttttactcttaactccatttttgagatcaatccaggtttctaaatgaaaatataatttattatcctattgtatacacaaactatattttacctgtacattccttggacatagacacctaggttgcctccagcagagtgatagtgaagcttgttaggaacatcttgtgttccctgggaagaatttccccgggtgtatacccaggagtgggcttggtggatttaaggtgcacaattgtccttcagaacggctgcatctgcagtgggtgagggctctctttccccacctttttgccaatgcttggtaatatctgacttaamaagtgatatgcaatgggcaacaartagctgtgaaaggaagtgctatatagatgacttagtggaaaccatgctgtaaatgcagaatgagcagggaaawgttaaaaaataattcttggaggaagagcatcttaccagcaggacagatgtggctgggaagaggaaagccctcsaggcaagaaggttgtgtgtgtggttcaccattgagtggtctttatcaccagtgagatcacccttcttctgactacagctatctggaactcagtctagtctatttccagcctgagctttttgctaaccttccccggacacgtgagggactctcttgactcagcttccaactcattctctgctttaacttcctctttgccactttacaaatttgtgtgatttaatgacttttgacagacacatgcccctgggaaagcaccattattaccacatgaaacatttccatcattccaaaaagttcctttgtatatgtttgcagtccatcctgcctcctgctcttagcatcatagaactactgatttgctttctgtcacttcagggaagttcacattttccagaattttatataaatagaattgtttagtatgcactcttttgtgtctggcttttttccactcagcataattattttgagttttactcattttattgacatatcaataatttatttgtttttactgctgaatagtattctattgtatgaatatatggcattttgtttctcttgttgagggacatttgttttgggctattattattaaagcttctatagacattcatatataagcttttgtgtggacatatgttttaactttcttggataaatacttaggagtccaatggctgggtcatatgacaggtgtatgtttaacattttaagaaactgctggcctggtgcagtggctcacgcctgtaatcccagcactttgggaggctgagacaggtggatcacctgaggtcaggagttcaagaccaccctggccaacatggtgaaaccccgtttctaataaaaatacaaaaattattacggtgtggtggcacacacctgtaatcccagctatttgggaggctgaggaagaagaactgcttgaacctgggaggcagaggttgcagtgagccaagatcgcaccactgcactccagcctgggtgacaagagcaaaactctgtctcagaaaaaaagaaagaaagaaagaaagaaaccgccataccctttttcaaagtggttgtaccattttacattctgaacagcattataggagaattccagttgtttccacattcttgtcaagggttggtagggtcagtcttttaaatttcttgccattttagtgactgtgcattggtatttcattgtggtttatttgcatgatgactaatgctcaacaccaattaatcatgttgagtacttttaatgtgcttatttgccattcatatatcttctttggtgaagtgtctcttcaaatattttgcccatttaaaaattgtgttggttcttgttattgaattgtaagaattctttctatccggatataaatcctttgccagatatgtgtattacaaatgttttctcctagccttccacctcagcctcccaagtagctgggaatgcaggtgtgcaccaacactcaggtttttttgtttttgttgttgtttttgtttttttttctgtagagacagggtcttgccatgctgccgaggctgctctcaaactcctgggatcaagcaatcctcctgcctcagcctcccaaagtgctgacattacaagcatgagccactgtgcctggctaacttttcatcttttaaagtagtgtcttgcaaagaacaacattttaatgaagtccaatttatcaactttttgattcattgtccatgctttttgcatagtaagaaatctttgcctgcctcaaaattgcaaagcttttcttctatgttttcttctagaaatagttttagatttttacatcacttgtgcttattcttaacttcctcatttggtctcttggatccttgggtccgtggagctattctggaagrgttactagtatctctttttgcttgtaatgggagcaaaccttaggacctaactggagtcctttgattacatcatcagccatttgggcttgcaatcacataaacatactgaagaaaattccactaggagagtgttctctcctacttaggtactataatagagaataagactagttatccttttgggagcctaaattggatttatatccctctgaagaaaagtaggtggagtgccaggagctgatttggctaaatgaagagggaaggtgttcttgctgaaatgcctggggagaagagggggatcaggaggcaacaaggtgtctgtccyggatatttatgatgagccaaattctagcaagtcaagcagaaactgaagtatgtgatttcataaccgatgttgtgagacagaagagcacaaaggtgctgcattggcacctggagggaaagtgtcctaagggggaggaataagacacttttycccacttcatgtagactcagcatgrttttagccagaaaacactctgggaagtctagggccactttggcaccrtgggagtttgcmsctctggttgctccaagaacacagatattaatgtagcacagatattaatattaatattaattagcacagayatwaatgtagtcacagaaagaaaaagagrtgaaaaagagacaggttcttcastgcatgagagrctccctttgggatctctcagaaatgtggaagcagaggctayagcacaagcctgggttattgctagtagcaagacagaaaataaggcttgggtaagctgtagttatagttacaatggaaatgactggcccaagagagtgctacagattacatagcagcyactaagaaaaaggacaggcagaaggggtaggcaagacatgttctctggctgttgcagccaccaaaaagccaggatacaaaggcagggagttatctgaactgccttcctggagggtcatgcatttaggatctgactcattgactcttttccttaattttgctctgtacatttctctaagagggctaaccagtgtcaaggtttgataatatctgaaatggtattctggtgccaaagtatcatctcacaaattatttagaaattgcaaaagagaaaatgtactttataatccagatatctggcagttatccacgtgatcaaatttagcatcagtgacagtaggacaactagatattatatacctcttgctgtaatatattatgaagtacacaacatcaactatgaaggtttttttttttgagatagggttttgctctgtcacccagtttagagggcagctgtgcaaagctcactgcagctttgacctcccagtctcaagtgatcctcccacctcagcctccctagtagctgggactacagatgtgtgccaccatacctggctaattttatacatattttttgtggagatgttgtttcaccatgttgcacaggctggtctcgaactcctgtgggagttctgcctgaaagtgctgggattataggcgtgagccactgtgtccaaactatgaagtattcttgccaaaatagattaacctaaatctaatcaagcttctaggtcagaagtgtccaatagcaatataatgtcagctgcagctacatgtaatttcaaattttctggttgccaccaaaagcacaaaaagaaaaaatagataaattggactacataaagattaaatacttccgtgcatcaaaggacacaatcaacacagagaaaaggcaaaccactgaaggggagaaaatatttgcaaattgatattcataatatgcgaagaatccttacaactgaacaactacaaaataattaacagattgaaaaatggggaaaggagttgaatagacatttctccaaagaagatgtacaactggtcaataaacacacaaaaagactaattatgagggaaatgcaaattaaaaccacaatgagatcaaacacattaagttggctattataaaaaaaaaaaaaaaaaaaaaagaaagtgccaggcacaatgatgctgtagtcccagcactcaagaggctgaggtgggagaatttcttgagaccaggagttagaggctgcagtgcactaagtgtgaatagccactgcactccaacatgtgcaacacagcaagaccccatccctaaaataaaataagataaaatataaggcaacaaaaaataacaagtattggtaaggatgtggagaaattggaaccctcgtgcattgctggtgggtgtgtaaaaaggtatggctgctgtgaaaaatgggatggctaatcctcaaaaaattaaccacagaattactatatgatccagcaaccccacttctgcatatacactcaaaagaagtagaatcaaagactcaaacaggtatttgtaccccccgttcatagcagcattatttacaatagccaaaaagtagaagcaataaaagtgttcatcaatgtatgaatgtataaacaaaatgcggcatatacatgcagtgggatatcattcagctttaaaaagggaggaaattctaacacatgccacaacatggataaacctagaagacattgtgctaagtgaaataagtcagtcacaaaagcacaaatacggtgtgattctatttacatgaagtaccagagttgtcaaatgtatagagacagaaagtagaatggtcgttgccaggggctgaggagttagtattttactggatgcagtttcagtggggtagataaaaaagttctggaggtggatggtggtgatggttacacaacaatctgactgtacttaatgccactgaagtgtacatttaaaaatggttaaaatggtacgttttatgttatgtgtattttggcacaatgaaaacagctataaaaggcattcttgaaacaactggggatatctgatattctggaattattattacttttcttaggtgtaataaaagtattgtggttatatacattatataaaaagaggataatgtccttattcttaggagatgctttctgaactatttggggataaagtgctctgtaatatctgctctgtgaagacagaccttagggaggcttttcctctttattatacttcaggcaccatacttggctaccatactcatcacatgacccagcaattgcctggactttgcaggctccagatagtcttcccacatgttaatcctcacaacaaccccaaagataggtcttatagatccctatttagtacgtagggaaacgaaagttccggtgttttcccaggatcacttggtggtacgtccctgcaggccaactggaacttgaagcaagtgacacaagctggagactcttattttctctacaggactgaagtttcagtaaagastcagttaacacagtrgatttttccaagactttggggtttgaaaggtcactgggacaggccagaaaagaggaagcagaaaacatatcaattcttagagtgtgatatgtgagattcttccaaatgmtctgtggtctgggtctattgccccacagaaggtwgatggcatcctggataagatcaggtcttcyaaagcagactcggggttggaatttttgctccatcayttaccagccrtgctacttggggtaaattacttaaacartcygaaccttagcttcctcatctgtaaaacagaaataataataatatttctcatggggctgctgtgrggataaaattagataatgtacccaaagctcttcacacagaaaagccttcccctgctggatctctcatgtaccccctggattttctaggagagtgtggcttctccagcagcttctcaaacagctgttgagaatcactgtttgtaatgagaaatattatgaatgtggagccagaaaaagtctgacagcctttgtagcagggggatgaggaggaggtggttgtgtgtgtcctcagctcagtggtaggtgctgggcatgtggtaggaatgagaaagtaaaagtagctattattagtagaatagtatctataacttttattttttggcataaattaacaatttaacaaaagccagacattatttttgttggtgctttactagaaacattgctgttttctaatgacttctggtagtatttcattattattttctctttttggttttattttgtgtaaaaggactaagtgagakgggtgtttgcaatttttttctttccaactgactagctagtcaatgctcttttggaccccagcccacccccctgaaaaaaaggaaaaagaacaaattgagaacttatgaaaccacaacccagaaacctgaatgtttttcattttaacttttcttggaaaaatttgatgaaaagcctgtgctgtggttttaaacggcattgggatgtccatctcctgtccctattcccaascccctaaacgtgatttatattgccctattttaagctagtgcagatttatgagactttaaacaccatggatggagttactggaggtttaaagggattaagcagcacctggaggtgtataagttgtttaaamgatttatcagcatttccatgttaaaatacacttctcaaggattctcatatcctggatmtgaatctattttgggcagaggagtaaatttttaggatgtctcataaatggagaaaaaaatcatccctctatcgcttcttgctttgttttttgtttttttttatttttatttttactttttattatactttaagttttacggtacatgtgcacattgtgcaggttagttacatatgtatacatgtgccatgctggtgcgctgcacccamtaactcgtcatctagcattaggtatatctcccaatgctatccctccccccttctcccaccccaccacagtccccagagtgtgatattccccttcctgtgtccatgtgatctcattgttcaattcccacctatgagtgagaatatgcagtgtttggttttttgttcttgcgatagtttactgagaatgatgatttccaatttcatccatgtccctacaaaggacatgaactcatcattttttatggctgcatagtattccatggtgtatatgtgccacattttcttaatccagtctatcattgttggacatttgggttggttccaagtctttgctattgtgaataatgccgcaataaacatacgtgtgcatgtgtctttatagcagcatgatttatagtcctttgggtatatacccagtaatgggatggctgggtcaaatggtatttccagttctagatccctgaggaatcgccacactgacttccacaatggttgaactagtttacagtcccaccaacagtgtaaaagtgttcctatttctccacatcctctccagcacctgttgtttcctgactttttaatgattgccattctaactggtgtgagatggtatctcattgtggttttgatttgcatttctctgatggccagtgatgatgagcatttttttcatgtgttttttggctgcataaatgtcttcttttgagaagtgtctgttcatgtccttcgcccactttttgatggggttgtttgtttttttcttgtaaatttgtttgagttcattgtagattctggatattagccctttgtcagatgagtaggttgtgaaaattttctcccattttgtaggttgcctgttcactctgatggtagtttcttttgctgtgcagaagctctttagtttaattagatcccatttgtcaattttgtcttttgttgccattgcttttggtgttttggacatgaagtccttgcccatgcctatgtcctgaatggtattgcctaggttttcttctaggttttttatggttttaggtctaacgtttaagtctttaatccatcttgaattgatttttgtataaggtgtaaggaagggatccagtttcagctttctacatatggctagccagttttcccagcaccgtttattaaatagggaatcctttccccatttcttgtttttctcaggtttgtcaaagatcagatagttgtagataggcagcgttatttctgagggctctgttctgttccattgattgatatctctgttttggtaccagtaccatgctgttttggttactgtagccttgtagtatagtttgaagtcaggtagtgtgatgcctccagctttgttcttttggcttaggattgccttggcgatgcgggctcttttttggttccatatgaactttaaagtagttttttccaattctgtgaagaaagtcattggtagcttgatggggatggcattgaatctgtaaattaccttgggcagtatggccattttcacgaattgattcttcctacccatgagcatggaatgttcttccatttgtttgtatcctcttttatttccttgagcagtggtttgtagttctccttgaagaggtccttcacatcccttgtgagttggattcctaggtattttattctctttgaagcaattgtgaatgggagttgactcatgatttggctctctgtttgtctgttgttggtgtataagaatgcctgtgatttttgtacattgattttgtatcctgagactttgctgaagttgcttatcagtttaaggagattttgggctgagacaatggggttttctagatatacaatcatgtcatctgcaaacagggacaatttgacttcctcttttcctaattgaatgccctttgtttccttctcctgcctaattgccctggccagaacttccaacactatgttgaataggagtcgtgagagagggcatccctgtcttgtgccagttttcaaagggaatgcttctagtttttgcccatttagtatgatattggctgtgggtttgtcatagatagctcttattattttgaaatatgtcccatcaatacctaatttattgagagtttttagcatgaagggttgttgaattttttcaaaggccttttctgcatctattgagataatcatgtggtttttgtctttggctctgtttatatgctggattacatttattgatttgtgtatattgaaccagccttgcatcccagggatgaagcccacttgatcatggtggataagctttttgatgtgctgctggattcgttttgcccgtattttattgaggatttttgcatcaatgttcatcaaggatattggtctaaaattctcttttttggttgtgtctctgcccggctttggtatcagaatgatgctggcctcataaaatgagttagggaggattccctctttttctattgattggaatagtttcagaaggaatggtaccagttcctccttgtacctctggtataattcggctgtgaatccatctggtcttggactctttttggttggtaaactattgattattgccacaatttcagctcctgttattggtctattcagagattcaacttcttcctggtttagtcttgggagagtgtatgtgtctaggaatttatccatttcttctagattttctagtttatttgcgtagaggtgtttgtagtattctctgatggtagtttgtatttctgtgggatcagtggtgatatcccctttatcattttttattgcgtctatttgattcttctctctttttttctttattagtcttgctagcgttctatcaattttgttgatcctttcaaaaaaccagctcctggattcattaattttttgaagggttttttgtgtctctatgtccttcagttctgctctgattttagtgatttcttgccttctgctagcttttgaatgtgtttgctcttgcttttctagttcttttaattgtgatgttagggtgtcaattttggatctttcctgctttctcttgtgggcatttagtgctataaatttccctctacacactgctttgaatgcatcccagagattctggtatgttgtgtctttgttctcgttggtttcaaagaacatctttatttctgccttcatttcattatgtatccagtagtcattcaggagcaggttgttcagtttccatgtagttgagcggttttgagtgagattcttaattctgagttctagtttgattgcactgtggtctgagagatagtttgttataatctctgttcttttacatttgctgaggagagctttacttccaagtatgtggtcaattttggaataggtgtggtgtggtgctgaaaaaaatgtatattctgttgatttggggtggagagttctgtagatgtctattaggtcctcttggtgcagagctgagttcaattcctgggtatccttgttgactttctgtctcgttgatctgtctaatgttgacagtggggtgttaaagtctcccattattaatgtgtgggagtctaagtctctttgtaggtcactcaggacttgctttatgaatcttggtgctcctgtattgggtgcatatatatttaggatagttagctcttcttgttgaattgatccctttaccattatgtaatggccttctttgtctcttttgatctttgttggtttaaagtctgttttatcagagactaggattgcaacccctgccttttttttgttttccatttgcttggtagatcttcctccatccttttattttgagcctatgtgtgtctctgcacgtgagatgggtttcctgaatacagcacactgatgggtcttgactctttatccaatttgccagtctgtgtcttttaattggagcgtttagtccatttacatttaaagttaatattgttatgtgtgaatttggtcctgtcattatgatgttagctggttattttgctcgttaattgatgcagtttcttcctagtctcgatggtctttacattttggcatgattttgcagcggctggtactggttgttcctttccatgtttagtgtttccttcaggagctcttttagggcaggcctggtggtgacaaaatctctcagcatttgcttgtctctaaagtattttatttctccttcacttatgaagcttagtttggctggatatgaaattctgggttgaaaattcttttctttaagaatgttgaatattggcccccactctcttctggcttgtaggatttctgccaagagatctgctgttagtctgatgggcttccctttgagggtaacccgacctttctctctggctgcccttaacattttttccttcatttcaactttagtgaatctgacaattatgtgtcttggagttgctcttctcgaggagtatctttgtggcattctctgtatttcctgaatctgaaccttggcctgccttgctagattggggaagttctcctggataatatcctgcagagtgttttccaacttggttccattctccccatcactttcaggtacaccaatcagaygtagatttggtcttttcacatagtcccatatttcttggaggctttgctcatttctttttattcttttttctctaaacttcccttctcacttcatttcattcatttcatcttccattgctgataccatttcttccagttgacygcatcggctcctgaggcttctgcattcttcacgtagttctcgagccttggttttcagctccatcagctcctttaagcacttctctgtattggttattctagttatacattcttctaaatttttttcaaagttttcaacttctttgcctttggtttgaatgtcctccygtagctcagagtaatttgatcgtctgaagccttcttctctcagcttgtcaaagtcattctccatccagctttgttccgttgctggtgaggaactgcgttcctttggaggaggagaggtgctctgcattttagagtttcccatttttctgttctgttttttccccatctttgtggttttatctacttttggtctttgatgatggtgatgtacagatgggtttttggtgtggatgtccttkctgtttgttagttttccttctaacagacaggatcctcagctgcacgtctgttggaataccctgccgtgtgaggtgtcagtgtgcccctgctggggggtgcctcccagttaggctgctcaggggtcaggggtcagggacccacttgaggaggcagtctgcccattctcagatctccagctgcgtgctgggagaaccactgctctcttcaaagctgtcagacagggacatttaagtctgcagaggttactgctgtctttttgtttgtctgtgccctgcccccagaggtggagcctacagaggcaggcaggcctccttgagctgtgrtgggctccacccagtttgagcttcccagctgctttgtttacctaagcaagcctgggcaatgkcgggygcccctcccccagcctcactgccgccttgcartttgatctcagactgctgtgctagcaatcagtgagactccgtgggcgtaggaccctcygagccaggtgcgggatataatcttgtggtgcgccgttttttaagccggtccgaaaagcgcaatattcgggtgggagtgacccgatttcccaggtgagtccgtcacccctttctttgactcggaaagggaactccctgaccccttgcgcttcccaagtgaggcaatgcctckccctgcttcgggttgcgcacagtgcacgcacccactgacctgcgcccactgtctggcactccctagtgagatgaacccggtacctcagatggaaatgcagaaatcacccatcttctgcgtcgctcacgctgggagctgtagaccggagctgttcctattcggccatcttggctcctctccttgctttgttttttgggctgtgcctgtgccccctcacctctctgtcttgcatgtctagctagttctgtttctgcggttttccttctctctgttcctgagcggttgatctcttagtgtttctctgtgttcacaaactcagcctttgacctaggaacctaacagccagagggagcctgaagctttcttgcctgcccttggctccttgtggtccagggagggctgcagtgggtgggaatgcctgacacagggtgactagtstctgtgtttacaccagggggagcaatgactccgtggctgagaggggctggctagagtctggagtttccaaatgtccattcaaggcaaaacacaattcctaggtagttaaatttaggagactctgtattgaatgaccttgaaaataggttcagggcacaacatgggcacaccgctttgtcatattctacaaatactggggagagccaacattcttctcattgccaataattatgctcatcagcctccacrtcttgcctctcacgtttcttccatgtcccagctctgcccaccgtgttaaatcagtgtggatgtagggaacatgaacacattttaatatcagcctaaaccagacatcactgggaaggagattggagaaactaaaaccctagaaaagacaaatctaatctatagtgacagaaagcagactggtggttgcttggggccaaggtagggccagattggctgagatggcacaagaaaactttttgtgatgttgaaagtatgctatgccttgattgtggtgatggtcagacagttatataaagctgtaaacactcactaaaatgtacaatgaaaatgggcataaactatgccttggtttttaaatgtctctgttgtacattcacaccagcctttacctccgttagcacagacaataggaagctgtgtgtgagtcttagaatgctccccaatccagggatggttgttcaaccagcctatgccgtgtatccatagagggcacggataatccaaagcagcagataaaacacctaattagttctaattgactctggactttttctgtgcatttacattccctgagtacaacctgactgacaggagcggggagagtaggcagccaagaaatgtggcaggggaggccagattaaacaattacaagggagggacaacaaaagggtgactgaccacgcagatgataaagaattgttgactttgtaatgagaaccgcacattgcgcaaagcaattggtggggtggagcagatgtgcattagaaacgaaaccaaccacccggaatggtcatggtctctggataacagtagcttcatcaactccgtcttttccacatstctamaattttgatattacttaagtcaggcacactgctctattcattctgacatcygaatatccattttaaagtgggctaggctcacccagaggatgatacaactagattaagaaaatgaaatgaaggatgaaaactcctggttcgtgctttcgccacatccacaggagcaacagactaagacattcctccacacaataacagacccaggcagtgcagagccatgtgtgtcttatctgtcctgttgtccacagtctggttttatcttagacctagcctggtgcaatccatgttgtgtattggcactccacttaagtttcctgtttgtaaaaagcccctttcattcggtgattcctcagggctttaggggaactttctggaaaccaggaagaaggaaataaaggttgttttactgaggatgggtgacgttgggcgcgggacccaaatgagtggtttgagcagaaagtagcctccacgctggactaatgcttggcaacataatgggaaaatttggggaagccgggagaggagggggcagagtttctttcccaaccagccagggggtccaggcagttttggtcctaggacgtctccctgtgcattcccaagtgattgcaaggcttcttcttgtcatcgtctgagacttggattccccaagcgtccttcttttcctggagcctctgagtcctctattcctgaggcctttcttcagccctcccaatagccctgccatgatttcattgcagggctgtgaccatctatgacaagccggcatctttctttaaagagacacctctggacctgctgcaccggctcttcatgaagctgggtggcactcactctcygttcagggcctggtaggcctcccctcctcagctgccttctctcctgctcgccactgccctggcctctccccttctcactgcagacctgggaacccactcatccaggggttggcaaactaaggctacaggccagtctcctgcttttgtaaatcaagtttcactgggacacaacacactcattgccttctgagttgtctacagccgcctttgagctacaatagcagaatcacgttttgcaacagagaacctgtggcctgcaaagcctgaagtatttactctctggccctttaagaaatgtttgtggacccctacgctgtcttactctcctgccagtgggttcccaggcctgtggcagatctgtggacctgtgtgtcccctggggtgtctcacggggctaaagaggggacctttgtgcaggtccacacaccctaaggtgggcccctgggtaagctggggtggtgtgggatggcgtccctgcacgctcatcttgagtccaggggatgacaagacagtaagtcccgtggagaaaaggaatgagtcagtcttgtttgctgttgtaaccttagcacccagcaacaatattagagaaagcaagcccaggcctcggatggcaggggtggcctggtgctgctgatgtggccgggcaccccaacctttgggagcctgcaggccttgccacggcaggagatgcccgtcctgggtcctgggcctgctctgtggcctctcacaggcttttttcctgctctttcagctcagaacctgaggacgcagccatggagcggtcggccttcatggagctggatgctgggagcaggctggtgatgcatctccgcgagtggccagccctgctggtcagcagcacgggctggacaggtctgcacgacccctggaacacttggggttggtgtgacgggcacctggccaacctgtgttctcctcacccctaccagtcctgcatgcccccaccccaccacagtctcaatgagaaggggagggcatgtgagctggaagaggggtgtctagaaacaggcccctgatattcaattctcttctcatagaggatgaagacttctccatcctgctggcagctttagaaagtagatgtgtagctgcggtgaggagctccgggcttgtcgggggccactgagctgtgagctgcttgcctggcctgcagcatgttgctgtccccggccactgggtggggcagcctggggacagcaggggtggtggaggtgggccgccctgaatcctcagttgggtcattgagtgaccaggccctcaggctgaaatgccccctccaggagagtatctcacagaggctggtggcctccccaccagagcagtgctctttctccacctgaccaggtgactctggctactgtttatttaaaacgttttttctgaatgggcatggtggctcacacctgtaatcctagaactctgggagcccgcggcaggcagattacctgaggtcaggagttcgaggccaacatggcaaaacctgtctctactaaaaatacaaaaattagctgggtatggtggtgggcgcctgtaatcccagctacttgggaggctgatgcacgggaattacttgaacccaggaggcagaggttgcagtgagctgagatcacgccactgcattccagcctgggtgacagagcaagagtctgtcagaagaaaaaaaaaaagaaattctatcagaaattccatgtagaattgtttctttttttaaacacagagtttgaacaacttactcttgatggacacaaccttccttctcttgtctgtgtgataacaggtaccgcctaggaccctgggtgtctgtttggttgggggatggtggagggggaggggcacacagcctttaccctgtgcttcccacgatcttgtctccttaatcttcactgcagctctctgctatagggtcttatactgcttgacatgggggaaactgaggctcagagggtttcacaacagggcagggagcccagatttgaatctgtagataccaagctttctactttttcagtagttcccaagcatcttttttgttgttgttgttacgtcattggtgtctttttttctttttttctttttttttgagacagagtctctgtcgcccatgnnnnnnnnnnnnnnnnnnnnnnnnnnnnnnnnnnnnnnnnnnnnnnnnnnnnnnnnnnnnnnnnnnnnnnnnnnnaattctcatgccttagcctcccgagtagctgggagtacaggggcccaccacactcaggtaatttttgtatttttagtagaaacagggtttcaccatgttggccaggctggtcttgaactcctgacctcaggtgatctgcccgccttgggctcccaaaatgctgggattacatacgggaggtgaacctgggaggtggaggttgcagtgagctgagattgtgccactgcactccagcctgggyracagagtgagactctgtctcaaaaggaaacaaaccaaaacaacaacaacaaaaataaattgtggttaagtagaaaaagtgtcaacttacattttcagatgtcccagccaggctrtgtggctgcttggccagcttaagccacttgtgcttggggctgtcgggggtcttatccgattttcactcccctcgggggatgttgcctcactgtgctgggaagatttgtgttcccagggcagagaccagcgctctgactgcacccctcttgcctagcagggtcggtggacctgggtgtctgtctgcacatgtcctccagtggcctggacctgcccatgaaggtggtggacatgttcgggtgctgtttgcctgtgtgtgccgtgaacttcaagtggtaggagcagaacccgaatctttctggggatagcttcacagrtccaccgctgaggaggaaacagtgcagagcgagctgcccacagtgaggccctgcccctcggtcagtccagcacacactggaggccacgaggaggagccctgcggttactgtggctgggctgagcctcactgaagtagttgcttccatttagagctcatgttatatttaggttggtacaaaagtaatcacggtttttgccattaaaggtggcaattacttctgcaccaacctagtatgaaagaaaarcatcccaaatactagaactccactcggggcttttgctcctagagtagaattggcgggaattgcctgcaggcttacatggttttctttgtttctttctctcccaccatgtcccttttggccaagctcacctggtgggtttgaatcagttaaacgattgtcatgctgtggcctcactccacccagcatagatggctgtttggaagggcggcgttagaggagattctagaagcagtagccccagcacaagctgagcccttggcccctgctcaggagctggctcctggatgggattcagggatgtgagcccctcatgtgaactgagctcaggaaatgtcgggatcaaacctggtgccctagaaaagtcatcttttatgtgctgagccagtccccagggtgttgtctttacttgttccatggccatggaattaagaaaaacatgcaaaaataattcttcagtccttgaagagcatccagcacagaaggtacaaaccctccttaaggctccctcctcaaatcagtttgtccattttgatgtgcacccccccaggcctttatacccttcagatgccaagtctaagaaccagctcctggaaaccacaccccctgttccaacccccagactggcttgagcatgcggtggtggggggagcccaggtgggcaccccaggggtctggtgtcttctccaggcagctctcaggctcccttggttctctctgcagtttacatgagctggtgaaacatgaagaaaatggcctggtctttgaggactcagaggaactggcagctctgcaggtagccacatctgccaccacgccagggtggggagggttctggagactggcactgagccacactccctgatccctgcttcccacagccagggtgggaccatgtgggatctggcggaaaagctagggagggagcagaggtcacagaggccggcccactctgctgtcccgtttcggtacagtaggctcgggaaagttaggacacacccccgcctgccctctggatttatggagctgagactccacaaatgatgctggagccaggtgggccgggctgcagtttaggaagtgatcaggatcaggtaggtgggcgggcaaagggagcttctgggaccagccttgaaagatgggtggaattctgcaaaggttacttgtttcttattgctaaaagtaatacatcattcttgccaacagaatgattggcaggattttcagtaaaggtccaggtcagaagtcatttagactgggtcccccagtctctgtcagaaccatggtactctgttgtggtgtgaaagtagccacagatcatctgtagattaaggggtgtggctttgttccaataaaactttatttacaaacacaggctgtgggctggatttggcctgcaggctgtagtttgtgatccttgattcagagagtttagcaaggctgaaaagaacaccgacacccccttgttacccacagatgggtgggacttggccagaggccaagaggagggtgctcgcaggggaacatacagcacgttagaggccgggaggtgctccagggcaccaagtgtgggaaagtgggacatrcggggaagtttccagaaasyrtgatgtcaagttggaggcggagcgctgctggggcgtgaagagtctcgagtccaagtgagagagttaggaacttgggaggggttgttgttgggtcggggacctggggtcagccaggtggtgacctgggatggggtggggacaggcaatgaggtaagctctgctctttatttttttgcagatgcttttctcaaactttcctgatcctgcaggcaagctaaaccagttyyggaagracctgcgggagtygcagcagctccgatgggatgagagctgggtgcagactgtgctccctttggttatggacatacaactcctgggccagaggctaaaaccccgggacccctgctgtccttcccgcagcttcttctcggagtctcagggcaaacccttttgagcagcgcctcccagtggccagaagctgaaatgacggcagtggtgccgcctggtgaatgaattggttctgtgacccgggaagctgtgcttggctctgatttcttttccggaggctcggaaacacttcctctcttcttctgttcttcatgccccatgcccctgctagcgtattactgttctgtgacttccctgtgacctctgcagtactccttatcctgcgtttggtctccaggtgtcacctttctgccgtgttcctaacattttgattcctgtcttgaaaaaagcacctgctgcatcgtaagcccagggatgtggcagctgcagcgggcttggctttgtgaagaactgagtgtgtccgcggatgtggcagctgcagcagtcttggctttgtgaggaaccaagtgtgtccagggatgtggcagctgcagcaggcttggctttgtgrggaaccgagtgtgtccacatacttgatacacacgtttttatttgcacaaagaaaatgctatttttggagccagagttttcatgtctgagtgatggcgatttccttaagaaccagaactgytggcagaaagggagcacccacacgcttagatagccgatgtcttattagagggcagtttgtagttcctgatttggaaattaacattctccaaacattccagtccagtgaaagttttatcmgctttcccatatgaaacctcttcccwtgagagtgacttgattctcacaatcccattggagtcgtgtgtgagtcctacagtgtgaggttcagcattgccatctccaagtgckcttcatagggaaacagtttctggtcatgacgaggttccacttcccatctgatcctggccyggcctggaaacagagcacatgtgtttcaggatggcagtgtttggggacaggacatgagcgtattgtgtggggctgctaggacaggcctggcggggtgggggggcggtgtccaagtcagtttacttggttcacaggttcccaggcccacccaggtgcctagaattggcctccaggatgggaccagaaatctggttttgcatagaaatggctagcagcaggcaccatgccgctgtccactctctacccgcgtctgccccagcacttggcacagcaggacagaagcagagatctgaacccacatctacctggctgctccgtcaacccactcttcacaaagcttagaaagcggccaggcacagtggctcacacctgtaatcccaacactttgggaggccaaggcgggtggatcactttagttcaggagttcgagaccagcctggccaacatggtaaaacccatctctacaaaaatacaaaaactagccaggcacgatggcgggtgcctgtaattccagctacttgggaggctgaggcaggagaattgcctgaacccaggaagcggaggttgcagtgagccgagattgtgccactgcactcgagcctgagtgacagagtgagactccatctcaaaaaaaaaaaatcacacacagacacacacacacacacacacacacacagcttagaaggggctggtgttctcataagcacagatgtctgaagagccgttagccagaatgatccttttttttttttttttttatgagatacgatcttgttttgtcacccaggctggagtgcagtggcacagtcattgctcactacagcctcgactcctgggctctagcaatcctcccacttcctgagtagctgggatgacaggtgtgtgccaccatgctagtaatttttttattttgtagagatgggatcctgaattcatggcctcaagtgatgctcctgcctcagcctcttttattatttttttttagacagagttttactctgttccccaggctggagtgcagtggtgcaatctcagctcactgcaacgcctcccaggtgagtctcctgcctcagtctcccaagtagctgggattataggcgtgcatcaccacgcctggctaatttttgtgtttttagtagagatggggtttcaccgtgttggccaggctggtctagaactcttgaccttaagtgatcccctcacctcagcctcccaaagcctcagcctcttacagtgttgggattacaggcatgagacactgtggcccgggatgattttcagtcacagttttttgttacgagtggaaaatgcgtatttataaaaatgaaatagtacagacatgaacgtgtagaagtctctataatcctgccatccaaggatggcacctgttaacgtgtatatcagggatgtccaatcttttggcctccctgcaccacactggaagaagaagaatcgccttgggccacacataaaatacactaatgctagcaatagctggtgagctaaaagaaaaaaaaatcacaaaaaaacctcatactgttttaagaaagtttacagatttgtgttgggccgcaggttggacaagcctgctctatatatattccaggttttcccctataggtatacttatgtgaaaatgattattgtgataatttttttttgagatgaagtcttgctatgttgctcaagggggccacaaactcctgggcttaagccatcctcccacctcagcctcctgagtagttgggaatataggtactcataaccatgtgtgggtgattattattattttttaaacaaaaatggggctgggtgcagtagctcatgcctgtaatcctaacactttgggaggctgaggcagcagatcgcttgaggtcaagagttcaagaccagcctggccaacatggcgaaacctcgactctacaaaaaatacaaaaattagccaggcgtggtagcacgcacctgtagtcccagctactcaggaggctgagatgggaggatagcttgaacctgggaggtgggaggttgcagtgggccgagatggcaccactgcactccagcctgggcaatacaaagccagactctgtttcaaaaaaaaaaaaaaaaaaaaaaggtgggtgggggcttctactatgtgtgctgcttggcactgtttttttcacttaaaagatattgcaggtattttttcacgtaagtatctgaagaaaaacttcctttttttttttttttttttttttgcctttttgagacagggtcttgctctgttgcccagcctagagtgcagtggtgagatcagggctcactgcagcctccacctcctgggctcaagccatcctcccacctcagcctcccgagtagctgggactacaggtgtgcgcaaccatgcccggctagtttctgtatgttttgtggagatggggtcccactatattgcccaggttggtcttgaactcctggtgtcaagaagtcctcctgccttagcctcctaaactgctgggatgacaggcctgagccccgcgcccggccagcctcctgtgcgaggttgtgagggactctgtcatggaacctagtgtgtcttcgtgtgctggcttgtttgttggctctgtagttaacgggctgccccacgtggacaggcattggacccgtgtctgtgtgtgcaggcagaggctcctgcgcgtgcatctgtgcacatggctgccaggaggggctgtgctcagggggagctggggcaaaggctggtggcaatggggggcttgggtgtagtgtggaggcacgagagccaggtggccgggctgcagtctgtgggagctcgggggttgcttagcctctgtgtgtcctagtgtctttgtcggtgagatgggacaatgatagcacactctcacaggtgctgggggctgacaaatgtcaggtctgaggacagtggctggcccactacggggtcaattccccttctctatagtcaccctgctcgtcttccatcaactgggtgctcaggacagtggcatggtggatccgcccgtacagcctgtgttccagcgtcctgcaggccacagctgtgtccagccctgaccccgactgcccctcccaccacctccattttatagatgaggaaactgaggcccaagggcttagggaaccctgctctgaagcacacagtagggctgctgggctcagatcctccctccctgtgctgagctgccctcctcctgccacaagcccccagccccgggcccaccctgctcaccggcctctgccctagttccccgcatggtgtgggagtgtggggcatcctagcttttccccagcccccagttctttcacttccactggagtcccgcagggacagctcggggaccatgcaggcccgggtgggcatgggggctcacctagctcggtggtgaacagctggcatgtctctgggttgcggacagtaaaggccacatagacctcaggagcccgctggtgctcccggcaggcagccagcctcagcaggaccccgaccagcaacacgatggcttctgggcaatacagcacgtctacggtgaaagtttcaggttactgaaagggaccagcggacagtcccaggtcatgctgacctcagcagcagggcgagccagagaggcagtggtcatatgagactattagatgccatttgaccattttggccattagatggaaaggcaattacttgggtgaaaaaggagaacccttagtagagaaagctgcaaaagaccgaagcaaaagaaaaaaatctccagactcactggtgttccttaaaaaacgagctctggttctcagcctatctagagggctgtgaatgacacaaagcctgaccctgccatgaacttcgtgtttcaggcgtctgccgatttgtctgctggcttgcaggggtgggcctgtgtccctggccaccgctggacctgtggttttcagggctgggacccaggacaacaggcacagctctgttcgaccagagaggagactgagtgtgctggcaggggcgaggggttttcggcggcccagccaaacaccaccttctctcaagggccctgtcctcatcccagaagtggttgttttcctcctgtggtctctgaaagacacaagcatggctctgggacagagccatgtggtgacgactgtaatgggagtatgcctgtctccaacaagagggctgtggcttgaaggtcaccttaagaggcacccctgtcctttgatgtcaccctggaggcccagagtaactcttctggaagttccatcatgtccatgcccgatagcatccattgttcccttttcccagagccaagagctgggtagagctgcaaggacaccgcctgcacagggtgcccggggctgggcattacctgctgcaatgacaacatctggctggatggcagagagctgatggaccgtcgcgatgtcccagtccagctgggccactgtcaccctggggctgtctaagttggcagtgatgtctgcctctaatgagaggccattgagaaggacattccctcggagctgtttgaggacccggctgtgacagtcgctgaagatgtatgcccgggggcggcacatcttgcagatggccagggctgtgaggccagcaccactgccaagctctaggacagtcctggcgggaggaaaggggaccatgtctgcgactgcaccagggtaagcctgcctcggtcccctgccctgcaccccaaggtcacctatgagtgaaggctgccgggttctcgatggcccattctgcaaggtagagggtagcatcccatgtgaccaggcctgtgatgcctgggagatgatggctgtgctctaggagagtgtgactgagcctcctgagggctgcaccaagagagggcgagagagtcattccagcaatcagaaggcaagtggcttagaagacaagtagccatccaccacatggctgaataaaccatgacaggaccaatcgccactcagcaatgagaagcagctaactgttgacatgccaacagcttgtacaggcctcaagggtgtcacgtggcatgaaagacactcacctcaggccacacaggattccattcattgaacattcctgagacaatggaattctggcgatggagcacaggtcagtggtggccaggggccaggtgtggctatgaaggggtggctgccttgtgatgattcaatatgctatgtttttcctttgtggttttctgtatctatgttttatcttattttttttgagctctgttccccaggctggagtcagtggcacaatcttggctcactgcaacctctgcctcctgggttcaagcaattctcctgcctcagccgcccaagtaggtacgactacagacatgtgccaccatgtctggctaatttttctactttttttttagacagagtttcactctctttgcccaggcaggagtgcaatggcgcgatcttggctcactacaacctccacctcccggtttcaagaggttctcctgcctcagcctcccgagtagctgggattacaggcgcccactaccacaccccgctaatttttgtatttttagtaaagacagagtttcaccatgttggccaggctggtctcaaactcctgacctcaggtgatccacccgcctcagcctcccaaagtgctgggattacaggcatgagccatcacgcctgaacctgccaagtattctttgaggactgggcaccaggtccttgtgaagcaggtagagtgtgtcacctattggacaaatgcccaacgaccccatgagacatgctgttgttgttgcagtgcttgatttacagacagggaaactgaggctaaagaaggttgatggacctcatgtctaagactgcagaatgggtgagtcaggatttgaacccacacccacgttttcactttgtctgtgcaggaagggtatctgggctgtgagggggaggagggtacccttctcataccagcaaatagctccagtggccctgagtggactccttggccatcagggtctccaccagcacctcatacagctcgtccaaaggctccgtgtggacagcctcgtgctgggggcagacagagtgagagcttgtttgctttcgttc

SEQ ID NO: 94688 - DNA, 25428 bp, Homo sapiens
  misc_feature (1)...(25428): n = A,T,C or G
caggacatcccacaaacagattttcagcgaattggctttcagcaaactgatcatttggcaaagtggtcattaggcaaatgggtcatttggcgaagaggtcatttagtaaatcggctttcaacgacttcccctatgagatttctctagagtgagcattttcttgggttaaatgtacacttcatttccataattaatactcactagcggctagatgggaacagacaattaaaaaccctctggtttcttaacaggagcggaggtgcagagggcatctgctctgcaaggcgcagtgatcaggctcagcattgtcacaggagctcttgcggttctgtttgttactagtgtgacatacacagcaattcaatggaaaaaggactgagtggtatttgagtctcccgtagttgatcatcatatgtcttgataacccatgacaactccttgccacatgccacgggaggtccagcactccaagagcccagcagccagggccggattcatgggcttgcaacctggacagtcccacagggacacagaagagtccccactgtggtttaataatctgccatcaccatcttgaaattctttattttttaacaagggtggccagggatagtggctcatgcctgtaatcctagcactttgggaggccaaggcaggcagatggcttgagcccaaggagtttgagaccagcctgggccacatagcaagaccccatctctacagaaaatacaaaaattagccaagcgtgtagtcccagctacttggaggctgagatgggaaaattacctgagcccagggaggtcaaggctgcaggagctgagattgtaccactgcactccagcctggatgacacagcgggatcttgtctaaaaaaaatccacaagaccaggcacggtggctcatgcctgtaatcccagcactttgggaggctgaggcaggcggatcacttgaggtcaggattttgagaccagcccggccaacatggtgaaaccccatctctactaaaaatacaaaaattagctggacaaggtggtgcatgcctgtcatcccagctactcaggaggctgaggcaggagaatagcttgaacctgggaggaggaggttgcagagagccgaggtcgtgccattgtactccggcctggggcacaagagtgaaactccaactccaaaaaaaaaaaaaaaaaaaaaaaaccataacaccaccgagggccctgcatgtggctgaaaacaacagaaatgtattgtctcgcaggcctggatgctagaagcccaaaatcaaggtgtcggccgggcttcgcttcctctgaaacatgtaagagagaatacttccttgcctctcctggcttctggtggccgctggcaatgcttggtgttccttgtagatgcatcgctccaatctctcctccctcatcacatggctgccatctccctctgtctctgtcttcacctgacattctcctctcttattttatttttttgagatggagtttccctctgtcacccaggctgaagtgcagtggcacaatcttggctcactgcaacctccgcctcctaggttctggcgattctctcacctcagcctcctgagtagctgagattacaggcgcccgccaccacgcagtgctaattttgtgttgttagtagagatggagtttcaccatgttggccaggctggtctcgaactcctgacctcaagtgatccgcccacctcaccctcccaaaatgtgctgagattacaggcatgagccaccatgcccagccctcattctttccttttacaaggacaccagtcattgcatctgcctccttaccagcagcccccaatccagtatgactcatcattacttgattatatctacaaataccctatttccaaataaggtcacattcctggctacggaggattaagatttccaattttttccctgactcaattgtttttgagtcagggcctcaccctatcccccaggctggagtacagttatgtcattatagctcactgcagcctcaaactcctgggctcaagggatcccctgacctcagccttccaagtggctgagactacaggagcacaccaccatgcccaactatttttttttttttgtacagattaggtctcactctgttgaccaggctgctctcctgacctcaagtgatcctcttgctttggcctcccaaagcactgagattataggcgttatcccgtgcctggccctctttctacacctcaatcattgtatcattagcctgagctgcccatagtccttattctgcccatccctgaccgatctcctcctttaacataacttccatctcaatatcatggggcctgctgggcactgcaaacagcctaaggaaagcagaaactttacttaaccttaaattctattacaaagtccacattgaacgtaatttatatttgaactataaaattttctgtaagttgaaacatgacctataaaggtccctacaccctgaagcaacgttttagaaagaaatcaattggtccttttctgcagaaaccattaaccataggagagataaaggaaaaacttcaatgtactgactgaacttccatgcccatagcttaatttctaaaaggcaaccattccatactgttaaactgccttaggttgttattactgttattaaagagaccctcaaagccagaagttgaatcttgactgtagttcttgcacgtatacgcacactcttgcaactgaaaccattcagattgtcctaatgctcttccccatagtaacaccacctggaattttacgtttggttttaagcatcagtcctaatcttcacttgcacctgaacacactgcacctgtgagagccamgtgacattaaaaaaaatcccttcagtgaggccgggcatggtggctcacgcctgtaatcccagccctttgggaggccaaggcagatggatcatgaggtcaagagattgagacactcctggccaacatggtgaaaccctgtctctactaaaaaatacaaaaattagctgggcgtggtgacgcgtggctgtagtcccagctactcgggaggttgaggcaggagaatcgcttgagcctgggaggcagaagttgcaggagccgagatcatgccactgcactccagcctggcaacagagggagactctctgaaacaaaaaaatcccttcagtgccttgatccttccagattcagatccaagatagatgacatttggccctcatccgagcccgcacaccaaaataaagatttcttctggccgggcgtggtggttcatgcctgtaatcccagcactttgggaggcagaggcgggcggatcacctgaggtcaggtatttgagaccagcctggccaacgtgttcaaaccctgtctccactaaaaatacaaacatggcccggcatggtggctcacgcctgtaatcccactacttgggaggctgaggcaggagaatcgcttgaacccgggaggtggaggttgcagtgagccgagattgygccattgcactccagcctgggcaacaagagagtgaaactctgtctcaaaaaaaaaaaaaaaaaaaaaaaaaaaagaagaaaagatttcttctgtgtgcatggctcagctctgtggtccgctagggtccttcctcaatccgcttccaatctatggaatcaggaaagactgaaccaacctagatttattaatattttagtataacataatacagtgttacttattatagcattgaccgtatatgcccttttgctccttggaggaaaggcaattaatagctattatgtgagttaataaaataagcccaggatttatgagtgtaactaacctgttcccattggttttccttgtctcctgcgggcagagagctgatcaaaacagcaaaagcaaagcagtgcccctggcccagttctgaggccaaccttccttaaccacccagacccatccccggttaggacttgctgtggattctcaggtgactccatctgaggatacagggactgagagggtgtatgcaatatctcagacccagaaactgttgattctgtctaaaaacacagcaataaccacatcccaccctcttgatttagatgaaagtgtttggcggaataaaagatgaacctttttttttctttgtcagatcttgcgctcatttggttctggtggggaacaacagctgtgagagaacaagtgtattcaattagaattaattccccctcttattctcacggctgagcagggctcaagtgcctctcatctgaaagaggtaataagatttaatctgtctcctcatctaccttctgcaagtatacttaacaaattagctctcgggactcttccaaatggagttttatgagggatttgctaaggtaaacgttttagactttgaacacaattcagatttcaggggcagtactgaaatctgaactgtgtcgctaactgccctgcctttcaactcaagacacaataactttgaactaaaataattatatttttgttgttttccactctgtccccacgtctatatcaccaccacccccaatcccgccccccaggagctaactcctccttcctgtccctgcaagatcaaaactcctcctggaagccctgctagctctgtctgctcgccttcgtggcagatattgctattgtactttcatgctcatttgtgtggtaagtacttcaatgtccacttcttccacgagcccctgagcccctggagggcctggaccacacctagtttttctcactgttacacctcccttgccagacacatggtaggcgcttaataagtatttggtgaacggatggcttgtttggtgacagtccaaaggctgggggacagacagaaagctccctcctatcgggccccagacgggtggcgctgatggagaggaggctaggataacgcctccaggaccgaagcgcgcacccgtaaggcccctgccaaaaagaccttcctgaaggcggaggaactgcgagtgcctacgttggcccaaggcctgacactacgatcccggggaccctcgccctaaccggccccacctcccgggccccaaacctggactcggccccgcccgaagctccggatcctggggcccgccgctggccccgcgtcggcagaccgtgggctcgctcytgggcctgcctcaaaccctccgcaggtaacgcctcccgaacttgagccacactccaatcccctcctcaaacccctccccgtttctcacaccctggacccctcgctccgtctcggccccgccccaagcccagctccctctcggcccctgagcccagccccgatccgcctcccagtcccttggtccctgccaacaycggaccctccctaagctccgcctcccagggcccgcctcctgagcgcagcccgcagcctagactcggccccgcctcccggaccctgggcccctccccacgtcggcctgtcctaagatccgcctcccagagttcgagcagtgcctggcaacgtgctacgacatagtcaacgccccgccctggccccgcctcctgagcccttctctgggtctggccttagccccgccctaagacctgtctcctgggctctgctccgactctcgcctcctgaacccaatcatcgtttacccccaccctaacgcccgcctccaggactcttatcctgcccccacgcaaggccccgcctccaggacgcctccaacctggacgcttccgaagccccgcttccaggatcgccctgtcctggccccgccccaggacccgccaacctgaactctccccaggacctgccccaacgacgcttatcctggccctaccccaggcctcgccctcatgacgctcatcctggccccaccccaagcccccgcctcataacgctcatcctggccccgccctagagccgcccccacgactctcctcctgaccctacccscaggccccgccccctctctgcccccgcgcactgccctgggcccgccccgtcttcagtccaggcccggcttccgcacggtctcccggcaacactgcggccccgcccacgtcatggcgcccgaggagaacgctgggacctaactcttgctgcagagtttgsagcgccgctttctggcggcgcgcgcrctgcgctccttcccctggcaggtgggcggcggggcgagcggagaggcccgcagggctcgcgggagtccaggggcagacgggatgggtctccgtgcagaagcccccgacacgcccgccacgtgagtgcctgggctcccgccrgtcaggtccgcgcgacccggtccccatccctggggmctggccagagtcgctcacacycttcctgccccgcgggctggcggcataagctgggggcctctccaccgtcttagggggcagaggcgcactcgttgtgggatacagttcacgatcattttcacgactttttaaaggcagtaatcgttctggtcactgggacacagctgccctcgcccattctaaaaagtcagcgccctcaggaccgcgggtaaccacgtcctcctgagcgcggtgaccaggtcacaggctgtcccctcgtgcctcagtgttctcatctgtatgttgagaactgcacagaatcggctcatgctctgaggctctcacacctgtgatggaagagacagagaagggggtggcctctcgtctccctggggacctaccattctcagcacaggcacrtggcaggcagcagcctcccttctgccagtagaggggcttaatgcacccggccccatttgyaattcatgtgcrgtgagctcactgggatgagtcagtttggatatatattcctccctggaattttatggggtgttgcttaatcatttgcgttattccattgatatgaaatatttagcactcagagatcatttctggtcaggagaaatttgtgcatttttaacccaaaatagaaaccttcataaaagcatcataggtctccattcaatattggctataattgttcacatgcccacgctgaatgctaacttgggctcaccctcaacacccaygaggtgggtactattattatcactcacatttgaccagagggattgtttgattagggtgcagtagttgagagttcagacccaggagacagcctgcctgcttcaaatcctgtcccaacccctggccctgtgtgaccttgggcaagtgactrcatctctctgtgctgttgttttcttattaataaaatgggggatataatgatacctacctcttagggttgttgtcagggttgagtacaaaagcctgtggatcagtgcctggctcatgrtaaatgcatgtcggtgttagctagtgtttttattcagtctcaaaatgtttaataaatgccttccgtgagccaggcaccatggatcagcagtacccatgacagatgaggctctgcttgcatgggagagccagagaataaacaaataaataaakaaacaagaaaagaccagatgagagtggctttaaagccaataaaacagggaaatggtgaatggagcaactgggragaaaagtcaccaaagtcggggaatcagggaagccttccccwaagaggtggcttttgaactggggccygagtggtgaagcagccagccatgggaagggcttggggaacaggatatgcaaaggccctgtggtggaaacaagccagctgtggttgaggaacaacagcaaggcagccagtgtggctggagtggagtgagcagtgtgggccaggggtgagggagaacaggccagagagagggattaggaccaggtcttgtaaggccttttacagcatggaaggagctctgaagcaatgaagtgccttgccctgtgtcacataccagctgagacagtctgcctaactcgggarccaaagtttgctgctgggcttgaggcccctgtgagaggacaatgtaacccaggctggtatgggcacattctgcatttccacttaaactcagatggcaagcccatcaaaccttggtgccatggctgccctgktaattcctggctgaccagtgcaaccagggagctggcccatgacccaggtggccgctaagtagccaggactaatgtggccaagagtcagtcttctagccttcttcctgtgactcatccaggtgcaccctgtgacatctgaaggtcaggctttcagctgctgtggcttccacttccaactggctccacgtccccagggagagatcacacagcgctttgccaacacattctattgcgtgtttaatgttcctgtgaatgcgcccttgagatttctctctctcccgtccacacagagcttagaagcaaaattaacagactcatcagattctgagcttctgcgggatattttgcagaaggtaagaatcccagagtccctgggactcatgaccctgtctcctgaatctctccggaagacctgagagaagaaccacaggtgtgcttgtaccctttaaaaacacccctgttcaaagaacattgaacattgagtcagcactgcaggtgggtgttggcacctctgacagctccagctctttcattttctatstaagacttagacaaagacatcagaatatacaaaaatctgcatgagagggggaaatctaaggaaagttttttaaaccatccacagcaaaaacagagatgacaggtgcaaaacagcttctagcatttggtagatgctcagagactttcttttttgcattcatgaggcctgtcctgcccactcctgtctcttctagacctaaatgggcccttactttgcccagggtggggtttggactcaagagcatctgcatgcaggtgagaggcaggatcaccaccaggcccagccacagcctgaccttggccttgagggccaagtgcagatcaccctgcatcctgggtcttcacctgtgaagggccatgagcccttctgaaaagacaaagcagtagactccgtcccagaaagaagtgcaccagaagaatacattttccatacaaactctggaggcagacattctccacccccacccaaccagcccatcctaggagccccagtgaagaattcctgtgctagaggtgaaccaagattatccatgtggaaaagatgcagccacagcagggaagactttcggggcaatacagtaggtcagggcttcgagcatggagatacctgaagttatctcgcaccctgctctgagttgcacccttagcctcactcttgtaggtggtkaagcatgaaatgtagggatagctgctttcaaacccagcacaaggctgggtgcactggctcacacctgtaatcccaggactttgggaagctgaggtggacggatcacctgaggtcaggacttcaagaccggcctagccaacatggcaaaaacccatctctactaaaaatacaaaaattagctgggcgtggtggtgcacgcctatattcccagctacttgggaggctgaggcaggagaatcgcttgaacccaggaggcagaggctgcggtgagccttgatcaggccactgcactccagcctgggcaacagagcgagactctgtgtcagaaaaaatgaaaaaccagcaccagcctgaagagcctgtgtattgtgtggggtactttgctgcccttgggcagaatctgcatccctcccggccagcaggcactgcggactgtctcctccctctccctccaggctcctgttttcccaccgtccccactcctgctgcaccagtccctctgccctcctttccaagtgccagcccgtggccacctcagagcttgcaccagctgttgccactgcctggaacttgctcatcctgcacttggcttctcttggctttagctggagtgtcaccctgagcgtcccctcccctccatcctgtccccagggacacacactcccagagagcagttgccgagtgggccttcccgcctcttccatagagccagacagttggcgactgtccttactgcaagccctggttcacactggctcccctgggagggaggtggtttgggcccacgtgccctgtgttcccgctcagaatgggcattagaaatgctgccacagcctgtgccactgcagtggaagcatttttaggaaacgggttatatcttcagacaaacttcagatgcatggggccagaatgctgtgtccatctacatacatctttgctgagagatggggtagcctggagtttgccctctgttgtgttggcttgaagctcataggagacttaagacgggctctcgagcaaccaaygttctgtcctttgctgtagactgtgaagcatcctgtgtgtgtgacgcacccgccgtcagtcaagtatgcccggtgctttctctcagaactcatcaaaaaggtcagttatgggcagtgtctgcccagtagccagacagcatagccacctgcgtgctagagcccccatccttcccaggccctgggcctgctttgcaaaccccagcatggcaggggcctccccaggcgactggctgcagmcacgtgtgacccatgggagacagtgyagggcgggaagaaggggaggtcagcgtctctccctcactctgcctcctggggtttccgcagcagctgcttctctggggccccagctcccagcatatggattctcattcctaccaggctggcccagcccacagcactggaaccctcacccacaccctctgtcctgcccgccgaagggtttggagtttcctgctcttgtctgtctctgggttgccccatgggcccctcttggaaggtttagctcttgccatacctttggaactagttcctctggtgaattctctgcattgatcctgctagaatgagctctttcctgactgatacaggatggattttattttttacttctttatttttttgagacagtctcactgtgttgcccaggctggattaccgtagcacagtctcggctccctgaaacctctgcctcctgggttcaagcaactgtcgtgcctagcctcctaagaagctgggactacaggcacatgccaccatgcctggctaatttttgtatttttagtagagacagagtttcaccattttggccaggctggtctcgaactcctgacctcaggtggtccgcctgcctcggcctcccattgtgctgggattacaggcatgagccaccgcacctggcctagggtggattttaaagatgggcccaaacatgcagggttcgacataaggatgtcgagaggccgttcctcagtaggcagtagcagacctgctgagtgaaagggccacacttttagcaaataaacaatcccctgcttctccaatacctgctttctccctagtcctccccaaaagggtgcatctgtggtcaccagcaggtctgccctgtgccaccaggagagggcagcagtcacccagtataccctgctgctgccctgtgaattttaggatggggccagccctggagaagcagcctgctgacagccayagcctgcagcatgggccgccctcacagttctgcctgggctcacttaaaagcaccttttgttttcctgctctctgtcatggtcatgtggcagctctcacggaatccttgtctcctgccctaractacacctaactctaccctctcaacacctctcattgaaggccctcccatccaggtttccctaccaagtgaattttttttttagagacaaggtctcttgcccaggctgtcctcgaactcctgggctcaagcagtcctcccatgtcagcctctagagtagctgggactattcggcacacaccaccacgcccaacgaagtgaatattttatatgccagctggccggtattacaccattccatcccaaatctcccctccaaacttggtgaaaatcatctggccatttttacagattagaacgaaagcaaacaagctctcactctgtctgcccccagcacgaggctgtccacacggagcctttggacragctgtatgaggtgctggtrgagaccctgatggccaaggagtccactcagggccackggagctatttgctggtatgagaagggtaccctcctccccctcacagcccagatacccttcctgcacagacaaagtgaaaacgtgggtgtgggttcaaatcctgactcacccattctgcagtcttagacatgaggtccatcaaccttctttagcctcagtttccctgtctgtaaatcaagcactgcaacaacaacagcatgtctcatggggtcgttgggcatttgtccaataggtgacacactctacctgcttcacaaggacctggtgcccagtcctcaaagaatacttggcaggttcaggcgtgatggctcatgcctgtaatcccagcactttgggaggctgaggcgggtggatcacctgaggtcaggagtttgagaccagcctggccaacatggtgaaactctgtctttactaaaaatacaaaaattagcggggtgtggtagtgggcgcctgtaatcccagctactcgggaggctgaggcaggagaacctcttgaaacygggaggtggaggttgtagtgagccaagatcgcgccattgcactcctgcctgggcaaagagagtgaaactctgtctaaaaaaaaagtagaaaaattagccagacatggtggcacatgtctgtagtcgtacctacttgggcggctgaggcaggagaattgcttgaacccaggaggcagaggttgcagtgagccaagattgtgccactgrctccagcctggggaacagagctcaaaaaaaataagataaaacatagatacagaaaaccacaaaggaaaaacatagcatattgaatcawcacaaggcagccaccccttcatagccacacctggcccctggccaccrctgacctgtgctccatcgccagaattccattgtctcaggaatgttcaatgaatggaatcctgtgtggcctgaggtgagtgtctttcatgccacrtgacacccttgaggcctgtrcaagctgttggcatgtcaacagttagctgcttctcattgctgagtggcgattggtcctgtcatggtttattcagccatgtggtggatggctacttgtcttctaagccacttgccttctgattgctggaatgactctctcgccctctcttggtgcagccctcaggaggctcagtcacactctcckagagcacagccatcatctcccasgcatcacaggcctggtcacatgggatgctrccctctaccttgcagaatgggccatcgagaacccggcagccttcactcataggtgaccttggggtgcagggcaggggaccgaggcaggcttaccctggtgcagtcgcagacatggtcccctttcctcccgccaggactgtcctagagcttggcagtggtgctggcctcacagccctggccatctgcaagatgtgccgcccccgggcatacatcttcagcgactgtcacagccgggtcctcaaacagctccgagggaatgtccttctcaatggcctctcattagaggcagacatcactgccaacttagacagccccagrgtgacagtggcccagctggactgggacrtcgcgayggtccatcagctctctgccatccagccagatgttgtcattgcagcaggtaatgcccagccccgggcaccctgtgcaggcggtgtccttgcagctctacccagctcttggctctgggaaaagggaacaatggatgctatcgggcatggacatgatggaacttccagaagagttactctgggcctccagggtgacatcaaaggacaggggtgcctcttaaggtgaccttcaagccacagccctcttgttggagacaggcatactcccrttacagtcgtcaccacatggctctgtcccagagccatgcttgtgtctttcagagaccacaggaggaaaacaaccacttctgggatgaggacagggcccttgagagaaggtggtgtttggctgggccrccraaaacccctcgcccctgccagcacactcagtctcctctctggtcgaacagagctgtgcctgttgtcctgggtcccagccctgaaaaccacaggtccagcggtggccagggacacaggcccacccctgcaagccagcagacaaatcggcagacgcctgaaacacgaagttcatggcagggtcaggctttgtgtcattcacagccctctagataggctgagaaccagagctsgttttttaaggaacaccagtgagtctggagatttttttcttttgcttcggtcttttgcagctttctctactaagggttctcctttttcacccaagtaattgcctttccatctaatggccaaaatggtcaaatggcatctaatagtctcatatgaccactgcctctctggctcgccctgctgctgaggtcagcatgacctgggactgtccgctggtccctttcagtaacctgaaactttcaccgtagacgtgctgtattgcccagaagccatcgtgttgctggtcggggtcctgctgaggctggctgcctgccgggagcaccagcgggctcctgaggtctatgtggcctttactgtccgcaacccagagacatgccagctgttcaccaccgagctaggtgagcccccatgcccacccgggcctgcatggtccccgagctgtccctgcgggactccagtggaagtgaaagaactgggggctggggaaaagctaggatgccccacactcccacaccatgcggggaactagggcagaggccggtgagcagggtgggcccggggctgggggcttgtggcaggaggagggcagctcagcacagggagggaggatctgagcccagcagccctactgtgtgcttcagagcagggttccctaagcccttgggcctcagtttcctcatctataaaatggaggtggtgggaggggcagtcggggtcagggctggacacagctgtggcctgcaggacgctggaacacaggctgtacgggcggatccaccatgccactgtcctgagcacccagttgatggaagacgagcagggtgactatagagaaggggaattgaccccgtagtgggccagccactgtcctcagacctgacatttgtcagcccccagcacctgtgagagtgtgctatcattgtcccatctcaccgacaaagacactaggacacacagaggctaagcaacccccgagctcccacagactgcagcccggccacctggctctcgtgcctccacactacacccaagccccccattgccaccagcctttgccccagctccccctgagcacagcccctcctggcagccatgtgcacagatgcacrcgcaggagcctctgcctgcacacacagacacgggtccaatgcctgtccacgtggggcagccygttaactacagagccaacaaacaagccagcacacgaagacacactaggttccatgacagagtccctcacaacctcgcacaggaggctggccgggcgcggggctcaggcctgtcatcccagcagtttaggaggctaaggcaggaggacttcttgacaccaggagttcaagaccaacctgggcaatatagtgggaccccatctccacaaaacatacagaaactagccgggcatggttgcgcacacctgtagtcccagctactcgggaggctgaggtgggaggatggcttgagcccaggaggtggaggctgcagtgagccctgatctcaccactgcactctaggctgggcaacagagcaagaccctgtctcaaaaaggcaaaaaaaaaaaaaaaaaaaaaaaggaagtttttcttcagatacttacgtgaaaaaatacctgcaatatcttttaagtgaaaaaaacagtgccaagcagcacacatagtagaagcccccacccaccttttttttttttttttttttttgaaacagagtctggctttgtattgcccaggctggagtgcagtggtgccatctcggcccactgcaacctcccacctcccaggttcaagctatcctcccatctcagcctcctgagtagctgggactacaggtgcgtgctaccacgcctggctaatttttgtattttttgtagagtcgaggtttcgccatgttggccaggctggtcttgaactcttgacctcaagcgatctgctgcctcagcctcccaaagtgttaggattacaggcatgagctactgcayccagccccatttttgtttaaaaaataataataatcacccacacatggttatgagtacctatattcccaactactcaggaggctgaggygggaggatggcttaagcccaggagtttgtggcccccttgagcaacatagcaagacttcatctcaaaaaaaaattatcacaataatcattttcacataagtatacctataggggaaaacctggaatatatatagagcaggcttgtccaacctgcggcccaacacaaatctgtaaactttcttaaaacagtatgaggtttttttgtgatttttttttcttttagctcaccagctattgctagcattagtgtattttatgtgtggcccaaggcgattcttcttcttccagtgtggtgcagggaggccaaaagattggacatccctgatatacacgttaacaggtgccatccttggatggcaggattatagagacttctacacgttcatgtctgtactatttcatttttataaatacgcattttccactcgtaacaaaaaactgtgactgaaaatcatcccgggccacagtgtctcatgcctgtaatcccaacactgtaagaggctgaggctttgggaggctgaggtgaggggatcacttaaggtcaagagttctagaccagcctggccaacacggtgaaaccccatctctactaaaaacacaaaaattagccaggcgtggtgatgcacgcctataatcccagctacttgggagactgaggcaggagactcacctgggaggcgttgcagtgagctgagattgcaccactgcactccagcctggggaacagagtaaaactctgtctaaaaaaaaataataaaagaggctgaggcaggagcatcacttgaggccatgaattcaggatcccatctctacaaaataaaaaaattactagcatggtggcacacacctgtcatcccagctactcaggaagtgggaggattgctagagcccaggagtcgaggctgtagtgagcaatgactgtgccactgcactccagcctgggtgacaaaacaagatcgtatctcataaaaaaaaaaaaaaaaaaggatcattctggctaacggctcttcagacatctgtgcttatgagaacaccagccccttctaagctgtgtgtgtgtgtgtgtgtgtgtgtgtctgtgtgtgattttttttttttgagatggagtctcactctgtcactcaggctcgagtgcagtggcacaatctcggctcactgcaacctccgcttcctgggttcaggcaattctcctgcctcagcctcccaagtagctggaattacaggcacccgccatcgtgcctrgctartttttgtatttttgtagagatgggttttaccatgttggccaggctggtctcgaactcctgaactaaagtgatccacccgccttggcctcccaaastgttgggattacaggtgtgagccactgtgcctggccgctttctaagctttgtgaagagtgggttgacggagcagccaggtagatgtgggttcagatctctgcttctgtcctgctgtgccaagtgctggggcagacgcgggtagagagtggacagcggcatggtgccygctgctagccatttctatgcaaaaccagatttctggtcccatcctggaggccaattctaggcacctgggtgggcctgggaacctgtgaaccaagtaaactgacttggacaccgcccccccaccccgccaggcctgtcctagcagccccacacaatacgctcatgtcctgtccccaaacactgccatcctgaaacacatgtgctctgtttccaggccrggccaggatcagatgggaagtggaacctcgtcatgaccagaaactgtttccctatgaagmgcacttggagatggcaatgctgaacctcacactgtaggactcacacacgactccaatgggattgtgagaatcaagtcactctcawgggaagaggtttcatatgggaaagckgataaaactttcactggactggaatgtttggagaatgttaatttccaaatcaggaactacaaactgccctctaataagacatcggctatctaagcgtgtgggtgctccctttctgccarcagttctggttcttaaggaaatcgccatcactcagacatgaaaactctggctccaaaaatagcattttctttgtgcaaataaaaacgtgtgtatcaagtatgtggacacactcggttccycacaaagccaagcctgctgcagctgccacatccctggacacacttggttcctcacaaagccaagactgctgcagctgccacatccgcggacacactcagttcttcacaaagccaagcccgctgcagctgccacatccctgggcttacgatgcagcaggtgcttttttcaagacaggaatcaaaatgttaggaacacggcagaaaggtgacacctggagaccaaacgcaggataaggagtactgcagaggtcacagggaagtcacagaacagtaatacgctagcaggggcatggggcatgaagaacagaagaagagaggaagtgtttccgagcctccggaaaagaaatcagagccaagcacagcttcccgggtcacagaaccaattcattcaccaggcggcaccactgccgtcatttcagcttctggccactgggaggcgctgctcaaaagggtttgccctgagactccgagaagaagctgcgggaaggacagcaggggtcccggggttttagcctctggcccaggagttgtatgtccataaccaaagggagcacagtctgcacccagctctcatcccatcggagctgctgcractcccgcaggtycttccrraactggtttagcttgcctgcaggatcaggaaagtttgagaaaagcatctgcaaaaaaataaagagcagagcttacctcattgcctgtccccaccccatcccaggtcaccacctggctgaccccaggtccccgacccaacaacaacccctcccaagttcctaactctctcacttggactcgagactcttcacgccccagcagcgctccgcctccaacttgacatcayrstttctggaaacttccccgyatgtcccactttcccacacttggtgccctggagcacctcccggcctctaacgtgctgtatgttcccctgcgagcaccctcctcttggcctctggccaagtcccacccatctgtgggtaacaagggggtgtcggtgttcttttcagccttgctaaactctctgaatcaaggatcacaaactacagcctgcaggccaaatccagcccacagcctgtgtttgtaaataaagttttattggaacaaagccacaccccttaatctacagatgatctgtggctactttcacaccacaacagagtaccatggttctgacagagactgggggacccagtctaaatgacttctgacctggacctttactgaaaatcctgccaatcattctgttggcaagaatgatgtattacttttagcaataagaaacaagtaacctttgcagaattccacccatctttcaaggctggtcccagaagctccctttgcccgcccacctacctgatcctgatcacttcctaaactgcagcccggcccacctggctccagcatcatttgtggagtctcagctccataaatccagagggcaggcgggggtgtgtcctaactttcccgagcctactgtaccgaaacgggacagcagagtgggccggcctctgtgacctctgctccctccctagcttttccgccagatcccacatggtcccaccctggctgtgggaagcagggatcagggagtgtggctcagtgccagtctccagaaccctccccaccctggcgtggtggcagatgtggctacctgcagagctgccagttcctctgagtcctcaaagaccaggccattttcttcatgtttcaccagctcatgtaaactgcagagagaaccaagggagcctgagagctgcctggagaagacaccagacccctggggtgcccacctgggctccccccaccaccgcatgctcaagccagtctgggggttggaacagggggtgtggtttccaggagctggttcttagacttggcatctgaagggtataaaggcctgggggggtgcacatcaaaatggacaaactgatttgaggagggagccttaaggagggtttgtaccttctgtgctggatgctcttcaaggactgaagaattatttttgcatgtttttcttaattccatggccatggaacaagtaaagacaacaccctggggactggctcagcacataaaagatgacttttctagggcaccaggtttgatcccgacatttcctgagctcagttcacatgaggggctcacatccctgaatcccatccaggagccagctcctgagcaggggccaagggctcagcttgtgctggggctactgcttctagaatctcctctaacgccgcccttccaaacagccatctatgctgggtggagtgaggccacagcatgacaatcgtttaactgattcaaacccaccaggtgagcttggccaaaagggacatggtgggagagaaagaaacaaagaaaaccatgtaagcctgcaggcaattcccgccaattctactctaggagcaaaagccccgagtggagttctagtatttgggatgcttttctttcatactaggttggtgcagaagtaattgccacctttaatggcaaaaaccgtgattacttttgtaccaacctaaatataacatgagctctaaatggaagcaactacttcagtgaggctcagcccagccacagtaaccgcagggctcctcctcgtggcctccagtgtgtgctggactgaccgaggggcagggcctcactgtgggcagctcgctctgcactgtttcctcctcagcggtggatctgtgaagctatccccagaaagattcgggttctgctcctaccacttgaagttcacggcacacacaggcaaacagcacccgaacatgtccaccaccttcatgggcaggtccaggccactggaggacatgtgcagacagacacccaggtccaccgaccctgctaggcaagaggggtgcagtcagagcgctggtctctgccctgggaacacaaatcttcccagcacagtgaggcaacatcccccgaggggagtgaaaatcggataagacccccgacagccccaagcacaagtggcttaagctggccaagcagccacacagcctggctgggacatctgaaaatgtaagttgacactttttctacttaaccacaatttatttttgttgttgttgttttggtttgtttccttttgagacagagtctcactctgtcgcccaggctggagtgcagtggcacaatctcagctcactgcaacctccacctcccaggttcacctcccgtatgtaatcccagcattttgggagcccaaggcgggcagatcacctgaggtcaggagttcaagaccagcctggccaacatggtgaaaccctgtttctactaaaaatacaaaaattacctgagtgtggtgggcccctgtactcccagctactcgggaggctaaggcatgagaattnnnnnnnnnnnnnnnnnnnnnnnnnnnnnnnnnnnnnnnnnnnnnnnnnnnnnnnnnnnnnnnnnnnnnnnnnnncatgggcgacagagactctgtctcaaaaaaaaagaaaaaaagaaaaaaagacaccaatgacgtaacaacaacaacaaaaaagatgcttgggaactactgaaaaagtagaaagcttggtatctacagattcaaatctgggctccctgccctgttgtgaaaccctctgagcctcagtttcccccatgtcaagcagtataagaccctatagcagagagctgcagtgaagattaaggagacaagatcgtgggaagcacagggtaaaggctgtgtgcccctccccctccaccatcccccaaccaaacagacacccagggtcctaggcggtacctgttatcacacagacaagagaaggaaggttgtgtccatcaagagtaagttgttcaaactctgtgtttaaaaaaagaaacaattctacatggaatttctgatagaatttctttttttttttcttctgacagactcttgctctgtcacccaggctggaatgcagtggcgtgatctcagctcactgcaacctctgcctcctgggttcaagtaattcccgtgcatcagcctcccaagtagctgggattacaggcgcccaccaccatacccagctaatttttgtatttttagtagagacaggttttgccatgttggcctcgaactcctgacctcaggtaatctgcctgccgcgggctcccagagttctaggattacaggtgtgagccaccatgcccattcagaaaaaacgttttaaataaacagtagccagagtcacctggtcaggtggagaaagagcactgctctggtggggaggccaccagcctctgtgagatactctcctggagggggcatttcagcctgagggcctggtcactcaatgacccaactgaggattcagggcggcccacctccaccacccctgctgtccccaggctgccccacccagtggccggggacagcaacatgctgcaggccaggcaagcagctcacagctcagtggcccccgacaagcccggagctcctcaccgcagctacacatctactttctaaagctgccagcaggatggagaagtcttcatcctctatgagaagagaattgaatatcaggggcctgtttctagacacccctcttccagctcacatgccctccccttctcattgagactgtggtggggtgggggcatgcaggactggtaggggtgaggagaacacaggttggccaggtgcccgtcacaccaaccccaagtgttccaggggtcgtgcagacctgtccagcccgtgctgctgaccagcagggctggccactcgcggagatgcatcaccagcctgctcccagcatccagctccatgaaggccgaccgctccatggctgcgtcctcaggttctgagctgaaagagcaggaaaaaagcctgtgagaggccacagagcaggcccaggacccaggacgggcatctcctgccgtggcaaggcctgcaggctcccaaaggttggggtgcccggccacatcagcagcaccaggccacccctgccatccgaggcctgggcttgctttctctaatattgttgctgggtgctaaggttacaacagcaaacaagactgactcattccttttctccacgggacttactgtcttgtcatcccctggactcaagatgagcgtgcagggacgccatcccacaccaccccagcttacccaggggcccaccttagggtgtgtggacctgcacaaaggtcccctctttagccccgtgagacaccccaggggacacacaggtccacagatctgccacaggcctgggaacccactggcaggagagtaagacagcgtaggggtccacaaacatttcttaaagggccagagagtaaatacttcaggctttgcaggccacaggttctctgttgcaaaacgtgattctgctattgtagctcaaaggcggctgtagacaactcagaaggcaatgagtgtgttgtgtcccagtgaaacttgatttacaaaagcaggagactggcctgtagccttagtttgccaacccctggatgagtgggttcccaggtctgcagtgagaaggggagaggccagggcagtggcgagcaggagagaaggcagctgaggaggggaggcctaccaggccctgaacggagagtgagtgccacccagcttcatgaagagccggtgcagcaggtccagaggtgtctctttaaagaaagatgccggcttgtcatagatggtcacagccctgcaatgaaatcatggcagggctattgggagggctgaagaaaggcctcaggaatagaggactcagaggctccaggaaaagaaggacgcttggggaatccaagtctcagacgatgacaagaagaagccttgcaatcacttgggaatgcacagggagacgtcctaggaccaaaactgcctggaccccctggctggttgggaaagaaactctgccccctcctctcccggcttccccaaattttcccattatgttgccaagcattagtccagcgtggaggctactttctgctcaaaccactcatttgggtcccgcgcccaacgtcacccatcctcagtaaaacaacctttatttccttcttcctggtttccagaaagttcccctaaagccctgaggaatcaccgaatgaaaggggctttttacaaacaggaaacttaagtggagtgccaatacacaacatggattgcaccaggctaggtctaagataaaaccagactgtggacaacaggacagataagacacacatggctctgcactgcctgggtctgttattgtgtggaggaatgtcttagtctgttgctcctgtggatgtggcgaaagcacgaaccaggagttttcatccttcatttcattttcttaatctagttgtatcatcctctgggtgagcctagcccactttaaaatggatattcagatgtcagaatgaatagagcagtgtgcctgacttaagtaatatcaaaattttagacatgtggaaaagacggagttgatgaagctactgttatccagagaccatgaccattccgggtggttggtttcgtttctaatgcacatctgctccaccccaccaattgctttgcgcaatgtgcggttctcattacaaagtcaacaattctttatcatctgcgtggtcagtcacccttttgttgtccctcccttgtaattgtttaatctggcctcccctgccacatttcttggctgcctactctccccgctcctgtcagtcaggttgtactcagggaatgtaaatgcacagaaaaagtccagagtcaattagaactaattaggtgttttatctgctgctttggattatccgtgccctctatggatacacggcataggctggttgaacaaccatccctggattggggagcattctaagactcacacacagcttcctattgtctgtgctaacggaggtaaaggctggtgtgaatgtacaacagagacatttaaaaaccaaggcatagtttatgcccattttcattgtacattttagtgagtgtttacagctttatataactgtctgaccatcaccacaatcaaggcatagcatactttcaacatcacaaaaagttttcttgtgccatctcagccaatctggccctaccttggccccaagcaaccaccagtctgctttctgtcactatagattagatttgtcttttctagggtttta

SEQ ID NO: 94689 - DNA, 47448 bp, Homo sapiens
  misc_feature (1)...(47448): n = A,T,C or G
agcacataataggggtcaataaatagtaaaggagcaattcttctcaccacctgatacgtgtttgtgctctccagtatctactccttcagtgcacattcactgagaccccactgcatgctgggcctgttccagaaaccaaggcacaccaaggggagaagcaggcagaaatctccattctgatgggctgacagcctagtaggaaagaaagagaaaaaaataaggaaacaatacacaggcaggtgatgacatgtaccatgaaggaagacaaagtcaggacgtttctgagaatgcctgaaggcatttagagaacaactaacacaatgggcagagtgttccagatggagagaatgccaagcgcaaaggccctggggccacgatggactccatgtttgagtgtttagtctggattcctggttttaagtctgtattcagcctttatttctaatccttcatgtttcatcttacctaattaacccaagtcccagtaatgctgagagatgacactggcttgacccaatgtagtatcagaggaggggcctaaaagtggtcattctcaatataactaacttgaaggcagagagcactggacttgctgctcaattggatgttgactaggagaataagaggggacacaagtgaccgcatatgttcggtctgaacaagtggaataagagtcgccattaactaaataaagaacacttgtgggaaaacaggactgggtgggatggggaactcagatttgcatatgccacttttagatgcctattagatctctatatggagcttttgagtacaaagacagatataaaaactagagttgaggggaaaatctgcgctgcaagagaaatatgagccatcaggatattgatggtagttaaagtcaggacactaaattaggtcatccacgggatggttgtagaggaaaagaaatgtccacattctgagccatagacaactccaactgtgctagtgaaaaacatggccagtgtttagcagttgaggagccaagaaggaaccagcaatggacacagaagtatcagccagtgaagtatttagaacattcagagtatagtgagaattgtgattcagaaaccagagaacaaagtgtgtcaacagggtggaaggatgaacggtgtcagatgccaaagatgggccaagtaggatgaggtctgagaacagatcacatgatttgacaacagagaggtcactactgacttccatggccattagggacaaacgcctgaatggtaagggctcaagatccattagagagaacagttaatgatgcagagaaaggaaattacccttcagtaagtgagaaggtctggggtctaatgagaggttggttttgccaggagcagacagttcatagtaacagaatgtagataatgtgggcacatatgcagggggagggggtaactgtgcctgtgaagttctcatctgactgcatggattttcccagtggaatgggaagcaaagctgacagctgagagaaagggcagggcaggacaggtggtgccagaggtttaaagatggaaacagatctgaaagatttgtgttctttcttcgccatgctgctgggaggcaggagatcccaggatagagcaccacactgccccaggtcctgggtaaaagggtttcccatatgttaaagacatagctctgcatttcctagcagggcaagctgcttttagtctgagtcttagcttctgcatctgtaaagttgcttgctataaagggatcagcctgacaacctcagaggaatgttccaaagagaagccagggaataacttctgtgatacaggatcagccaacattcagccaagctgaaaacaaggcacccctaggaagggggaaacgctactgtgtttactcctattttgtagatgagcacactgaggaacagggaggaaaagtgacttgctcaaggtcacaagatcttcttgagcctgcactgtccatgtcctctgctgcacagtaccttccaatctccatgcactacatatctcactgggctctacaacatcttcaagtgagacaaatcactagctccattttaaagctgaatgaattgaacccaaggctaagcctttcacctctaagaggatggtgtgtttaataacctagctgttactattggctgggttgtgagacctgtggaagtcaccctgcagctagatttctgcggaacctcaaaggcgggggtagggctagggctcagctggcaaggaagcccacaggccactagagggtgacatgggagcggcatggcctgagatgtttaagaatcagagaggaagccttgcacattttggtgtcaaaacaccggagtcgagggtcactcagtaatcactcacctgggttttcccaaattgtcctgatacgaacgcttgtcaaaaccgtttctgcccaggcactccctttcctagcccctgcccccaaattaagttcttcccaagggaatgtaagtggaaggaatccgtgatttctgtccggtttttaaaagatgggatcgttcttcgcagtctcctcttcccccagctsyaggcagaggcctctaggccctcggggatggtggtgtaaggtggaaggggcaggtctttgcagcagcatctgcaggaaagcctttctcctaccttttgatggtttggtggtctttggcttgtaaaataatcagtccaatctcagcctcagctttaatagtaagggatcaagcagtagtttctactcaatgttcctcatacccagagtcaaggattctgctatgctaacactaacattatggctaaagaatgttcactttctgttaagttatgttgtgaatcagttgtattgatgtgaggagacattcagaactaccatgaggatattttaaacagttgttaaatcaagtttagcctaaagctgcttccttatatattttaagttcggcttataggttttctgcacattgtgaactataagtggaggcataaacagaccgtagcctatacttgtgccaatcacagagtttttgccaatcaaatgtagccaactgttcaaaccatgttcaaataaggcaaggcagagctgtaaccaatccagctgtttctgtacctcactttcctttgctgtccataaatcttccattacatggctgtgctggagtgtctgagcttgctctggctcagaaagctgcctgatttgaatcgattgctcaattaaactttttttcttttgagacagagtcttgctctgtcgtccaggatggagtgcagtggtgcaatcttggctcactgcaacctccacctcccgggttcaagtgattctcatgcctcagcctaccgagtggctgggattagaggcactcaccaccatgcccagtaatttttgtatttttggtagagacagggtttcacaatgttggccaggctggtctcgaactcctgacctcaagtgatctgcccacttcatcctcccaaagtgctgggattacaggtatgaggcactgcacccgacccggccaattaagctcctttaaatttaattcagctgaagtttttcttttagtacactgaacaggggaaactgtttaaaacaacatcatatttctcagaggctaatacttaaatataagatggaaggatcaaagtgtaactattgtcatttttatcacttgctgtgctaagtgctttcatgtggatttacttaaaccttttaaaagtcctgtgagataaagggtatcatactcatatttacagatgaggaaactgaatttagaaactagtatagtagtgaaacagcaaaactcttctgctatactctattggagcaattagaaactatgccttaacatttttctaatttttgttttgtaaaattctgtgccactggatttctcatttggttgatttagggagacctgtgtacactaaacatttgacacattaacagagtacttgactgatttgactacatttgtttggcaaaaaagtacagcagctcaaaattgaaacagtttttgcaacatatgtatatttttctttgttttacctatggggataatttacaaaggcagttgtttccaaataccttcttgtgaagctgaatgctaagcaagtaaatatcaaccactgatgaagaaaccaggtgagagaccttagacaaggtaaaataatctgaaaagatgcctgcaaatattttgcagtttagactctacgccttgcagagttttgagctcttttttcttgatgttgtgttagcaatgtaatcttttttggtgctgagcttagcttgctgagatgaaagggatttctttttcttctcaaggagttgacacaatggaagctggaggcatttcccaacactgtggtcaatgctacagtcggggaacaagcaagtctcccccaaaacagggatcggagtttttaaggataatttggcgagtaggagctcgggaagtggggagtgctgactggttgggttggagatggaatgatagggggttgaagtgagtttttcttgctgtcttctgttcctaggtgggattgcaaaacttgttgagccagattaccggtctgggtgaaaaagcagagtggcattcttcctggaggagctggctgaagatctgtagagggcccatgtgccacgttcagagcactgttgggctgtgaggtgccaggcatgccctgcctcctacgtgggcccctatggcctggccttgaaaccgccactgcaaaattataaccgagacaatgaaagagatctgacctaaccaactccatcttgcttctaacctccaagctgtccttgttcattcctgagcgtaggctgaactaaccttgggaaggaatgagtttatagtttaacttcaaaacaaaaatagccctttcccgggaaaacaacaacaacaacaacaaaaaacaacctcttcttgcctgggaccagttggcctttggaggactaacaaattagctataagattagaaattacagtttagaggccatacagcctttggttgcaagagtctgaacgtcccccaaattgttcctgggaataacatcactgttgtaaaacctaccaacacccagactggtaatctggctcaactagttctgcaatcccattcaggaacagaagacagcaagaaaaactcacttcggccccctatcagtccatctccaacccgaccaatcatgcacctcccacttcccgagcttctactcgccaaattatccttaaaaattccgatccgtttttggggagaccgatttggctaataaaactccctttccaacacacccggctctgcgtgaattactctctattgcaatttccgtcttgataaatcagctgtctagtcagcgggctgtaaccttgggcggttacagcctggcctgtcccatcccatccaatagttcccatctcttctcagctctctctgtagtttctcttcctccgcctgccttttaagttagtgtttcccaggacagaggtgactcagttgtatccagaccgctctgtgactgaacacccactttcttttccttttccaaaaaatatatgtaacatacatgtcaactaggaacaaaacagtatctcaggaatccaccatccagttaaaaatggacccttacccttaccgtgcccctgcagagaccccaatacagcgcatttccctcattcttttgcttttctcaagttttaccacggcctcgtggccacaagtgacaaaagagacaagtggaggcagctgagccggcctttaggtttctgtacacagggagatttcccatggctggcatttatggaaacaaccgctggtatgtgaaaaacaggtccgtcaccgccgtcacgacggccagagattatacccgccgagatgcccgcggcccagggcctacaatttcctccggccagctcctttggccgcgcaagcgcagtggggccggcgggaagcgtaggcgtgtgacgtcatcaggcggcgcgggccagccaggtgcacgtgactaaggccttgggcgcggcaggtggtagccttcccgcccttctggcctctccatcccctgctgcgggggaccgcgcaagcgcagtgagtactgcacgttgtcgcgggccagtaacgtcatcagacgtgtgtgtgtccctgcggcgctaagaaggggagactgaggctgaggctggggaacatcgggcagcatgagcggctgcgggctcttcctgcgcaccacggctgcggctcgtgcctgccggggtctggtggtctctaccgcgaaccggcggctactgcgcaccagcccgcctgtacgagctttcgccaaagagcttttcctaggcaaaatcaagaaggtaacgcgagccctgggcgaacccttgctgtctggctcccgcttttcaccctcagctgcaagactggtgttgaactttgtgagattccccaaacctgccagagagatacaccctgcggccgaggcgtgttaacactccggattcctgagttccaggaaaaccttcccagagaaagggtgagacatttccaagacgggggacccttggaaatgtggtggtgacgtgttccagctaaattttgtcaggggaattcggaaaactctaggctaggtaattaacaaagcagccttcatctcagctggtctggtctggaaatgtgcggggcttcctctctgattcctaaacagcttacaccatgtccctcctcagtcaccttccagcgccctggggcttccttccccaggtgagcccagcgcctctccctgccattgaggttcctcagaaatctggctccaagatgcttcccaagggtggcacaacccagccaatagtaacagtttggttataaaacactcattgtcttcttagagttggaagacttgggtttggtcttggctcgttgactttgaaactcagttgttttttttgagacagagtcgcgctcttgtcgcccaggctggagtgctcactgcaacctccctcctgggttcaagcgattctcctgcctcagcctccggagtagctgggattacaggcgcctgcccggcttttttttttttgtatttttagcagagacggggtttcaccatgttggccaagctggtctagaactgacctcgggtgatccgcccacctcggcctcccacagtgctgggattacaggggtgagccaccgcgcccggccaagactcagttctttcagccttaaaatggagatagtgttgtgtctccttcacagatgtgttgtagagccccagtgagataaacggtgcatggagagtcttcttaaactgtagagtactgtgcagcagaagagagagctggcttcaacacttagtcttgtgaccttggagctgacggctgcacctccctgtgcctcagtgcattcatctacaaaataggaataaacacatttcttgctctttcctttgtatttcattttatcttctaaggaaaccaacagtatacttgctatttcgtcgaggtgccctactttgaacttggctgaatgttggctgatcctgtatcacagaagttattccctggcttctctttggaacgttcctctgaggttgtcaggctgatacctttatagcaagcaactttacagatgaagaagctaagactcagactaaaagcagtttgcccagctagaaagtgcggagctatgtcttgaacatattggaaaaccttttacccaggacctggggcagtgtggtgctctatcctgggacttcctgctatccagcagcatggtgaagaaagaacacagatctttcagatctgtttccatctttaaacctctggcactacctgccctgccctgcctttactctcagctgtcagctttgcttcccattccactgggaaaatccatgcagtcrgatgagaasttcacaggcacagttaccccctcccgctgcatatgtgccggtattatctacattctgttactgtgaactgtctgctcctggcaaaaccaacctctcattagactccaggtcttctcacctactcaagggtaattctttcctttctctgcatcattaactgttctctctactggatcttgagcccttaccattcaggcatttgtccctaatggccatagaagtcagtaatgacctctctgttatcaaattgtgtgatctgttctcagacctcatcctacttgacccatcattggcatctgacaccgttcatccttccaccctgttgacgcactttcgtctctggtttstgaatcactgttctcgccattctctgaatgttctaaatacttcactggctgatacttctctgtgtccattgctggttcttattcagctccttgaccgctaaacagtgaccagtgtttccaactagccaagttggaatttactaaggctgggtctcgtttcatctacagccatctgctgggtgaccttatttagtgtcctggctttaaatatcatcaatatcctgatgcctcaagtttctttcttcagttcagatttctccctgaactccagattccttttgctttttcagagttgggggctttctctgtcacctgtgctggagtgcagtggtgccatcatagctcactgcaaccttgaactcctaggctcaatagatcctcccacttcagcatccccagtagctgggactacaggcacgccctgccacacccagccaagattctttttttaatctacctttgtrctcaaaagctgtactaagaggtctaacaggcatttgagattaatagatcccaaactgagttcctggttcccacccaatcctgctccttccaccagccttctttatcatagataatggtggctctgttgttccacctgttcaaacagaacacctggagtcaccttgtactcttattctcctagtccacttctaattccacagaagatctggttttctctacttttaggttcttagaatctgaccacttttaggcccttctgctgctactttggatcaggccagtgtcatctctcacagccttactgggattagagcagaaacatgggacatgatgcttagaatctcagattgtgtaggccagtggttgtcaccctgccctaagctggacccaagctattcatggagtgtcctggaactgctgcagggatgggtgggaagttgagtgggtgggatttgggtgcctgttttccctatcagcagtctcagtcagagccgcctgcttctgtctgttttacatatttggtttctgcactagatttctttgaataacaggttccacttttttagataatttacaaactgtttattgcaattgaactctcctcccctaaggcattgacctgatttgataacatcaggatctttctcccacgcccctgcaatctctcctgtgtggcaggttttctgtggttgtacctgaaggccaattagttgccaggcagtcttatctggcctgcccactggtaccagaatgatctctaacacagcccattgcacaagacccaagtgtcagtgagcctctgtgttcagtgaaggagactgagctttgatataaaaggctgcagagtgatggagccatcagcttgttttttttttttttcttgttttttttttccttgagacagtgtcttactctgttgcccaccctggagtgcagtggtgcaatcacagctcactgcagcctcaacctccccaggctcaggggatcctcccacctcagcctcctgagtagctggaactacaggcgtgtgcaaccacgcccaggctggttttgaactcctgggctttaagcaatccccctgcgtcagcttcccaaaggactaggattacaggcagtagccactgcaaccagctaagcttgtttttttctttttcttttcttttttttttatggagtctcactctgtcacctaggctggagtgcaatggcgcaatctcggctcactgcaacctccacctcccgggttcaagcaattctcctgcctcagcctcctgagtagctgggattacaggcgcgtgctaccaagcccgtgtaatttttgtatttttagtagaaacggggtttcaccatgttggtcaggctggtctcaaactcctgacctcgtgatccgcccgcctcggcctcccaaagtgctgggattacaggcgtgagccaccgtgcctggcctccaacctttttttttttctataccacyttcagggtggttttggaatggatggaggcagrgattcctttaagttggctgtcacttttagttagggactcacctataagcctgtggtcctgggcccagagaggagaaagcagtgcgagcatattgatagagtagagaaatctgttggctgattagctgtacaaggtctgaggagaaggttgaggtctccccaagacttctctagaacacttggtgagaggcgccatgaggacaggtgatgcttgggcttatagctctgactcaggacatcactgctcaacagcctgaagcccacatccaaagctcatgtcatgctggcarttgaaggggtagcagagcccaaaagtccagaggggctcagcacagggagcagatgtctgtgagcaggagagacagcggctgtagggatcgatgagacttggtaagcatgatgtgctcttgtcagcatagcatctttgagctcacacaataattgatgtagaattgtccatttcagtaaggagtttccacatccactatcttccacgattctcacaagggccttgagtaaataktacctgcatgttatgggtgagaaaggggtagtttagagagctgaagggatttggtgaaggccacataatkagtaagcctgaaatcaaggaccagacccccaggcttctaaatgttagtcttgggctccttgtttcatgggactattatcatcccttgtactgagaaggaaaactgatgaaaatcgggaagaacctatttgaacaggggagggagatggatgtgggtggtggagcctgcacatagtttctgtatctcaggaaccttgtgaggtttgctttccagttccttcagtacgtcatgtcccgctggccagggtggagtggagcacatgtttttccttcccttttaactgatatttccgtgatgggagtgtgctaaaaattaaattttttagaaaatatttactatttttagaaagaagttttcccatttccagaagttagccaagatgaacttaatgaaatcaatcagttcttgggacccgtggaaaaattcttcactgaagagggtatgtatggttttctttaccattgccgatttccattgtaagggctatttggttgatatttatattagaagtgacatacataggagaagtcttcttgagggagaaatggtttccactcataatattttgctttaggtttcatccctattgccatttaattaaaaaacatccagttaaatgcttctcattgtatttgtggttcaggagcactttaaacatttccatactgttccaggtcaacacttccataaagctataataaaaatgaataactaaaaaaattagatggcaaaaagccaaggccacacaccatacaagcccatggagcatgtgttggttgttgtggcagtgtacagttgctcttagtgtttctaaaggttgagtttcaatttctgtactttggtaattgtaaacaaagagtgatttgtggaccagccacagtttggcacctgcatggtgaggcagcatttgacctcaggtccctctctcagagctgttggccggtcctccagccagggccttggtggagagttcagtgatggtggatggacagcaggtcttccctaatagtaggatcctggagagcttttgtttatatgaattttatctatcaatatttgccatcttaggggttattttatttttattttactttatttttttgagaaagggcctagctctgttgctcagactggagtgtggtggtaccatctcatctcaccaccacctccatcttccaggctcaaacagtcccccaacttcagcctcctgagttgctggaactacaggtgcgcacccccatgcccagctaatttttttgtatttttcatagagacaggttctcactatattgcccaggctggtctctactcctaggctcaagtgatcctcccaccttggcctcccaaagggctgggattacaggtgtgagccaccatgcctagcccctcttagaaattaaaactgagaaatttaaaatatactgtggggctgggtgnnnnnnnnnnnnnnnnnnnnnnnnnnnnnnnnnnnnnnnnnnnnnnnnnnnnnnnnnnnnnnnnnnnnnnnnnnnnnnnnnnnnnnnnnnnnnnnnnnnnnnnnnnnnnnnnnnnnnnnnnnnnnnnnnnnnnnnnnnnnnnnnnnnnnnnnnnnnnnnnnnnnnnnnnnnnnnnnnnnnnnnnnnnnnnnnnnnnnnnnnnnnnnnnnnnnnnnnnnnnnnnnnnnnnnnnnnnnnnnnnnnnnnnnnnnnnnnnnnnnnnnnnnnnnnnnnnnnnnnnnnnnnnnnnnnnnnnnnnnnnnnnnnnnnnnnnnnnnnnnnnnnnnnnnnnnnnnnnnnnnnnnnnnnnnnnnnnnnnnnnnnnnnnnnnnnnnnnnnnnnnnnnnnnnnnntgatttataatatgatcctttgcctttcacagtaaacatattcttaggtactggtgggaatataaaatgtcactatttgtaatagccaaaaagtaagaacaactcaaatgtccatcaactggtaagtgaataaacagggcagcttatccatgcattctaatattattcagctataaccggggagaacagcaatcctcaggactgcaagcaggggggaacagatgccgcctgaggccgggcccggtggctcacacctgtaatcccagcactttgggaggccgagacaagcggatcaccagaggtcgggagttcaagaccagcctggccaacatggagaaactctgtctctactaaaaatacaaaactagccaggcatggtagcacatgcctgtaaccccagctactcgggaggctgaggtaggagaattgcttgaacccgggagatggaggttgcggtgagccgagatcgcgccatgcactccagcatgggcaataagagtgaaactctgtctcaaaaagaaaaaaaaaagaaaagtaagttaaaaaaaaaaaaagaaaaaaattgatggaaagagtgacattggttgaaagttatgcaagtccttttaatgtttggcttattagaagacagctggattctcatacctgtttgtgcacgtaacctctggaaaagtccactgtgcagtctttttttttttttaactgtctttttttataatcttcacacatgctttttgtttgtttgtttctgagacagtcttgctcttgctttgtcacccaggctggagtgcagtggtacgacctcagctcactgcaacctctgcagttgaagtgattctcatgcctcagcttcctgagtagctggaattatagcacgcaccgccacgcctggctaatttttgtattttcagtagagatggggtttcaccatgttggccaggctggtcttgaactcctgacctcaaatgatctgcctgtaatccaaagtgctgggattacaggtgtcagccaccgcacctgtcctgacacgtgcatttaaagcaagaaacacacacttccaggacatagggctctgtcagcaataactgtcatctttgtatttgcagagatgtaaatatataagaaaccggctgggcacggtggctcacactggtaatcttagcactgtggaagactgaggggggcagattgcttgagtcccagagtttgagaccagcctaggcaatggagcgaaaccctgtctctactaaaaatttaaaatattagccgggcatggtggtgcgygcccatagtcccagctacttgggagtctgaggtgggagaaggtacccaagcctgggaagtcaaggctgtagtcagctgtgttcatgccattgagctccagcctgggcgacaggagtgagaccctgtctcaaaaaaaaataaaaataaaaataaaaaaataaataaatawatatatatatatatatgcaagaaaccactgcaaaccaaacccactccctctcacaggaacaaaggtctcttggaataaatagcaaatgctggaataaaaactatgttcattcagctgccatgatgtgaattcaaaaaggaagttaaatccaagggcaaagcagagaaaagaacatacaaaaatacacctatttcatgtacattcaaagaggaggctaatcactgtggacaaagggccctctggaatgacagctgtaggcagccagcagtgccacggaaatagaggcactgtcatctggagacacagaaaaatcacatcctcccacaactggcctctatgaaaaccaaccaggacagacaacccttccccaaaagtaatggccaagaataaaagcacaaatattgctggaaatccaagtagcctgttttactgctttgagtgacttatatgcaaacctaagacttttttctgaatccttgatcaagatttattcatataaaggccgtacataaattctgggaacatggtactttggactatatattggactctgagccaaaacgttaaatacactacactgcgccccactgtacagtcttcagagaattagaatttaaaagcaagtaacatcttaagtagttttaggccaggtatggtggctcatgcctgcaatcccagcgctttgggaggccgacgtgggtggatcacttgaggtcaggagtttgagaccagcctggccaacatagtgaaaccctgtctctactaaaaatataaaaattaaccaggtgtgttggtgcccacctgtaatcccagctactggggaggccgaggcaggagaatcactggaacccgggaggtggaggttgtattgagctgggatggcgccactgcacttcagcctgggtgacagagtgagactccatctcaaaaaaaaataaaaactagttttgatcctgtgggaccccctagaagcagctcaggtcccccagaacctctttgagaagtgccaaattgtcagctgtcattacattgcttggtttttgtttgtttcttatttcacacctggtgatcacaaattatatgttgctagttttaaaagttgcttatttatatataaacataatttataatttagaaatacttatttctgctttttttcctagtgtttatcttcctatttgtatctttttttagctcccatagtctcttgttcttttatttaaacttttcctatgtggtttgtcaggttttttttttttcaggtttaattaaggaataattgatttacaataaattgcacacactgtcatgtgacacataatgacattcaagtcaatgacagaccatatatacagtggtgatcccataagatcatcataccatatttctactgtatcttttctatgtttagctgtgttcatatacacaaatacttaccattgtgttacagttgcctacagtgttcagcacagtaatatgctgtacagcttttttgttttgttttgttttccttaaaaaaaaaaaaacaaaaaatatttaacagtgagatggggtttcactgtgttgcccaggctggtttccaactcctgggctcaagtgatcctcccgcctcagccttccaaagtgctgggattataggcatgagacaccacgcccggcctactgtacaggtttgcagcctaggagcaataagccataccatatagcctaggtgtgtagtaggctctgccacctaggttgtgtaagtccattctgatgttcatacagggagagaatcacctgacgcatgactgtatttagagagtacccctcaggagccatcagtgcaacagaggaagtgaacgkactcattacccgtcaaagtttccttgtgcctcttttatttcccccctgtttccaggcaactgctgatctgttttctctcactatagattagttcgtattttttggaattatattatgtgtgattttgtctggcttctttctgcataattttgaatttcatccatggtgcatgtattggtagtggcttcctttttaatgctgagtcatatttctttctatggatataccaagatttgtktatccattcaagtattcatcaacatagggtatgtatccagattttagctatcaccaaaaaagttgccataaacattccttttttcctctttttctttttttaagagacagggtctttctttgttgcctgggctggagtgcagtggtgtgatcatagctcactgcaacccttgaacttctgggctcaagccatcctctgcctcagcctcccgcatagctaagactacaggcacacgctaccatgcccagctaataattcttaaagttttttgtagaaatgggttctcactatgttattcaggctggtctcagactcctgggctcaggtgatcttcctacctcagcctcttaaagtgttgggattacaggtatgaaccactgcgcctggcctgtatttcctttttttttgagatgccatctcgactcactgcaacctccatctcccaggttcaagcgattctgcctcagcctcctgagtagctgggactataggtgcgcatcactatgcccggctaatttttatatttttttagtagagacagggtttcactatattggccaggctggtctcgaactcctgaccttgtgatccacccgcctcggcctaaagtgctgggattataggcttgagccaccgtgcccggccagcaatttttaaaataggaaaaaaggatcttgtagttacccatgtagttactgattccagggctcttcattnnnnnnnnnnnnnnnnnnnncgcgctatcagatgtacagtagttcatcagggcttcatcatgattggccaggccaatctcgaactcttcacctcaggtgatctgcccgactcggcctcccatagtgctcggattacaggtgagagccacctcgcccagcctggcctgtattttattttagaaactttatagttttggctgggcgcagtggctcatgcctgtaatcccagcactttgggcggctgatatgggcggatcatgaggtcaggagatcgacaccatcctggctaacatggtgaaaccccgtctctactaaaaatacaaaaaattagccgggcatagtggcaggtgcctgtagtcccagctactcgggaggctgaggcaggagaatggcgtgaacccgggaggcggagcttgcagtgagccaagatcgcaccactgcactccagcctgggcgacagaacaagactccatctcaaaagaaactgtatagttttaattcaggtttagaactatgattcattacaagttaatttgcatttctttatcaattttacaattttcaatgtctgcaaaaaggcctacaattcttaaatggttggtttatcttttagagcaattttttttttttttttgagacgaagtctcactgtgtcacccaggctgaagtgcagtggcgctatcttggcccactacaacctctgcctcccaggttcaagcgattctcctgcctcagcctcctgagtagctgggactataggtgcgcatcactatgcccggctaatttttatatttttttagtagagacagggtttcactatattggccaggctggtctcgaactcctgaccttgtgatccacccgcctcggcctaaagtgctgggattataggcttgagccaccgtgcccggccagcaatttttaaaataggaaaaaaggatcttgtagttacccatgtagttactgattccagggctcttcattctctcatgtagagtcagattcccttttgctaccattgctcttctgtgggaaggacttcctttcacttttcatgatgtgcagctctgcaggggatgcatattctcacttttgtatgtctagaaaagtttcagccaggcatggtggctcatgcccgtaatgccagcatttagggaagccgaggctgtcagatcacctgaggtcaggagttcgagaccagtctggccaacagggtgaaaccccgtctctaccaaaaatacaaaaattagccagatatggtggtgtgcacctgtaatcccagctacttgggaggctgaggcaggagaaccacttgaacccggcaggcagaggttgcagtgagctgagatcacatcactgtactccagcttgggcgacagagcgagactccatctcgaaaagaaaaagaaaaagaaaagtctgtttcatcagaacaggtttctgtgttgacaggatttacctttcaggccattaattgtgttgctctgctctcttcctgacttcatattgcttcagaagagatgtctgcttccattctttgttcctttgtacatagtgtttytttcatctctggctgcttttcagtggtttttaggaaaattgattatcacatttatttatgtagttttttgcacatttattttgcttggagttgtttgaacttcttggctctgtgtgtttatactgtttattgaatttggataaacagttgtacacccatacagtgaatactgaacaacaaaaagtaatgaagtatttatacacgcaacaacacgggtgaatctgtaaatcatgacctgagttaaagaagcccgggaaaataggtgccatatggattcatttatataaaacttgaagatgcaaactgatctacagacaaagatttgtggttgcctggggatggtggacagatggatcgatcacaaaggggcatagagacttttggtgaaaaaggaaatgtttttatctcgattgtcatgttttcactgacaaatatgtcagaactcaacaaattatatattataaatatgtgcaggttattcttcgccaattatgtatgtcaataaagttgttaaaggataaaaaatgaagggtttggcctgcacttttgggaatctgtagttctcttagtgacccatgtatacaaaaattcttaagtgtaggttatggtgtttttaacaatttataatactgatgaagtttaattagcaattcagaagtacactttaattaatttgatgcatacaaaagtgtgcaattataggtctaatgctatgctattgattgttcagttttgctgtagtgaatgtgaatttttattttagagatgagatctcactctgtcgctcaggctggagtgcagtggtgccatcagagcttactcaacctcccaggtcaagtgatccttccacctgagcctcccaagtagctgagactacaggctgaatgtgaatgttgaatgaatgaatgaattggtgttaaacaggctaaactgtctcagaacttgtggattgtgctgaaagcagtatggcctctggcagtgaagtaaaccttggcccagatactgccatgaggtggctatctagctgaacattttagtacaattctgagacttgcatatttattctctcatttcctagaaaataccggccaaaaaaagtatgaggtctataaggaggaggaaaaacatgaagtttaacatgcctatagaaaaatttacatcccatgaatgtatataatttgctgctgttttacacagcaaaagcacccctgtgactagcacccagatcaagaaatagaacaccacctagctctggcagcttttaacaattttattctggccgggcgtggtggctcacacctatgatcccagtactttgcgaggctgtggtgggaagattgcttgcgttcaggagttcaagaccagcctgggtaacatagcaagacctcgtctctactgaaaaaaaaaaaaaaaattagctgggtgtggtggtatatacctgtagtcccagcttctcatgaagctgaggcaggaggctcacttgmgcctgggagattaaggttacgtgagctatgattgtgccactgcactccagcctggatatcagagtgagaccttgtctctaaataaatatataaaaataaaatttttcctgggctcattacataaaattgaacacaggccaaatgaccatgactacagaatttctagttttgaaaaagtttctactctgggattatatatgattaatatataaacactgtcctgtttacttatatttgtagaaacatagcttatatttgtttaatcaagattttcctcttggcagtggactcccgaaaaattgaccaggaagggaaaatcccagatgaaactttggagaaattgaagagcctagggctttttgggctgcaagtcccagaagaatatggtaagtcaagcaaacaagcacccagccagtttagctcttaagaaagcactctgtatttgtccrtaacaggtctagttgctggaatagatgacaccatccgtggtgggctacttggtaggggtggactgactgaaggacctgtagggaggaagtgttctcsggtcctgtgcttctcatcctagcacagaggaatgaggcatgtggtctggctggctgtagagtgcaaggcacatcgaggtgggagattggaccagtgggaacctttgagcagggtcctttgtcctatggactgtccctgtaattctttgagcatcctagtgatgtttttagmccccaagtggcggttctgccttattagagttggccagtcactacaacttgcctcccttacgctttttctcgagttggtcacctgaattctgcagaggttaaagggacaggcaagcagtgtgtagaaggcaaggtagaccttcaaggttcaaagggatagaccacacacatgtgtgccatttgtgtttaccctcaggcccttttgatataaaattataaaggccaaggatgctgctaagcatctgacaatccacaggacagacccccaaaacagaaaacaatccattccaaaatgttacagtgccacagtggaaaagctctgtcctggagtcctctggatactgggcagtgggtcacactatagttgttgcatttataaagacctacagctgtgatggaagattctcactacatgttaattgattcgatgtgtgtgtagatatcttcatatttaaagtatatatctacatatgcttgtatgcctagaaaaagtgtggatggaaggatatacacagaaatgcgctttctgaggcacaagattgcgagctttttttttttttttttttgagacagggtctcactctgtcatccaggctggagtgcagtggtgtggtcatagctcactgtagccctgaattcctcgggctcaaacaatcctcccacctaagccttccaagtagctgggactacaggcgtgcgccgccatgcctggtgaattttttttattttgtagagctggggtcctgctatgttgcccaggctagtcttgaattyttggaaccaagcaatcctcccacctcagcctcccaaagcgccgggattacaggcgtgagccactgtgcccagccctcgatttttgtttactttgtacctttctgtattgtgatttttttttttttttttttttgagacagagtctctctctgttgcccaagctagagtgcagtggtgcgatcttggctcactgcaatccctgcctcccaagttcaagtgattctcatgcctcagcctcctgagtagctgggaccacaggcacacaccaccacacctggctaatttttgtatttttagtagagacggggttttgccatgttggccaggctggtctcgaactgttgacctcaggtgatctgcctgcctcagcctcccaaagtactgggattacaggtgtgagccaccatgcccggcctgtattgtgatttttttttttaatatggtgatctggcattactttataatcagaagaaaaaaaaaaagccaatgaagccttaatgggaggaatctagggctgggctgtgattgaygctggtccatctctcctaggtggcctgggcttctccaacaccatgtactcamgactaggggagatcatcagcatggatgggtccatcactgtgaccctggcagcgcaccaggctattggcctcaaggtcaggtatctggggattctgtgtggtgctctctgtaggtcttctggagtcacatggaggcatagaggccagaggcttgctccctctgaattgggcctgatatctgaccttcagccctgcccttcagttccctcactctggccacacctcatggtgctcaatcctcacacactgcccacatgcgcagtggcctttgggtcgcatgtcccttccttctgaatccacctcctgtccccattgcctctgatccacccttcaaggcccaggtagggtgccactgccttcgccttgggctggaagtggtctcctctcctgagccttcgtccttcagcctgagcatgcccccactctttatgcaagccaccttctccccactgggcttggagcaccttagggcaggcccagggtcaaccgcccttactggcaatctcattactcagattatttctgcttaatgttgacatcaaagagagctgaatgcacaccatgctcggctcccccaccccagagagcrcacacattcatgcagatgtttagtgaagagggggactgtctttgtggcactgggagggcagcaggtgggacagccctgacactgagcaccttctttaggataggcttggttccagcactcctgtgtcttcacattgcatcatccagaccctgtcagtgggtgggagtggcccagtttgtggatgacaagatggaggaggctttctttggaaagggatatcctttgcccaagaccactagtctgggaaatgaaggaactgatatgaaagttttggacacagactgcaaagcactgtgggttgcacaggctcacggcactggcatgtgcgccctgaccgtctcctcagcagcttggctccctgggctctgcctgtggccgcttgctctgagttcttgctgtcttctcttgcccgaagtaaatatttgcctcagaaaggaaatgtttcacaaacacctcatgctctcctttctccccacagctgacattagtctgtgtctgttttgtttaggggatcatcttggctggcactgaggagcagaaagccaaatacttgcctaaactggcgtccggggagcacattgcagccttctgcctcacggagccagccaggtctgtctctgcacaaaacgttatccctcagcagctgtgatgttgcccaagattcactggggcaaggggctgttggttttgttgagtagctgacttttccttctttccaaaatcttgcaaagaatcaactcagcaactgttcttgccattcctcttatcttgaccttatttctctgtcccagtgagacttgcaagtgagataccacgcttgacagcacttattaaataaatttttgtggtttacaacacaccttgacatacaatatagtaataacgttccggcttcaaagcacctttcagaatatatagcgtgggtggtactgctcccacttacacattaggagctgaggttcagtgaggctgtgtgatctgctggatggagcagggctgcggcagcactcgggactctgatgataagtccatcacctggaccatcctccatcctgcttcactttgcatgagaacctgggaacagtcatccttcctggggtgcccagaactcatcctcacaggacctcagatgagcccattgcaagcacccatttccatgtttaaacctaagcccaagttgttttcactgccgcttttttacgtgatgtattgaagcagaggtcggctaaatccagcctcctgcctgttttttataaataagttttgtttgtttgtttttgagacagggtcttgctgcgtcacccaggctggagtgcagtggctcaatctcatctcactgcaacctccgccttcaagcgattcttctgcctcagcctcccgagtagctgggactacaggcatgccccaccacacccagctaatttttgtatttttagtagagacggggtttcaccatgttggccagatctcaatctcttgacctcgtgaaccacctgcctcagcctcatgttctattaatagcagcagagttgaggaggtgagacagacatcctgyagcttggaaagctgaatatgttatctgacccttsattttaaaagtttgctgacctcttacaagtactaaaacctccattttcaggccctcaaaagcattcatatttattcccagtattctcccttgaccacatctttctgcatctgcagtgggagcgatgcagcctcaatccggagcagagccacactaagtgaagacaagaagcactacatcctcaatggctccaaggtagggttccttccccatggccacattagggtctcagtcacaaccttcactgccactgagtgagcactctccacacaccagggattgtacctgctgctgtagcaccgactaccttcttgagctgcttttatgtgtttgtttttaattttttttagttttttttatttgcgatggagtctctgtcacccaggctggagtrcagtggtgtaatctcagctcactgaaacttctgcctcccaggtttccaatgattctcctgccttagcctcctgggtagctgggattagaggtgcgtgtcaccactcctggctaatttttgtattttcagtagagatggagtttcaccatgttgtccagtcaggtcttgaactcctgacctcaagtgatctgcccacctcggcctcccaaagtgctgagtttacaggcaatgagccactgtgcccggcttgtaaacccaaaaaatctttaaattttttgttacacaaagtttcagacatattctgtgtgcctggctggccctaactccggcagtcacctgcttatggccactgtgcctcttccagcagcatcgccacctccagatcgcatggtaacaatctcagcatgcctctctaaaagacaggagttttttttgtttgtttttgttttttaataaacacaaagccgtaatacccttatcacattttaaaaattgataatttctcttttcttttgagacagggtcccgctctgtcacccaggctggagtgcagtggcacgatcttggctcactgcagcctcaacttcctgggctcaggtgattctcctacctcaacctcccaagcagctgggagtacaggcacacagctaactctttgtattttttttttggtagagatgggttttcaccgtgttgcccaggttggtctcaaactccggggctcaagtggtctgcccacctcggcctcccaaagtgctgggattacaggcgtgagccactgtgcccagctaataatttcttacttctatcagcattcaaatatccctgattgcctcatacctttttttggtttaactgtttgcttgaattaagatccacacaagtcccatctgttgctgtttgttaaggagtctgtttctgcctctgtctccctctgtttcctttcctcctcctcaccaccctcccgccttttttcatttctttgtagaattaacaaataaatgttgtgtgtatttacatctacaacatgatgttttkatatatgtataccttaagaaatgattaaaccctttctttcttgaagaaatgcagttgtctggcggtggagcctgagctgtctgacaactttgggtgttctttcccccgcccccgcctccacctggccatccatgtcccttgggaaaatccttgctctggggaaagtgggctgagccctgtcctctattcactcatgcttggttggcttctgcagagccaaggaccctgcatgtctggcctgaggtctgactggcagctggagcttgatggacaaagacagagctgaggtgggtcacataggggtttggttttctccaaagtccatctttctgtcctcaggtctggattactaatggaggactggccaatatttttactgtgtttgcaaagactgaggtcgttgattctgatggatcagtgaaagacaaaatcacagcattcatagtagaaagagactttggtggagtcactaatgggaaacccgaagataaaytaggcattcggggctccaacagtaagtagctcctgtgcgcgcgtgcgcgtgtgtgtgtgtaagggggagactggcctttgackktgtgtgtgtgtgtgtgtgtgtgtgtgtgtgtgtgtgtgtgtgtaagggggagactggcccttgactctgtccaaatagcaagataaaatgagatttaaacactttcagtttttgttaagcattttaaaaagatcaaattaagaatgccacttgggctttgtctttgttcctgcagctgagtgctgctcacttgaaggcctgctggtcatcccctgctgtagctgccctagcagacacaccaccttagagctcagcttacagtccccagcctttagttgtctcagtctgcagtgcctggcagcctgcttcaggctgtgagttgggttcaggtccatctgggttcaggtccatctggaggcttgttcttagagcagatcataagcacctaaggggccaagccaagccatataagtactatttttgccgtgggagacatagtctccctctgtcacccagcctggaatgcagtgctgtgatctcagctcactgcaacctctgcctcctgggttcgagtgattctcctgtctcagcctcccaagtaattgggactacaggcgtgcaccaccacacctggctaatttttgtattttttgtagagatggggtttcaacatgttgcccagacttgtcttgaactcctgagctcaggcagtctacctgcctcagcctcccaaagtgctaggattacacgtgtgagttaccatacctggccacttttttttggtttgttttttttgagacggagtctcgctctgtcgcccaggctggagtgcagtggcactatcttggctcactgcaagctccgcctcccgggttcacgccattctcctgcctcagcctcccgaatagctgggactacagctgcctgccaccacgtccggctaattttttctattttttagtggagatggggtttcaccatgttagccaggatggcctcgatctcctgacctcgtgatccgctcacctcggcctcccaaagtgcgtgagccacygcacccggcctttttttttttttttttaaatagagatgaggtcttgctatgttgtcctggctggtctcgaactcctgggttcaagtgatcttcctgcctctgcctcccaaaatgctgggattataggcatgagccaccatacccgactgaccctaaaacacatttaaggtctctgttcatgttgggtcagctctttgtattggccacaggaagtcacatggtcatacctagcaggcagggaaagggagggaggtccatccctcctcacagtgggagagtgctacagttagattgcaggggtgtgattgtgttagagttaagaattragaccagtggtcccagtctaccctaaggcttcaggaaatgctgttctttccytcactttgcttgttctggctctttatatgcctggttcttttcattcttaaacttctgctaaatgtcaccttagaaaagtctgacatagtccttaataaaaatattattatccacccccttgccaacctccatttctctttatcgtgatgccctatttatttcatccatagcactgatcacaatattacattgttttgtttatagcttttgtctcccaaatcaaagtatgagcctccacaaagataggaactttgtctttctatactgtcctaccaaacattggatggatggatggatggatggatggatgaattgcctgcttgcaggtcagatgcagagtggtttgcattgtcagatgatatcttaaatttcatgtgtttcagcttgtgaagtccattttgaaaacaccaagatacctgtggaaaacatccttggagaggtcggagatgggtttaaggtgagttgccagccacagccccttgtaccaggtagtgtcatgagtgcagtttgtcgcccccagcttttgccctatccctgctcgtagcagagtagcctgtgcatggcaggtgactttgcatggttatctgttgggaaattggcaaaatggacactggaaaattggctggctcctagaagaagtgtatggtaaggaytrggaatttcccttcacctctgaggccctattcgcctcgagcggaggctaasattcccttctgcagtgggtatgagaaagcagcctgtgggctctggtgaatctcaagctctgtgtaccacaaccctggtctgcatcgctgccctactcttttctttttggactaagacttatttttatcaagagatgattcatatgacaaaggactcaccattttaaaatattatttcagtggtttttagtatattcactatgttgttcaaatatctcacacagaacatttcctcaccccaaaaagaaatgttgtaccatccagtatgacccttaccccatcccttggctgctactcttttactttatgtccctatggatttgcctgtttggaacatttcataaaaatgcagtcatatacaagatccagtctttggtgacaggcttctctcacattgcgtgatgttttcaaggttcatctctctcatagcatgaatgagtaattcattccttttatggctgaattctcttctgttgagtggagataccacattttgttcatccattcaccagctgatggacattggggttgttaccgcttttggctgctatcagtaatgctacttatgaacattcatgtcaagttttaatgtggaaataacgttttcaggtattttgatttatgcctaaaagtagaatttctgtttggcccaagttggtcttgaactcctgggctcaagcgatcctcttgccttggccttccaaaatgctggtactacaggtgggagccaccatgcccagctctggcatggtcctttggaataacgttcagtggtcttgtgtgtggggatgttggtagagctgcaacagtgactgaaccaccttgttctgaggcattaggatggtgctttctcccagcttgagggaaggcaagctgatccacctggcctggtttcgttgcggcctcctccctctgcctccttcagggcccctgggctctccctgttctccctgcaggtggccatgaacatcctcaacagcggccggttcagcatgggcagcgtcgtggctgggctgctcaagagattgattggtaggtaagttagggacaaggccctttgtgccccaccccctgctgccccggctccaaccctggaggctctgccattcccccggccccttccaggccagtgctgaaccaggctaccagcctgagctcagtccctgggcttttgtggagaccagagggtctcctcagcctgcccctgaggtttgttgtcttccgcattcctctgtttcacctccacccgggtgatgctgactgggggacaggctttctgtctggggtggggatggggattggggaatgggctgtctgtctggagtgagaggttgccactgaccagtaggagcagagctgcttggtgagcacacaccaagaaccaggcttccaggatacacggcctctggttcccaaggtccgtgcctcctgggtgactctgcatggtgggtggggagtaggatcgggtttggaacccaggtccctgggcccctggatcttacctttgttctattctgtcagaataccccaaacctccattttcctttgccagtgaacttagaacagccctgtaaccatcctggttgtggtggaagcatttgcggggaaatgggggtacccggggcagcacacccctaagtgctttatgaagctcctctttggtgccaggctctgggcctgttttggcttccctccattttagagatgagaagacagagactcagagagggcaagcgatttgttccagactgtgctcctggacccaaaatgaaagctgtcaggctccaggctcagggctcttcttactcaggcacaaggcctctggggagctcctctgctggggctctgagtggggctcggccctctacacctcctgagtgcaccacacctgggagagcctgtggaggacatggctatggyggggcgggggtgcttctgcctgggagaggcgccatgtcactcttgggcccttagagctcagcactttgtcacagccacacgcctggaagccccagcctgagtattcaagccaggcggccccacctgctttggtcactgcacggggtgtgagcctgcaccacctctgtctggggcctctgtgcctggctttgtgcgaggcgccctcccccttccacctggttgcatcttcacagcgactctgaggtgggggtggtgttcagggaggtgtcgcactcggcctgaggcacagcctgtaagaaccattgccaggattcaagtctgtatctgatgccaaactctgtgtgtgggtgccatgaggaggggtggttctcctctgacccacgggtgctggcaagtggggktgccagcttctggggtatttgacctcagcagacacgcttctcacagtgcccacctgtgggaagggtaaggatgatggccataggaaatcatgtttgaaccacagaaatattccagttcattctaataactctgctcttcctcagaaatgactgctgagtacgcctgcacaaggaaacagtttaacaagaggctcagtgaatttggattgattcaggtaccaatggttgagtactgtatttgtgcatttcactgtgtgacatgaacggtgtgttcttttgatgtctctgtactggtgacttctgtggtgatttgggaagaagactagttaaggctttatttgacacgggtcactgggcttgcttctcttgggcattgaggcttctgacttaattactttctctcctgtttcacagatttggctctcagcacatgcaaattgtttcttgtgttttttctgaacactccaggagaaatttgcactgatggctcagaaggcttacgtcatggagagtatgacctacctcacagcagggatgctggaccaacctggctttcccgactgctccatcgaggcagccatggtgaaggtaaccctggcatagccagagagctggcgctggagggaggcttgggaaatctccctcactgtgacctttcaagcccatgctgttgcctgtcatcttcctcctgtcattgatccagtatttatgatgcacttgccctgtgtagcactccagggataggcaggcagcggggagcagcagtagggaagtgtccagtgggccagtggatcagtagtttatagcagaaggagaccgttatgataatatccttttagagtaataacattgcatctggcttgtgtgagaaagacttcttttttccttagtttatggccttcctactttctggtatcaaaactttatcttaaaaactaagcatatggcagggcgcggtggctcacacctgtaatcccagcactttggggggccgaggtggatggatcacctgaggtctggagttcgagaccagcctggccaacatggtaaaaccccatctctactaaaaacacaaaaaattagccgggcatagtggcgggcacctgtaaccccagctacttgggaagctgaggcaagagaatcacttgaacccggtgggggcggaggttgcagtgagccgaggttgtgccattgcacaccagcctaggcaacaagagcaaaactccatctcaaaaaaaaacaaaaaacaaaaaacatgtatgagcctgggcaacatggcgaaaccccatctctacaaaaaatacaaaaattagctggcatggtggcacacgcctatagtccctgctacctgggaggctgaggtgggaagagcatcttatttggttaaggtagatactagaatttgcttttgttttgttgagggtggagggtgtcattttttagctgtaataaaaaagatggccacacttggggggaccctactttgtgccccccacaattgtttttaagctggtctctggaattgagctcttgagagaaatagtgagaggtatggcagcttacagaagcaaacatcctggtgtcggcaggagagtctacctaaaaggttgggatcctgaagtggcaaggtccctaaaaaaataaaaaattaaaaacaaaaaggctgggcatcttggaccgtgtttgagtcttttctaggtgcagtctgtgtactgggtgcatttgcatgtgttttatcatctcgttttcttgtcacccttgaacagtgaccacagacattagtttgctgtaggccagcctcttccagatgctaagcctagggctaaacatggcagtatgtttgcccccaaggcacttatagtgtgcacagacagaaagaaatcacggccgctggggcttggcaggaacaggtcaggttttctcgggaaggggagatcttaggtgggttttaaaggaacaggagctcagccaggtgcagatagggtgaaggcaggcccagaggtacagaaggycatggtggggtagggaacacaagctggccagtgtggtcacggaaggcaaaggacttgaccacatcacccctcaagttcctccctggccgatctcctccccaagcccgkgtgcctcccatgcctccccagccacccagctccctgcagcgtaggtcctccttttggaaaggattcagtgtgacaccccacaggtgttcagctccgaggccgcctggcagtgtgtgagtgaggcgctgcagatcctcgggggcttgggctacacaagggactatccgtacgagcgcatactgcgtgacacccgcatcctcctcatcttcgaggtgagtggccccgccaccagctaagctgtgctccacccccaccctgcctggtcctaaagatgctgctcagggcctcgcagaggcccccgcagcccagggctgggtcrcatgctctcaggggctctcctagccctggcacgtctccttccygaytgctgccctccatgaagtcacaagcctgaggagtcagttcagttagcatgtgccaggtggcaggggagggaaytggggccacagagatgacttcggatgctgtgttctgattgtgcagcagggccgaccaagggagatgacagagtgtaaagaggcagggagcgggcatcctccagaggcagccagagttttgtgaagcatgcgctcctggcccctaggggcagaaagaaagggcttcaaccagggccgggtggagggcagtttgtccctaagggcagggtaatagagcgcgccaggcccagatgggactgatctgctggcacaaggtgaatgaagagagagtgaagggctttctgggagcagcagtcagccctgctaggtgggctggggcaggcagtgggtttgggggtgttgaagaaggtatatgggaaggctaaaaaagtagccagactgtggaggaccttgattgacagcagaggaatttggaagccacaaaacgtctttaagcagggcattatttggttgtatctgtgttgtgggaaatkcccccaggggctcagcaagtgctggacatgtggacggggctcatgtggagagtgagttgcagkgatgaggccggagaccaggggctctcctgctgggagggaggggctggacctaagagagcacagcaggatgagtgggatatgatggtgggcatgggtatacaggaggcaggcctgagacagggagagggtttgggcctgagcagcaggtctggtgatgagaggcatcatcagcctctgggagtgtagtcttgtctcctgggccgtcctgcccagtgggaggcctccttggctgcttttgttcctggcctacccattgggttccagccatctccactgttgcagtggacatacggggcaagggccagcctgagggcactggagtggtctcagccctgcaaagggtcttctccaaaggcccttcccttagcctgggagggttggggttctccagggctggggtggtcagcagggttcaggaagccctcaaggccttggaagaacacagggctctcgatgtagggtgagagctcctgtctggagcctgctcggagctgggtggtcctgccargaggcccctgcagtccccccttttcctgtagggagtcctgctgtccgtgatgtcagcctgactgcaggggacagtcctcagtccctagtgctggctgtgtagcctgggtcaggcccctgcacctgacacacagtaccattgtgcagagtgggcagaagcccactggcctctcactgatcagaatcatgggttgggggagtggggagcatgtggccctctgggtgtgttgacacctggcactgaggaggttctagctgccactcagcaatttctggcttccgtgaggaatctggcctccacctggagccagcaatgtctgtctggcactggctgagccccaggcatcagcacccctcaccacccggggaaagctggtttccattttacagaggacctggagacttggagaaaggcttgacacacgtgaggctggtcacggagaggtgggggggtcccagtgggagctcatggccatctggtcacctccctcctcatccctgtgcactccctgagccctggccagagccctgctcccagctacttcaggagcagtggcttttgtggcaatgggcaagcaggcagtggccggcyctacccagcacacgtggcactaccatggctgcctggccggggggcagcctttgacctctacactactgrccacagggaaccaatgagattctccggatgtacatcgccctgacgggtctgcagcatgccggccgcatcctgactaccaggatccagtaggtgccattgtcaccgtgtgcttctcaggtcccatacctgcccagcaggggccagtccagggcagtgggaggaaagagctgccttgacctggagtgggggcatgggggtgtggcgcagccttgtggaggggaccttcccctgtggtagtggggggcttgctgcccagggaagccctcgctgccctgcccttatggccacagcaccctacagcttcagcataaataccgtatcccccatctggtccctcacactagaggcagctggtttttcagaacctgaagaatgagaggtgtccctttaaaggtgccaggcctcacagccaacataagccagtgtttctcttctctgcccttcttcccctcatgctcccctccacccccaccctaggggcacagtaatccaaaatcactgctggaggccaagtacaggttgctagtagcattttgtctccttcacaggagacagctgctgggaagctggctgtgactccacccctcatgggggagcatatrtgtggctcccctgaggagactggctgctctctggcaggtggtgggtttgggggggttcaggctgtagccaggggcccagcatacccaggccagaggggggcacggagcttctgggtgccgaatgggccaygttgctggacagtgagcgccagcagcgaggcctccagtcacaggaccatggactttctgcagtgagcttaaacaggccaaagtgagcacagtcatggataccgttggccggaggcttcgggactccctgggccraactgtggacctggggctgacaggcaaccatggagttgtgcacccyagtcttgcggtgagtgggcctaacaggcataccccctatttcaatgccctcctgccagatctccttgtggcagaaaagatctcactgtggggggtctgggcttctccaggggaagttggggaacaccagctagtccatgacaccctggattgcttcccccagatggggcatctctgcctggtacccgggctgtgagacaggacagggcactgtagggatgaggtgctgaactgagtcctgtcttggttaataggacagtgccaacaagtttgaggagaacacctactgcttcggccggaccgtggagacactgctgctccgctttggcaaggtaaccaggccctcccaggcctgggtcgcaagcggtcctccaatttggccagcattcatgagactactttttgtcaagcatcctttgggaccaggcctagaacagaaatgttgatcaccctggagggatggggtggtgaggtcaggctgactttgtcagcctggggcccacttagctactcggatgggtacccttgctgggtgagttttctgcagtgtttttctgtgcacctttcaggtagagaggctccctagaatcgggagggcagctccacctggggcctgaatctagggacctgattggtggggcccttgctgctgaaggtggcagtagcacagtaagcactggcttctggtctcagccaagcttctgggacctggtcttgccttaacccctccctgaatctagagctcaaagagaagggaaaacagaaggtggctgggagccgttctcccacaacctgaagagaaaggtgttattgactccactttctcaaggaacacaggagactaagacaggcaaagatgcagcccagggagggaccatgtgggggactggtctaggtagtgagtccccacttggagcctctgtgatcccagaccatcatggaggagcagctggtactgaagcgggtggccaacatcctcatcaacctgtatggcatgacggccgtgctgtcgcgggccagccgctccatccgcattgggctccgcaaccacgaccacgaggtgagcccagcccagcctcacacagggcctggctgctgccatctgtcctgctgcactttaatgaagttgattgttgaggagggtgtggtcgggtgtgggggaggctgtgcaggttcaccatgcggtggccgtgggagggtctgtgctgctcaggagatggggctgttccctttcttcttcctgactgagagaagagggggtgagtgacaggggttcctgatcccagtgcccctacccccagcaagggacagaccctgcacattgcccgctgtgctggagggaggcgggtgcagtctctgaggacccactgtataccaggatctctgcctgcactttccaragcacctgcagataccaggattgtgacatctgcctttcagaggaaacagggtcagagatgttgagtcacttgctgttggggaaaggctgttggatcagggctggaattagaacccaagacggggtgactcctgtgccaggccttgtgacccctgccatgctacccagtttggctgattgataggctgggtttttgaagctcagaggtctgattccaggaatttgggcatatcttttctgtcctcggttctggcaggttctcttggccaacaccttctgcgtggaagcttacttgcagaatctcttcagcctctctcagctggacaagtgtgagtggcatgtcttgggggagggaaggaagggcccacttctaggcccctattgatggtgagctgtttctggaccctgtcaagctcccagagcctgctagctactcacagacctctgccttgagcgagggcctgggtaggcctgggcttagctgcagcagtgcccaccaggcactgtaggtgcatacctgccccattcaccaaggcagttgtatgtatatatgtgtgtgtgtgtatgtatgtatgtatgtatttatttcgagatggagtttcgctcttgttgcccaagctggagtgtaatggcgcagtcttggctccctgcaaactccacctcttgggttcaagcgattcttctgccccagcctcccgagtagctgggattacaggcgcacgccaccacgcccggctaattttttgtatttttagtagaaacagggtttcaccatgttagccaggctggtctccaactcctgacctcaggtgatctgcctgcctcagcctccaaaaatgctgggattacaggcatgagccaccgcaccgggcctgccaaggcaattttagattgagcaagtgcagagccctttgcgcaggacccctggcatctgcccagcatgcctggctgtattctcttttttttggagacatagtctcactttgtcacccaggctggctggagtgcagtggcatgatcttggctcactgcaacctccacctcctgggttcaagcaactcctgtgcctcagcctcctgagtagttgggattataggcacgcaccaccatgcccagctaatatttgtatttttagtagaaacaaacagggtttcaccatgttggccaagctggtctccaacccctgacctcaggtgatccgcccaccttggcctcccaaagtgctgggattacaggcatgagccactgtgcccagccctggctgtattcttgaagctgcccggggaaggctcacgaagggaggagcayctggttgtacctgattctggagacagcattttacctgcccctttacccactgtactccatccaaaatgaccctgcagtgccctgcagaggtctcaggccttggcctagagaacagagggctttgctcgtgctccccgctctgtctgcagtgctcttcctcttctatagccactcgaccatatctaggaatgcccagctcagtctacctctgaccctcacagtcctgttgacctgaggttctggatcagtgtccccacaaagcccagtcgtgttgccaagtgatgggtgtaggcgccagcactgtggcacttgctgagagtggcatatgattttttgcaggtcctagccctgggggtagcccagacacccccccagtgctgacaggttatgtgctgtggagggtgctgaaatggtttctcctccagtgggctggaatcacagatgggctgtttacggagcaagtgccggctccaccccatgagatctgggggttagagatgagcaggatgagtcctttgtaactgagaatgaagctgtacccctttctctccctgcagccctgaatcacttgctgggggtctggaggaggggttcacccttagggctgcttcatggtgggtgggctgactttgtggaaaaatgcccccacttcagccatgtttgtcttatcacggtgcagaaagatcacccaccatctctccttttccttcccagatgctccagaaaacctagatgagcagattaagaaagtgtcccagcagatccttgagaagcgagcctatatctgtgcccaccctctggacaggacatgctgaggcaggggacagtgtcccctgctaccgcccrcccctacccatggcccgttgctggatgactgttactcttttttcagaaggtgttgggattatcacaggttaagccttttgttccccgtctgcacctgaagggttgtcgcctggcctgggagagcctcttccaggttttgacctgcaggcagtgctctctaacaggaccatcacagcttytgaactgagccggagagagagaatggaattgctgacccctggaactggcgggtattctggtcattgaggagacaccatagtggaaactggggcttatgctgctgcctccagggtgtgaggtgggtggggacctgtgtcaggtgtggatagccatttctgctcaaccacacattctctaagaaacagcttgaaagctctgtctgggtcattcatttaaactagaagcagaggcacttaaaacatgtaccaggaaccatttaacaaagaatataaaatgtcacaatctgtgtactgttagcctttgctgtacttgtcacactgttccttagaaccagcctttaatgggtgacagcaggaccctgagaaccaccctttggtgatggcctcgggtcccctttgtcctcaccctgcaaggagggcccagaatgctaaggagcagacacacagtgcaggccacaatcccttggggttatgagcccttagtttttatccttctcaggagatgatggggaggctgtctcagctgatgatgttcccacctagggactttagtttctttacaagaactggcttctactcttgaggagaggatgaatggtatctccaggccagcaggcctttgcatttctccagcctcccttctgctggcacttgaaagattacaccaggtcccagcgtgctcactgtggtgaactttaagctttgatgtggtccttgggtggtctggagctctaaaatgcctattgtggacactcccttgagcacagagaaggcagccgactctttttcctccaagtatattcccaatttactgtgatgctggaaataggcaaggaggagactgggaacttggagagctgagctggctgagtggggctggcctgagcattctgccaggggtttggtaactagtttttaaaatggggaaagtttgtaaatattgtgaccgtgtaaataacctctcagtgaaacctgaagttctgttagtgatagcagggcagcattttgcacaaaatgaagcatgcatacctctggacagaaggctgcttagagtttctttgcacaggagaagtttggggaggggctgtcagacccaccccccttctgtgcagccttctggaagggggcttcactctaggctggtggcgtgtaaggcctcagtcttacatgccaatggagaatggcaagttctccattcatccatctgggttgaaaaggcctagcgaccagttcaagcctctccctctcatctgtagttgctaacttttcttaaacatgttgtgggaagaggagaccccagcaagtgtttcttaagtgatttcaccagtgaaacccccaggagacttttgctgggaaggctggcagtggagctcactaggaagccttcttaccaaggaaaagccttgtgttcttaggctagacagctctcctagctggagcctccttgagagccacagcagtaactgtgggcctgggacatgcccacagagagcaggtctcttcaggcaacctgggagatctagggcctactggggagggagggagccaagtctaggcaaatggagaaagtgacatttcagcaaacttgttagcacttccatggagctgtgatcagttgtccttaggagtcgaggaggagaggaagccatcacgttcacctgacctagttttctgggagaagtttctctggcagaccttgtttttagataggctcatgtctctttctccctgaacaaaggttctggctctgttaaccaagtttgggttctatgttaacctccagatgatcctgagatcaattttcataaacagggataaagaggaagaggacttggagggactggtacagcaagacctacgtttcctgtctctgccttaccccaaagaaagaactgtcagtatctttgccgytggaaggtcccagtgaagcccagagcctctgcccccagctcttggctggacacctagagatcagtcatgggtaatagtgttgaagctcaggaagcctttagacctgtcttccaacttccccactttatagccaagaaaccagacccagggcatgaagggatttgcctcaagtcacacaaatgtcacacttggggctagaatcctggtctgagttccagcccagcattcaatctcttttttcagacccattctgcatcttgcttttcttagcatagaaagtttggttgatagtgtaaacaaaatggataccactgaagatgcagagtggcacagagctcctgcctgcccacggcatcaggaggcccagcttggcaaacccttgcctgttacctgttacaggctttggtgcgggcgaagggagcagctcgaggaaaggtggtggtttcttgtacagatcaaagtccacgtggtgcctgtcccagctccacctgtctcgatccaacacaggctccagtacattagcaaacagggagttttccttccactcctaaattgggggagtaagtaaatcaggaggagaaaggtccctatggacaccccacctgagaccctgctcttccctgtggacctcattcagctctttgatgggtggcagcttgagatcctgaaagctgctttcggtgtcgctctgaagacctgtcacttggaatcccctggctgtgagccaggcctggcgggatttcttctgggctttcttctcctcttccttcaagtccaggggctccaccatggctgagaggtaatcctgtgagtacgtgaatctctttcttggctcctagaaatgggggcagacaggttggggtggaagggctaatagcaatcttggatttatttccaagtaggaatcagaaacagctgggggcataatcatagttcctgacaatgtaaatagtgcattgagaggaaatgactgtgcagtagccctgtaagggacatattattgtcccctttgatgggagaagccgtttcctaaagttaatatgtgctggaagcctaaaccatggctttcccttctgttggtagctgccttgataagcagcaatcataaagtgttccccagaggtaaggatgctacagttgttctcctttatgtacatctgagcttacattgaggatcttgggcttaccctcaggtgtggaggattcacatttagtgtggaacagaacacctctcaacatctgagccttgtctacttcccctagctgattggctttcatctgtatagttgagatcccccactgacctccaggcaggcatggtcagaataaagaactcatgggatttgccaactgccatcatcctgtctgggtctctcaccttggctatctcttgatacagctccttcttggcaagctctgtagaattcatggtctgggtactatagttgtagacggccttgttggcaggggctgaaattttaatcaccttcgccacggacttcggaggcttcttgctgacctggtaggcttctgtgatatttttctgaagaaagagacaccagtcactacccacaccaggtcatcctcaccccccatgccagctcatatgcagtgagatgatctctgggacttagctgtggtgcaggtattgattgattcttcaatactggtgctgttatttcatcatagaaccagggcaaagggccaactagtccaacctctcactatccaaaatggaatttaagaggaccaaaaaattgagacccctaaggtcactgtaactggaacacacatcatctggccactcatctcccaaccaccttgtgataaagacagaatttgtgtctcacatggtcagaagtaggagagtgtggacaggggatattacaacctaaagcagcaaggactgccatccttgaccatggttaactgtcaagtgtgcataaggattatgaccctcattctgtccagcaggcccagtaaggaaatgggaactcttccctgaacagagagaaataagatggtctgttggcttcctttgtgaatgaaaatagaaatgtggaaggagataaaagacaacacagaaggctggggggaaaggtggctgggacccaaaacaagggagaactgggaaagttaccactctaaattgttgggcactgtgcagtgtttcatatgcatatttcacagtaaccttcagcaaaataccatcttttacctttaaaaaattttttagcacaagatggtgaccttagctcaactacagtggcttgactttggaatctttgaggaattaatgcacaagaatttaaaataatcaggggaggacaaaatttgtgattcacacacatgaaagaacagactgtccaggcaacaagggatgcaaggtaaaggcaagtctaggtcctcagactttggagcacctgcgagaagattatactagggatgccacatagagcaaggatcctgtcatggcccacatggaacttcaatcaatatttcttgatgtgtccagtttttctagttgtccttagtgggggagttgatctgagtttctcagttagccattcctagaagtcccctgctccttccaaatcctagaattcgtgaattacaacctagggggacagattcttctttccatgctactcctttcttacaatttgaagttgaaattctgacctaatgcttattacagggaaagcaaactgttccgtagttcttctgggtgcctgagattctctgctgaggggtgacacctgcaggagaatttggactcagagcaaaagtaactagatgctggagaagtaaatacagtatttaaaaaaggccacagactgaacaactgaagctaaattattggaaaagatgggctaagaatttaacataagaaattgttttaaaataagagtgaagatagcaatatgaagcagaagtaaaactaaaagaaaaagtattgagtatgaaaatagttgaaatagaagacaagagaatgagatatattgcagaagtgatactgttgtagaacgaatgaatgaactggaatatccacttgagatatgctttcagaaagcagtcctgtataaaaaagataaaattagaaactgagtatagaggatggaaataacatccaaataacagaagtcccaaaaggaggggaaaagtgagaacaagaaaatttgaagcaataatgaatgtcagaaaagacaaaacttccaagcctgggtacactattattagtgggatttaagcaaacaaatacaaagataaactctcaaagcttctagaggaaaagagcaggccacctgtaaagaaaaactatcacttgtgatcagatccacaacagcaacaaggtaagttaacttcaacctacaatttcatatccaagccaactaattgtgagggcttaggtttaaaggccttaggttttacataaaaccctcctttaaaaacccttggggccagatgtggtggctcatgcctgtaatcccagtactttgggaagcctaggcaggcagatcatctgaggtcagaagttcaagaccagcttggccaacatacagtgaaaccctttccatactaaaaaatacaaaaattagctgggcatggtggcacacgcctgtagtcccagccacttgggaagctgaggcaggagaatcgcttgaatccaggaggcagaggttgcattgagccgagatcatgccactctactccagcctgggtgacagagccagactccgtctcaaaaaaacaaaacaaaagtcacaaaactctttggagaaattcaaaatggaggaggaacatgcaggaggattcaaggttagcaagtaatgtccgatagcctagtaaagttgtcttaaaaggactaggaaaataaaatttcagagcctggaattgaaattctagagactataaaagggatggtggagtgtgggtaggagatgagataaaagggatgtaaatgtacaatttgtcttataaagagaatatagttttatgagtttaatgttcagtaggaatgcctaaccatatggtcttcaggataaccaccttaaaaagaaagatagaatgtataacttaagtccacagaagaaaacttgatctatccaaggaacacaggaacggagggtttaaaagtagattaggtggcaaaaatgcctaacctaacagtaattaatgttaagcttgccaattaaagaatctcagattggattttttttttttttttttttttttgagacagagttttgctcttgttgcccaggttggagtggaatggcgcgatcttggcttactacaacctccgcctcccgagatgaagtgattctcctgcctcagcctcccaagtagctgggattacaggcgtgtgccaccacgcctggctaattttgtatttttagtagagacagggtttcaccatgttcaggctggtctcgaacgccagacttcaagcgatccacccacttcagcttcccaaagtgttgggattacaggcgtgagccactgcacccagcctggatttttttttcaagctaacaatatgctatctacaaaactttcaacacaaagatacaggtttgacaactaaagggagacagcatatacactaggcaaaaaggcatgagaaaacaaagacaaaaaagctgtgtggcattcttaatatctgctgaaacaattcaagttaaaaatctatcaaaaggggcaaaaggatattgtatattgaggacaacaaaaagggataacttgtaaatatatatgcacctagcaatatagtctcaaaatatattaagaaacaactgacaggattacaagaagaaatagacatctatctaacatcactggagaacaaccaaggcaaccaggatttgagagtccaagaatctggagaaaagggaaataatggtggttccattttctttttgcagttttctctcaagggatttactgactcctaatttgcacatggataaggcagaaataagaacataagcagaaaaagaagcttaagaagtttagaagctaaggaggtattttggaaaatgctgcattgctagagaaacaaaattggatttcaaaattggaaattgtgccaaggaggaagggccctggtacctctaggcctccagtttagaattcagaaaatctgctttaggagtaagggcaagcctgactctgattaaggagatttatctgtcctctgtctcctgctttatcatctctggaataagacatcaagagtctctatagttttcaataccctctttaccatttaacaaaaaataacagacatgccaggtaacaggatgaaaagatggaaaccaagaaaaaagacaatagaaacagaccccaggtaatccagatattggaagtatcagacaagaacattaaaactagtctggacatggtggctcatgcctgtaatcacagcactttgggaggctgaggtgggtgaatcacctgaggtgaggagttagagaccagcctaaccaacatggtgaaaccctgtttctactaatatacaaaaattagctgggtgtggcagtaggtgcctgtaatctcagctattcagaaggctgaggcagggagaattgcttgaacccaggaggcggagtttgcagtgagccaagatagtgctactgcactctagcctgggccacagagcaagactccatctcaagaaaaaaaaattaaaataattatgattaatcaaaataaatgaaaatgagaatttcaccagacacctggaacctatagaaaaaataaatggaaatcatagaattgaagaaatcatcattaaagttacaatccagtggatgggtttaattgcagcttggacacagtgttggggaaaagctgagtgttgggaaaaaggctgaggcagggcttgcatgtctgacgtaacgtaaaagagtcttggaacatgtccggcgtccagggtctaaaaccccttgtggcctttggaacaccaagctctgttccaaagggtggaaggctgccctgccgcactacaatctaagcccagggcacaagccacaagggcgtggcttggacggaatccaggga

SEQ ID NO: 94690 - DNA, 21139 bp, Homo sapiens
tccaaagagaaatttaggaaatagacttacctgaagtcatgtggcaccaaggtgcagattccagggtctgtgtgacgcaaaagctatagaccagtgctacccagtagaaatataattcaagccatacatgtaatttaaaattttctagtagcctcattttaaaaagtaaaaacaggtgaaatactataattcatttactcaatacatccaaaatgttcatttcattgaatcaacgtaaaaatgagtaagatattttacatcctttttttcttttctttcttttcttttcttttttctttttcttttttctttttttttttttttttttgagacagagtctagctctgttgcccaggctggagtacaatggcaagatattggctcactgcaaccctccgcctcccgggttcaagcgattctcctgcctcagcctcctgagcagctgggattacaggcgtccgccaccacacctggctagttaattttttcattttagtagagatggggtttcgccatgtcatggtctccgacttctgacctcaggtgatccgcccgcctcggcctcccaaagtgctgggattacaggcgtgagccactgcgcccagccttacatcctttttttcatcctgtctttgaaattgagtatgtattgtacacgtatagcacatctcaactaggaatagccacatttcaaggctcagtggccacctgtggccaatgtctactgaacagtgcacctctagcccaacactttcacttttctcagtctacctgacttcacaaacctgggcacacaggaggtgtgggaatgagctggtggaggggtgggcagcctggccaggcttgcagagccgactggctggggcttcctggaggagctggcagcttcaccctcctgtcggcccccaggtctgtgcaaggggcacagagcccggaagagtcgagagcccaaaaccgccggctgctgcccgacgcccccaacgccctacacatcctggacgggcccgagcagcgctatttcctgggcgtcgtggatctcgccacagtctacgggctccgcaagcggctggagcacctgtggaagacactgcgctacccaggccggaccttctccactgtcagcccggctcgctacgcccgtcgcctctgccagtgggtggaggcgcacacggagtgacgggcgcccggccccactctccggatctggacgatgggctcacgccaggaacgccggttcccccgggcccgggcatctcgcctgcgcttcctcctgatggtcgccagagggcagcatcccctaactaataccgtaaccgcgcagtcccgtttgacggtggtgccgtgcccagcatcgtgccaaggactcccctactttagctcatttaatcctcaaaaaatgctattattctctttttacagaccatgaaatggaggctcagggggtgaagggactgatcaagatcattcagcaataaatgctggaaccaggactcaaccatggcttttggattccggagcctgtattcttaaccaccagctcctgcagcttggtcctcatgatctgggcaaggggggaggctgaaggctgcagccctcttgtcatccagatggggaaactgaggcccagagactttaaggggcgtaagcacgggtaagtggcaaggtcggccctgagtacccaggcctcccggccccctgctcctggcctgatactctagggatgcaggtgggagaagcaggggtcctgggggctgcctggagctctgggaggcattctgaacggggtctactactgatctcaggtgagctctgccctcctctgaaagtcacttttctcatcagttaaatgggggcaagggtccgtggtccgaccaaggtcttggcttcacagacatcaccaggagcctgcatgcccctgatcactccttctccttcctccaggaaactccagcctggcctctgaccccagttcaatccgaccatgcccaagcccaagcgggcctttcctccagaactgctccggggcctggctgtgtgactggagcaaggtgctaaacctctctgtgcctcgctggtctaatctgtaaaatgaaggaatggaaacagacctcattaactcattaaatatttgttgagcacctgccatgtgacaggccctctgctggtaatggggacctggggatgaagcaagtggcacagattctgccttcatggaactcgtggaactcacagtctgggggaagggacccctacccgatcatttgatggatagtgttgggggaagagctttaacttctactctgagaccagagaagagtctgacacgtccctaggagggtcccaggctaagagcacagcaagggcctggggtgagagaaggaaaacatttcagagtgggagggggccatgtgggccaagagtggacccccaggattggacagtgcaggacctcggggaagccattcagctgcaatgcacactgccactccactgacctatcagatcccaccaaagaaagatggctgaggggccgggcacgttggcttacgcctgtaatcccagcactttgggaggccaaggtgggtggatcacttgaggtcaggagtttgaaaccagccgggccaacatggtgaaacctcgtctctactaaaaatagaaaagttagccagctgtggtggcgggtgcctgtagtcccagctacttgggaggctgaggcaggcgaatttcttgagtccaggaggcagaggttgcagtgagccgagatggcaccactgcactccagcctgggcaacacagcaagactgtctcaaacaaaacaaaacaacaacaaaaaaagaaagatggctgagggggaagggggaggaaggagagagctctggatgcagggttcctggaatatttggtttttggttttttttgagacagggcctccctctgtcacctaggcgtgagtgcagtgacatggattacagctccttgcagcctcaacctcctgggctcaagtgatcctcccacctcagcctcccaagtagcggggactacaagcatgtgccatcacacctggctacttttattttattttattttattttattttattttattttattttgcagagacagggtctcatcatattgcccaggctgatcttgaactcctgggctccagcaatccgcctgatttgatcttcccaaagtgttgggcccacaggcatgagccactgcacctcaccagaatatatgtactttaaatattgatatcactcctagtcgtctgggtgaccttgcctgatttctcaacctctctgtgctggcatgagctgagtggaaatttcttgtccttactttagcaggaagttgtgacatagagtgttgtcacgcccatcactcaggaggtgatgggccagtgaagctcggaggtggcagggaattgcagcaggaactggagtctgactccacatttccacccatctggatcccacagggctgagtcagcgccacagagtcctgctctcacacataaggatgactcagactctctccacctttgggtctctggccgtgagcctagccgggacctcaggctggaaaggaaagtgatttgtccaagaactcatgggacccaggctctcctaactcatgcattgatagacgtgacctagcacctagtgtgtgccgggcactgtgcaggtgctggaggtgtcctgagcacatggctggtctgactttgcccacatggagcttagagtctgtggggcaggtggaccataaataaggcaaccagttaatacacagggcaatttcagagtgtgacaaatattatgaaaaactgagtcggggtgaggcaagagggattggggtgcagcgttgggtagggtggctggcaagggcttttcagaggaggtgatgcttgagctgaatggtaagagaagccaccatatgactagcgcagtccagcagaggacacagtgagggcagaggccctgcagtaggaatggcttcagtaatgattggcggtcggagggtggccagggcaggtggagggtgactgaaggagttcacactgtgtaggatcgtgtaggttgtggtaagcagagtaggtttttgccaaaagcaaagtgaagatctttatctggggctgtgggacttcctggtcacagttctactgtggacttatgatcctcatctaccctgggagcacgggccatttgggcatgtccctgtctccatgtggccctagcaaggatggagttgcctctccggggaaggaatcatcacctcaccagccattgtgggcagtgagtgaatccatagggaacttctcaccattgtgccctcagggttgggcctatgaggaaagaaacttgaagaacgaggactgagaggaaagggctctggctttggggacccactgccttgtgtgagtgaggggccatggtgactgagcgtgaaccactactccccatgtgtgtccaggctggagtggcagtgacaggagagtttgtgctcaaaggaggcccctagggggcagggccactacagcagccctcctcccagcccctggataggggaggcactgaggcctagagcaccaggcccaggggtgatttggctttgaacctggagcagggtagactgggaaggttgctgagctggggacagataccctggcatcctgcccaggcctgagcctctgagaaaaaggaaaaaggagtttgaaatggagaccagggcaggagcccaagctggttcccaggctagctccctgcagaggaggtgggtgtggttgggatggtgaaatgatctttctggccaattcaacattttgcacaaaaaatcataaacaagggctgggcgtggtggctcacgcctgtaatcctagcactttgggaggccgaggcaggcaggtcacttgaggttaggagttcgataccagcctggccaacatggtgaaaccctgtctctactaaaaatacaaaagttagctgaaaatcgcttgaacccaggaggcggaggttgcagtgagccaggatggcaccactgcactccagcctaggcaacagagagagactctgtctcaaaagaaaaaaaaaaaaaatcctagacaggaagtgtgccctctcacttccccataggcccacccctgctactgtcccagtgctttctgccaccagcctggcgcttgaaggcagttgcctctgagatcccaagggaccccaataggacacactgcagcatctgcctggggcctgagctgacttgacttggatttggaggacattccagcgagggagccttcgagaggtaagagtaggtggtcacagccccgggtctggagtgaaacttcctgggttcgaatcctggctgtgacaggagctgcctctacacgtgtgtctcagaggagaaaaacagactcaggtgactgtcacactgacataatcataataaaataatcatattgaaaataactcatgtattcgttgtttatctgaatttccaatgtcactgggcgttctgtatcttacttgataaatgcagcaatcctaccagttgaaacgtgggctgcctgacccgaagccctgcttaatttccctccccaaccaccatttcagaaatggagacactcaagtccggacagccaggccgccactgcctggtggcccccgacaccctctaggtctctttcccctgcggcccgacagcctcgcccaggcaggagcctgctggaaattcggcaggaccgaaaagggagatgctggtactcagactccgccccggctctgaagccccgcccccggccctgaggccccgcccctagctggaggcctcgccgccagccattcacgtcccgccccgtcccggccgcgcagagccctccccaggtcgcgcaggccgcgctcgtaggatccgcctgcggcgcgcaggccccgcccccggcgcgcgagtctccgcccctcctcgccggccccggccccggccccgccccctgcctctggccgcgcggatcagcttccagcccagtcggcccggcccgggggccatggagctccgagcggcggatcgcgagcctcctgcgaaccccagcctgcacgcccggttagcattcggccgggagatgcggcagtggaatctggaagggcggtgaaaaacctacgtcctgccctcgcccggcctctccattcgtcccccgggtagagaggtaggatggatggggtggaattccgggcttctggctctctctgccccagacctgatgggtgaccttgagctgggggcgcctcctcgctgcctcttcctccccatctgcgcactgggaattgggttggcaggaggtctcgcaaacgtcgctgattcctgctcctttaggatggggacattgccttccggtgtttggagacgtcaaggggttggattcccgggtgccatgtgctttcaccccggcctgtaccctctcctgcctcagttttccctatagcttagaaccccacctgccttacccctcccggctctgagtttctgggtcttggcaggtgcccggctcccaccccttcccagccccagccctggagacagcagcccctagactactgagggacagcgacagcatgaaggctccggtaagtgggaagaaggaggacttccagggaacgcagaggccccgactggcggagcagctcagcagcctctccaccccaggacccactgccacttctgacctccctactgctgagcagagaagggcagaatggcctcaaagtccaaccctgttcttgcagaccgtgtggccccaggcaggtggcatccactctgcagtgtcagtaccttgctatccctgtaaaacggaggtaacgctacgagctcaccaggcaaagcctacgtggaactggggttgtgaagttcagttcagccgctcttgtctttactgcagaagccccgggctgtgagagagagagctggatgtggggggcagttcatctcgactgcctgagtcaaggtctctggttcctcatgggcaggggagcaggtgccaggcagaactccctcccctgcacagctggccacacagaaaagacttatttttagaagctgacgtagcttgcgggcagaaaatggtgggcctcaggcaggatgcgccggggcaggtggggtgatggggtagggggtgggggccactttcccacttctgatttttggagagcaccagccaactgcttggtggcttctgaagggtggcctagggacttgtgcctcgagtctagaaacctggagcccagagagacacacgtggtgaccagggtggcccactacccagtgactagcccacagttctgctgccaccaagcccttcccctcctgggaggcttggtggtggtaggggcattcactaagtctgccagcaggaccagccccaggctgggtctaggccagatggctagaagagcttcctggttccaatggcctttggcacatggtttctggaggcggtagcctccaggcaccagcttttcaattattaaaaccatttcttgagtgacctttgctccaatctccttgtgccacctggcctgctgacccagatccggatcaccaggggacagccactgagtcagctgggggtggggaggaggcggggccacactaggcagccctggtcctaggctgaaggggctggtggcccttctgaggcaccactttcccgttgtcatgtgcacagcactttacagtatacagaaggctttcactgcccccctcccgtaagttcacacggtgggcattatcagtccccagtttgtagaggaggaaacaggcccagagggatggagagccataggtcgcacagtacaccctagcctccagttaggaatatgggctttccagccagtatttaaggccccactgtgctgcttctttgctgtatggccttgtactacacacttcactccaaactgctttccttatctagaatgtggggatgataacagtgttatctccggggccttatgtgcccagagcttggcatccccaggtaaggcccagtggatggagactggattctgctgctgttctaggagctgctctagacccaggagcttctctagacccaggaggccaggtgcagcgctgaaggggcttctgggagcccctccccacatacacccccccatggccactgtctccctcagggtcggctcgtgctcatcatcctgtgctccgtggtcttctctgccgtctacatcctcctgtgctgctgggccggcctgcccctctgcctggccacctgcctggaccaccacttccccacaggctccaggcccactgtgccgggacccctgcacttcagtggatatagcagtgtgccagatgggaaggtgagtgggccaggcaatgcatccggggtgggtagtgagagctgggcttgtcccaaaccggaccttgagcttggcccctctactcaccagccatgtgatcctggccaatcacatcacctctctgagccctaggttcttttttttttttttttttttttttttttttgagacggagtctttctgtttctcccaggctagagtgcagtggcgcgatctcggctctgagccctagattctaaaaagagattttttttttttttttttgagatggagttttgctcttgttgcccaggctggagtgcaatggcatgatctcagctcacgcaacctctgcctcccaggttcaagcgattctcctgcctcaccctcccgagtagctgggattataggcatgtaccaccacacctggctaattttgtatttttagtagggatggggtttctccatgttggtcaggctggtctcgaactcccaacctcaggtgatctgcctgccttggcctttcaaagtgctgggattacaggcatgagccaccacgcccgcccaagaaatgtttttttttgtttgtttgtttgagagagagagagtctagctttgtcacccaggctggagtgcagtagtgcgatctcagctcactgcaacctccacctgccggattcaagtgattctcatgcttcagcctcccgccaccggttcttgcctgtctcgtcctggaagatctggtcacagtaggccatcatgcgctcggtgaaggtgtacacctgcaggccggggtacatcctggtgagctgcagcagtgtgcagtaggtgtggccgccgagcaccccgtccatgtgcctgccctagccctgccctgggactacaggctcatgccaccacacctggttaatttttagagatggggtttcaccatattggctaggcaggtcttgaactcctgatctcaagtgatccacccaccttggcctcccagagtgctgggattacaggtgtgagccaccgtgcccggccagatgttgttttctttttctttttcttttttttgtatttatatttttatttgtttatttattttagacaagagctcactctgtcaacaggctggagtacagtggcgcaatctcggctcactgcaacctccgcctcccaggttcaagggattcttctgcctcagtctcctgagtagctgggattacaggcgtgtgctaccacgcccagctaatttttgtgtttttagtagagatggggttttgccatgttgaccaggctggtctcgaactcctgacctcaggtgattcacccaccttggcctcccaaagtgctgggattacaggcgtgagccaccgctcccggcccagatgttgttttcttccccattttatagatgagagacttgaggcgcacagaggccggtgacttggcttcaggccacatagctaggagagggcagagccaggattcaggctcaggaccagggagtcccacagctgtcctgggcgctgatgaccctgctcttacttagaaactgggcacagtgtgggtgaggcatgtgcaggggagggagtggcctaagaatgattctgaagagctgaggttcatgtttacttgacaaatacttatatgacctccagtctgcgccagccactgttctaagtgttttataactatttgctcaagcaaacctcataaggactcattacgtagagacagggcctcagaggcagcaacaggaataaggaccacaaatatggctgatgaggaagtgggggctgagtgcagaaccttagctctgacactgggtatcactgtgatctcgggaaagtcatccctgctgcccagcctgcaaaatgggttcataacagtccttcaagccgatacctgatcaagcaagattggtggatattccagggggagctgcagggggtgtaagctgcgtgttcatgcctctctgtctctttctccctgcctgccctgcagccgctggtccgcgagccctgccgcagctgtgccgtggtgtccagctcyggccaaatgctgggctcaggcctgggtgctgagatcgacagtgccgagtgcgtgttccgcatgaaccaggcgcccaccgtgggctttgaggcggatgtgggccagcgcagcaccctgcgtgtcgtctcacacacaagcgtgccgctgctgctgcgsaactattcacactacttccagaaggcccgagacacgctctacatggtgtggggccagggcaggcacatggaccgggtgctcggcggccgcacctaccgcacgctgctgcagctcaccaggatgtaccccggcctgcaggtgtacaccttcacggagcgcatgatggcctactgcgaccagatcttccaggacgagacgggcaagaaccggtgagcctggggcctgcctgctggggtctctctggcagctggggccttccttctctgggagtctcttgtccatcaggggctgctctgtcaggcccgggaggtcagcactcatggaggcagacatggtcctgccctctaatggggggcaggaggcagaggggatgtcactcaggaaactgtcacacagatctagaatcccagatggtgttgagggctgtcaggccttttgagcacctgatgggaagcactagccagtgtgtaggggcatgagggagcacttctctctggagggaatggtctgtctaacttggtctctgatatcccttctggataataaaagttagaggccgggtgcggtggctcacgcctgtaatcccagcattttgggaggccaaggcgggaggatcacttgaggtcaggagtttgaggccagcctggctgacatggtgaaaccytgggctctaccaaaaatacaaaaattagggctaggcccggtggctcacgcctgtaatccgagcactttgggaggccaaggtggaaggatcacgaggtcaagagatcaagaccaccctggccaacatggtgaaaccccatctgtactaaaaatacaaaaattagccgggtgtggtggcgcatgcctgtaattctagctactcaggagagtagctgaggcaggagaatcgtttgaacctggaggcagaggttgcagtgagccaagatcgcaccactgcactccagcctgggtgacagagcgagactctgtctcaaaaagcaaaacaaaacagagcaataacagccctctttgctcaccaggcattgggtgaagcactccgcattcaaggtttcattttatgtcatatccaaaagcacactcatgactcttgccagcccctcctccacacacctgctctccactggcctctgtgctcaggagatagaacagtcagcctctggtgtatcccccagaaaattgggctgtgcctctgattcctctcgtatcatcatctgccacgtacaatggcccatggctgccaccttgacttaggcttcccgcccccaccactcctggcctgcctgccctgcgtgatcctgcctctgcctgcctctgtgactttgtgtctccttcartctccctgttctacccatactggccgtctggggctcagacatccatgcctatttctacctgcaggactttgcacctgctgttccctctccctggaatgttcttctcccagatcttcccatgacaggctcctcttgttactcaggtcacctcctcagggaagcccgccctgaccaccccatcagaaggagtgcctcccgccctggcattctttatccattcctttgtttccttgtcttggcagcaggtgtcaccctctgccatcatcttgcttagagatttgtctcctagctacttgtttatctatttttctccttcccttcccatctggtgcttccgtggaatgttagcaccagatgaggtaggttctgggccagcacagggcctgggtggggctcagtttgaatgaatgaaccagttcatacccgctctgtagaggttgagaggggtggcccttggctgcaagagtacccagggctgctgcctccagggagctgaggctggggccaccacctagccccttgctctgagtggggcatgggggcatgcgggcaggggctgggctgacagtgttccctccctataaccccctaaaattatctccacttcacagactggtcatgaggctcagagaggttcacgagcaaatgtgatgcccatagcagagccagggttcaagtggaagatccttggactctagagaacccccacctgacttcaaaccacggtgccctgctgcctcatgctgtctccccaggcctggtcccttagatgaggagaggacgtggccagagcccccacacccatcatccaggggtttgctcaaaccctgcaaagcgtagctgggcccgagccccgctgggtgctgaggaggtgatcaggcctgggtttgtgtgccgctctgcctgtcacccactgctggccttgggctggctctgtcccctccccagcctcccccagagccccccgcaagaggttgaggtgcatagccccgggctggcaaagtaccaagtgctgctggggcctggagctaccacatggcctcttgttgacagcgtccccctgtccccccgccacccccaggaggcagtcgggctccttcctcagcaccggctggttcaccatgatcctcgcgctggagctgtgtgaggagatcgtggtctatgggatggtcagcgacagctactgcaggtcagaccrgccaggccgggcacgcggggacgcggggaggactgtgagccctcctaggccttaaaccagaggatttgggagctgtgggggcagagggagtgtgggcttcatggtgggtgaccacagcacagataccccttgcgctctgggccttgggaaagagctcagtgtcaaacaggctgccttaccaaccccagtgtggctgttgtggtcacaggctgttcacgggccagtcatgccaccccgcagaccctctgtttccttatgtggaaaatagagaaaagaaccacatcttacttggaaggttgttgaaacatttagggagggaataatctacaaaagtgcttaccacagtcagggcctatatatatagggcctaaatatatatatatatatatatacagtgatatgttttatataagttttaatttttgatattatatgtgatttttgatattatataatatttgatattataataccagcatgatatcaagttcagatatgtttatggtatgattttgtaccattgttatattattatatttctttttttttttttgagatggagttttgctcttgttgcccaggctggagtgcagtggcgcgayctyggctcacygcaacctccacctcccgggttcaagcgattcycctgcctcagcctccctagtcgctgggattacaggcacgtgccaccacgcccagctaattttttgtagttttagtagagacggggtttcatcatgttggccaggctggtctggaactcctgacctcaggtgatcctcccgccttggcctccccagggatcagggattacaggtgtgagcaccgcaccagcctatattattatatttcaatattatggaaactaacgagttcacaacaggtcaccgaggtgacaggtgtccctgtgccccagccatggccctggccatacggctggcccccgtgatgctgatggggaggtgggcgtgcagggctggtggctctgtgacatgggaatgaggggctcctccctcaccaggagcccaggaccactagcagggtccctgcagtctccatctcttgatctacgcacttgttctggaaggcggatgtgaccgtctgcgtttwacacacgggctcttgaggctcacagcgtccatctctggcccagagtcatccagcttgcaagaggcagagccaggactcgaaccctggctctcgggatctgctactcccctatgtgtcttggcctccccagggatcaggcgtgggtcttcacgagcccatgggcctggcgaggggtggtcaaggtaggcggcagggtgtggccggaggctagtgggttctgtcccaccccagccctgttccccaccccgcagggagaagagccacccctcagtgccttaccactactttgagaagggccggctagatgagtgtcagatgtacctggcacaygagcaggcgccccgaagcgcccaccgcttcatcactgagaaggcggtcttctcccgctgggccaagaagaggcccatcgtgttcgcccatccgtcctggaggactgagtagcttccgtcrtcctgccagycgccatgccgttgcgaggcctccgggatgtcccatcccaagccatcacactccacaaaaacatttaatttatggwtcctgcctcctgccacgtgctgggtggacctaaggttccttcccrccccattctggcgacacttggagccatctcaggcctcatgacttgaaggggagtggaggggggagccgtgtctcccccctccactccctgagtaattcayggcatttgggggctcaccccacctccaggtctgtcaagtggcctttgtccctggggctgatggcccccaactcaccagcatcatgaccttgtgccagtcctggtcctccctccccagccrcycctaccaccttttggtgccacacttctcaggctggccgccctggttggggcagccgagagcctggggttcattggtgaaggggccttggagttgtgactgccggggccgtatcaggaacgtacgggtaaacgtgtgttttctggatgctgtctctagcgtggtcatgtgtctgatgtgtttaggggtggagatgagggtttctttccctgtcacggtcccagaagcttttttttttttttgagacggagttttgctcttattgcccaggctgggagtgcagtggtgccatctcggctcactgcaacctccgcctcccgggttcaagcaattgtcctgccttggcttcccaagtagctggtattacaggcgcgtgccaccacgcccagctaattttttgtatttttagtagagacggggtttcatcatgttggccaggctgctctcgaactcctgacctcaggcgatccacccgcctcggcctcccaaagtgctgggattacagccgtgatccaccgcgcccggctgtcccagaagctgttgactggaatccctgaggcccctacctgggcccacattggctgggcttcaatttcttccccaacaacctcctgctggtggccccagcccagccccttccccagcaggtcagggctcctctggggggctggtcccttcactgctctggcccaggaaactgaccctaagtcggaggcttctttgggaaccccgttctgtacccagtgagaggagagccagggccaggaggaagcgactctgagtgggagggaaatttctccacccatattgcttccctggtcctgggtcaaatggcaagttaaattagccattaaatctggggttgggcctggcacagtgggggctaaggcgggagtgttgcttgagaccaggaatttgagaccagtctgagcaacgtgacaaaaccagtctctacaaaaaaaaaaaaaagtgggccaggcgcggtggctcactcctataatcccagcactttgggaggccgaggtgggcagatcacttggggtcagaagtctgacaccagtgtggccaacagggtgaaatcccatctctactaaaaatacaaaaaattagtaggatgtggcggtgggtgcctgtagtcccagctactcagtaggctgaggcaggagaattgcttgaacccgggaggcggaggttgctgtgagctgagatcatgccactgcactccagcctgggcgacagagtgagactccatctcaaaaaaaaaaaaaaagaaagaaagaaagtgggtttggtctccctgcaaaacaggaaggcagagggcagccctgggtggctgctgtgagggagtctagtctggctcaggccttactttcgtcatctgtaaagtgagaaaaaaagtcccaccagcggaaccttgccatcctcagaggaggactggtgctagctggttttacagatgagctgaggccactcagctgaagccggacaactgtggagcggctgggccagtgtgcaataccaggtctgagagctgagcccgaggacctgagccctgcacccctgggctggagagagcccacaagcatcaccccttccaggcatcactacttcatctggggacgggaagactcagaggactgggccagggcctcgggctgtcagctgggatgcagccctggggttctagctgccagctccagggatcagggccctatgctaatgctctgctgttgccaactttaaattcttagggttttttgtttgtttgttttgttttttgttttttttttgcaagaggacttgcattttcattttgcactggatcccagaaattatgtagccagtagtcccgggggctctgggtgacccggcatactctccctcccgcccttggctttcacagagggggctgagacctggcacttggttcacagcaccgcttttgtgcccggcttcctcctgcccagtgccaggtggacccagaagtttctgcaggaatgggaggggggaggagagccctgagctggcgaagctaggagcaggctggcagcggagccacagcacggagcgaggagctctcaacaggtgtcaggcagaggtaagggcgggatggagtctggtaggcggaggtggagggggtttccgggctcagagggagggccctggagtcaaggcctgacttctttctggccccactttctgctgtagtggtcttggcagattagtacccctctctgggcctgttttgtcatttgtaaaaggttaaaattgtccccacctcacagattcagacagtggactatccccgtggcttaggacatagcaggcacttgacatgtggagccagcatttttcgtggggttcatctgccctgggctggccctgcccttccttggtggtgacagatggcaggaagcccctgccccattggttgtctccctactccctgcctcatcctgggtgtccaaggcccagtgtccactggttctgatgggatttgaactccactctctcctgggaggctgcctcctcttccttctctatcccctgggaaaaggctgacccagcccttgggcccaggacacagaggctcctctaacctggccctaccctcgggtggggtatttactgctgggttggcccaaatggtgtgtctttctgggggtggtgacctggcaggagtgatgcgtcagtcacttcctccaggcagatggagatgatccttgacaggtctggtggctggttcggggtctactgaaggctgtcttgatcaggaaactgaagactctctgcttttgccacagcagttcctgcagcttccttgaggtgagcccagggcaggagcctccccacagccccagggatcacctgaatctgcagccactctttgggcctctgttttcctgttcataccctggttcctttgcccctcagcagagtggctgaggacctaccctacttcctccaagcccagaggggaagccggggaagcctcacagcccagaggtgtcctaaggggccttttccttagaagggccatggagcctggcccagagctcacgctcacggttcacacagcttcaccttgtaaggaacaaaatgaaacaaaaaatctcacacacccaggtgagaacaggaacatctggctttgggggactggtgggacccagcgtctaggctcatctaggcccgtctgccctctccagcctctgtgggggaagaggcagtacttcctcgttccagaccctctggccgggagcccaggtcttgggctatggagcagcccctgtgtgcaggcccccacctgcccgccactctcacaggcctctcctctccagaagcccctcccccagacaaaagcctagagggagagaggccggagtccccaggcctggcttgcagcctggctctgcccacgacccgctgcggagtcttgggcaagttctattctccctccgacccttgatcttggtttctttgaattgggagctgcggcaggtgaggggtctcttagagctctttccagaataccatggaagggaaaaatcctaacggctcaaagaagtttgctaagggtcaggaagcaggggatacacgggcctctcctacccgtgtaggaggcaggaagggtcaaagcagaggccagctctcccagactgtgggggaagggctgggggggggaggcccacgaggactggccacagccaccatgcaggaacgtcctggtgtggcctggcctggctctcacagacccaaggcttccgtgtagaatatgtctgtggttattaaacagacaggcctagtggaaacaaccctgccacctgcgtgttctctgagcctcagtttcttcctctggaaagtgggttaaccgcagtacccaactcataggccaccataaggattcaatgaggtgtgtttgcaaagtgcctggcagagagtaagctgctctgtttctcatccttgttattactgttattgagatggttgctgtcgttcttggggcccaagaagggaagccagccctgaagcaaatcctgctggagtgagcctgggcccagagacatggcaggcgggacaggcagctccaggcccagatgctgtccaggagcagggccaaagcaccctctcacttctgggtgtttgattcgggtcactggcctgggttagtgagaagggctggggacaggatgtttccctccctggtgcagcccccagcgccctgggtggccttgggctagaggctctgagtcctcagaagtcaagttcatcaggcctcctgcctgtctgaccgccctgcccccactccatggttttccatcctgtcacttgtagggcggggtcggcgacctaggagggccatgggtggagcttggtctgaggctcaggaagcggatggaggtgggcaccagggacaggaagcctccaatccacccttgcgggccaccccctccctgcctggtgggcagtgcctttatggcctaaaggctggaccctgggggactactgctgacttttgttttaattggaaacaaactggtattaacttcccatataagtacagtgcaaacaacctagaagtttataaagggaaaagtgaaggtagcacccaaccgtcctgccccaccttcactttaacagggaatcaactgctggtagtccttgtgggtccttccagacactttatgtgtgcatttacaaatattatgcatagttatgtatttttaaaaggcaagcaaaggccgggtgcggtggctgatgcctgtaatcccagcactttaggaggccgaggcgggcggatcacaaggtcaggagatggagaccatcctggctaacacagtgaaaccccatctctactaaaaatacaaaaaattagccgggcatggtggcaggcacctgtagtcccagctactcgggaggctgaggcggaagaatggcgtgaacccgggaggcagagcttgcagtgagccgagatcgtgccactgcactccagcctgggcaacagagtaagactccatctccaaaaaaaaaaaaaaaaaaaaaagcaagcaaaaaattatgctatatattgcagtttgtttttagaaattaaaaaaatacatttttaaatatataaaaatatttaaatatatataaaaattgtgtgggctgggtgcggtgactcatgcctgtaatcctagcactttgggaggccaaggggggtggatcatttgaggtcaggagtttgagaccagcctgaccaacatggtgaaacctcgtttctactaaaaatacaaaattagccgagcgtggtagcacacgcctgtagtcccagctactcaggaggctgaagcaggagaatcacttgaacccaggaggcagaggttgcagtgagccgagatcgcgccattgcactccagcctgggcaacacagtgaaagtctgtctcaaaataataataataataataataataatgtgaccattatcttaaaatttttggaaaaatacagttaaaccaaaagaaaaaaagcagccccagatcccatcattccagaaataaccactattaacactaaacactggccaggcacagtgcctcacacctgtaatcccagcactttggaaggctgaagcaggcggatcacctaggtcgagagttcgagaccagcctggccagcatggcaaaaccccatctctactaaaaatacaaaaaaattagctgggcgtggtggcccgcgcctgtagtcccagctactcggcaggctgaggcaggagaatcacttgaacccaggaggcggagcttgcagtgagctgagattgaaccgttgcactccagcctgggtgacagagcgagactttatctcaataaaaaacaaaaaaccaaaaacactaatcaccgtgataggcaaaaggcatttccttatttatttttttgcatcttttaaaatattgtgatatggtgtcatatttgaaagtgataaagcataaaaatatcatgaacctcttgaactcagtccccacttaaagaccagttactgtaacttgcatacctctttgattcctcccccattgttcttgacttttgcttttatttttatttatttatttttgagatggagtctcgcactgtcaccaggctggagtgcagcggcacgatctcggtcact

SEQ ID NO: 94691 - DNA, 31420 bp, Homo sapiens
ggccagacccatggatggctgcctcccacctgtcctgtgcctgacatggctccagtttggatgaggtcctcagctgactgtgagggacagtgcccagaaaggggagggtgggtgggagggagaagatcacgttccctagaagagacggaacagacggggtagggcgggagggatttgggaagactgcaaacctggaagcagaactgtgtgtgtgtgtgtgtgtgtgcgtgtgtgcgtgtgtgtgcgcgtgtgtgcgcgcgtgtgcgtgcgtgtgtgcgtgtgtgcgtgcgtgtgtgcgcgtgtgtgcgcgtgtgtgtgcgtgtgtgtgcgtgtgtgtgcgcgtgtgtgtgcgcgtgtgtgcgcgtgtgtgtgcgtgtgcgtgtgtgtgtgtgtgtgcgcgtgtgcgcgtgtgtgcgcgcgtgtgtgcgtgtgcgcgcatgcatgtgctgtgagtggtgtgttgtgtatgcatgtgtgtatatatcgtgtgcatgtgtgtgctgtgtgtgagtggtgtctttgggcatgtgcatgtatgtgtatgtgttgtgcattgcatgtgcctgtatgtgtattttgcattgtgtgtacacatgtacagtgcatttgtgcgtattgtgtgggcatgtgtgtgtagtgtattgtgtgtacatgcatgtgcagtgtgtatgtgctgtttgcacatgtgcaggtatgtgtattgtgcattgtgtgtacgtgcacatgtagtgtgtgtgtgtgagtggtatgttgcggccatggatggggcagaaagtctcctgttctggaaatagggcagtgagtggagtgtgctgacaatggagagcagcagctggctctggagagggatcaagtgaccacaggaaaccaaatgctctggtcttgttccttcaatttggggagtgagtttttaaaattcagcatcatattttcaacaagacctctgttctctatttgcatgtgcctagttcatactccaggcagttgatcacataattcagagaggcattgacagggtgggagtgtttctgggtaggtgtccagatccccggcccttctcagcctggaagtgtcaccgagggaaatccctgttttacatggggcttcaccttttccctctgtaaaatatgagggctggactggcaggtccccttcctcctgtaccttctagagatcgatggttccgggacaacctatttagaaacgaacccgattaaaggcacaaagaacaaggtactatgttaactgcagcagagatttcaactgtaacgcttaatacgggaagaagtaaacatgtatgtgtcatttgactacatttatttttcattctgtttgaggtaatatcttcttacttagaagttaggttaaatcaaaaaccaaaaagctcttcagacctctcctagattagaaaaccgtggtgtctctacggccgggccctctgcctctgtcccagcttgccctcactcccgcccctctgcctctgtcccagcgtgccctcgctcccgcccctcagcccacgtggcctcccacccgatgctgccatgccccagggactgatccggggcccgcccttgtgaaaagcagatccttcataacttcttcaaaaacatgaaaaaatggaaaggtaataaaaactttgaacttagcagaggcccactttctaagcaatgagggaagttgggtagaaaccgggctgctggcccagacatggtgagaaagatccaaggtcacttctgtaggggctttgtgaggagcatggactcatcttcctgagagtgtggccttcggtgggtgccaggtgcgtctcccgggctggaggctcaggacgtggcgctgtagctggtgctggacccatgagggcagtgcctgccattggctcagtgaccatcctgtgcagagccagtgcctggtcaaggccccaactgccttgagtgctgacctgtggtgggtcacacacattccccaggtcgtcgcactaaacggcgttttctccactctttttcagagaggaagcagtgcattggtgaaggcaacgttaggtgtgatttccattcctgctgggagacccgggacgcagcccgggagcttcgtccagcctgtggatggagcctgactggctgcagatggaacttctgtgtcctcccaccctaggtgggctaaggttctgctctcagagctgaattgacaggaggtgtgtgtgtgtgctcacttgtgtgcacaagcatgcgtttatgcatgttttcacgcaaccagaagagccattcgtgggatttagccatttcgaggcacctagaagttgaggcagccagctgtgcagccaggtgtgactgttactggcagcattgtataaaagacacgactcagctgccgtagggaggactgggttgtctggaagtattaggctcattttatatttgtgtcagaagaaatgtctgactttggggcagatgacacggtggctgcggaccaggcatggctccctaggttgaaatcagggaaaagctaatagtatcagacagatatgctttttctttggtggctgcaggatttttgctggaaaatgcactattaatcagcacttgtccaagaaagacccatccatttctgttgtcattcaagccacagttcctgatttactcggcaagatactgggccagttcagtgtctctagctgagcctgacctcggggtttgcgtctcgagtctgaaatcctgtttagtcctctgtgcrtagttttgtctcattttaacgactgcatcttcttggcacatttattatactcacaactgaatggcacacaatagccttgtgttaataaaagctaccgtggcgctgtgggtgaaccgctgggttgaagtccgatggactctacgatgcaggcatccagaaatatgttgtaactctacctggctccctgccagcctggcctcctcctctgggagagctcctggcatggtcccaatgtgtacctgcatgggaacaacagctgcatgggccagctgtttcggatctaaagatgtgcagtgaaactcacattcccagattcacatccctcatgtttatttgggtcatcatggtttagcatgttgtatatatgtctggagcacttcatacacctctatccaccacagacactcttaatcacagttctgtaataataaggcaaactatacggcaaagagaagcatgtaaatatgtaccaaatccttatgaagttgtaattgtttatatgtaaaaagtatgtatataggaacgggagaaggtgcaaggaatgtgctgaataacatccaaactgcatcgcgtctctgccccattcctgaaagcacacatctagttggagcgtcagttcctctccttagatatcattgttttcactcgtctatcataggcaccttctttacatctgattacaatacccagcatttcagaactgggtttttgcccccaaaaaggtaaatatgagcatttatcactgactcctcctggtccagtgagcagcagcagaattcaagtatttaaaaataaggtgcatttctaaattgcaggctataccttcttttccaaaccaatgggctagagtgaatttcctccaagtacttgggctgtcttactgctagctcttctaacaggggaagtctgtatgaatgcatcaccccctaataaggcaagaggaaggaccctgaaatgttgccagaaatgtactgttacatcaacatttacattatattaacatcatcacactctgtgttcaacacacagaacaacatagatactttagtttgtctaaagtaaaaatccacataaatagcagattcctttgttgacaccagtgtgttgtttaccttgtgcccatggtccagattttgagctggagaaggactatggctgttccttaaagtctctgcccttgcagaatctgtagccttcaggataccccgagtgccttacagggcttgtgaacaccgatactagaagtcaaaaagaagagagtgcccaagtgtgggtttggaggcactgacgcattcgccaactcaccgtcatcccatccttgaaaccctgagagagagtgtgtgttttatcacagtaatggaattcagtttagcctcaggaaactcatattgtgaatataggtatcaaatcatatatttgtttactgtatattttttaaaaagctttattgtaaatttatgcaaaaactaaccgggcctgttttcttacggcggcatgccaggtagtgtgtgtattctcccaggcactcccttcatagtcaccctctaaccacgtgacattccgttccatgctaagcagtattcacaggcctaaaataggtttgtatggtgatctacaagattttacaaatatttttgtattgtgattcctatgatatataccagagaattttttactcgtttgtaaattattgtacagttttaataaaaaatgttttaaatcttagacgattaaagtcccctcaaaggtattaaagtttgaactgaaagccgtatgagccatttctgcacttctgagttcattctctgaacagtgcctctgcacaccagaaacggagtccgcgccttccgcccactgtggaggaaagccccagttctcacctgcgagatcacctggagggcaagctctgcagtcgggtgcctggcagcacctggctccggtcgaccacctgggaggctccctcctgtggctgttggtcaaatgtgaaccatggaagagatcagacagttaggaaagggacggaacttctgcacgtgcataagaacagttggtgatatttgccgtggacggtcccacacaggtgagtaacagacattgcattaatcatttaggggagggggagcccagaggaggacgaaggggtgggaagctgctggacctagctctgctggctcgggccccgccagtactcgaggtcatggtgactcagtggccaaactctggctttgaaatgcggactgcggtaacaacgcaaaggcctgaagtctctgggttcgaattcagctgctgcaggctgggtagaatgacagatggagtgacagcatcgcccgtcactcctgtctcgccccaagcctctaactcggctttaagggagatcagcagcagtttgcgtgggcgggtacaccccacccccgcgcgccctccacactcgcccagggtttcggagtcagggctttcttgtctggcgtgggacggcccaaggggcctggaaatgtggccgggattcccacagcggtttctccggtgcgcgctccccgcccggccttcccagcgcccagtgtgtcccgagggcgagcagccacgcgtggccgggactaagcgagcacccaggggccagaatggggcgttcagcacccgctacgtggacagagccagctccgcgcagcgctgccgggcggcaggaggcggggggggagggcgcggcctccaggtccgcccagtgcacctgccgcgcagacctcgctacaggaggctccgagaccggattctgtcgcccgctcctgccgtgaccgcgcggcagcctcaggagcccgcgaggcctctggcccggcccaagcttggctgcgtgttccgctgcgtggaggacgccttcgagagcaagacgctgccgctggacgctctgggcggcggccgcccgggccctcgggttgggaggcgagtctgcgcggcgcgcggagacccctcaacggccgcagcaagtccccgagggcagcccggcgtggcccaggcccgggacccccagcaggtagtggccgcgggacagaggccgtgggcccgggctcggactccccgagaccctcgcacccggaggacgccgggcgtggggctcccccgctcccccctgcggggtcctccctatccgtaaaggtcctgagccttctgggtcctgcgaccaccccccacccccgcgaggtcccgcccaccaccgcgtcccggtccctggggagcgcgtgcgcctctttctgtctctctctctctctctctgtcctattcgggcccctcctgccctccgtctctcgcggccagcgtggaacagcctcgcggggtcacagcctggcgctcggaccctggcccgggtcatctgcgaaggagccggctttggscaaggtgccttcctggacgggtgtggttcccagagcgtcgcggcccggggttgactggctcggaatcccggggccttgggcgcctcgcgtctcctgggacctgggttccgcgctggarggcagcgggggcgcgggcggggcctggcaggacgtggcyggactctctccctcgyctccccggggtgcaaaccccgcgcacatcagctggagcaggttgaaatccccacccagcgctcgtccgcgggtctgcgcgggggcccggggtgcagagatcagaccctgcagcggttccagcgctgggggggctttaaagcgaaggagtggctgagggcgggggcggggctgatgggcggggtgaggcggggctcgggctggggcgggccctatcgggggcggggcctgccgggggcggagccggggtgggggcggggcccagcgggggcgggaccggaacggagccgtgcggccccgcgcgctcgcagtctgtctcccgccgtccccacgcacgcgtcccggctcacgcgtccccccgcccgcccgcccgcccgcccgcccccgcttgtgccgcccctaccagagacccccaggagcaggatgtccttccagggcaagaaaagcatcccccggatcacggtgagcccggtcccgcttcgcccggcgccccctgcccgccgcccggagtggggcctggacgccgggcggaccctcctggtcttgtgcgtgggtggggggtccctgcctttgcgtctggtccctgtcctggcgcccgcccttccctgctcggctccttcgcgccccagggtccgagagtccccgctagcgccgcgcagacccccttaaggagcggggcgcccaggcccggcccggcccggccctgcccggccctgccgggccctgccgggccctgcccggccttgcccggccttgccggcttccgggagcctcggctgcgcccggggagaacccggggccgggcggcctgtccctcggagcgctagcggctcctttctcccacggcggtcgggtggcgaggcgggcggacgcggccctttgttggcccgggctggtccggggcgcggggagatgccgttcccggcgcagcccgtgggtcgcccgccccttggacgcactggcgctgcgtcgggagctctttgtccgagacaaagcgatttagccccggccgctctggccggagtccctggtggccccgaacccttccagtaacctgggttcagcgactccaaggaaagcgagcggtcaagggccactggccgggaaccctggcagcccctgaaccttcgagagcagagacccctccccaacacccacacgcaccggcgcgggaggtcccgctctgccagaaacaaagcctccccgctcgggcggggggagatgggggtgggaggaaggaggcttcgggacccggcaggacctgggcgggggagtccatggggtcccagacccgactctggacttggcctcggcgggagggccgtggggtctgacctctggcattagctcgagccgtgggctgtgggctccactcccccagactctgagcgaggaaggagccctcccctctccagatgggaggggctgctgcctccagagggttctgcccggctgggtctggtcttgatgcaggaggtcttgccagtcagctggcatgtgggggtcgagtttgggggtggcaggaggaccccttcccaggggaggtcaggcaaccatgtcagtgcggaggggcagctgcttcccgggaactttcacctccatcyggatgagtgcagtaagaagagcacagccccacaccccagctgcgtctcctctgggttccaaacccagtctcagtgcgggtgcctgaacacttgggcgcctatgagcagagagcccagaccacacgtctcctcaagcctccttctgcccggttgcgttttctagggcttccttgaaaatgcgtgggtcccctgggaggggtggaaagtgaagaagagggacagcaccgggaaggcagccagggcctgatgcggccacagaggctctgcaaatgcatggtggtgccgggtcagggctgagcctggcgctcagctgggactgggcaggaggaggagaggtgcagcggctgggaacagacagctctgtagaccaagggtctaaaacttcttccacaaccagccygagagtaaatgttgtcagctttgcggaccacgctgttcctgtctcagctgcttggccctgccaggaaagcagtcctggacatttaggaagtcgatgggcaccactgtgttccaacaaaacttyatctgtggatgctgcagtgtgaacttcatagaatttttgagtcatgacatactcttgttattgttttcagtgaatatacaagaacgattcttagcctagggctgtatgaagagaggtagagggttgggtctggcctgtggcatagtctgccaaccgtttgtagactatggggtagaggttgacaagtcactgggatcctgaaaatacagccccacagttagatgtcagcagtgaatcctgtaatggagttcctagataatgaactccttctcattctgagagttttaccaattgtgcacttcagtttaatgctcttggcttcagactgacggtgcgtgaaggctsyagccccaggctagggccctggccacctatgggtgggccctggaaacccagagcaggcggccggacctccctgttaaatgcagacggtcagtcctgccgggtcagttgcagggcgtgctgaggcgcacgccagacggtggagggaaaagcrttgccgagtccagcccgtgggcgcgtccttctccacctcctttcactccttttttgtgtttctctcccccattctccaatgaggtcagatcttcacctctgacggtcatgcagagtcccatcagtgacaccctactttctgcctaatcttctgcttcccggccatctggtaggattcttagaagtggatttatgactgccaagcactggagtcaatccctgtctaacgccacagctctgtgctgccagggctgacctacaaagagcgggcctcaccagcctgacgctctgtgtcccactgggagtgcgtccgagctgcactggaaccgaggtcaccccatctcttccccatcacccccatggcctcttggtcagcaagtcctgccctcctgactcccagcctctctggaatccactctcctcccgtcccttcccatagtcctgtcccagagcccctcatctcactcagaaatcaccccagcaatgatccggctcccactgttacctgtcacaagctactttctaacacagcagccaaaggtgatctctttaaaacatcaaaccaggattgaaacctgcttaaggcccccagtcagggggcagccatggagtccccaggcctacatatcctgcccctgccaagctctgggcaccgacttgcctctggcaccaccaccccaccagaaggttccatccctcggcctcctcccaggtctgctgatggcagctcaagccctttcctgccccaaggccaggctgcttcctggctggaacgctcgccatgtctgccttgcccctgtatcagccaccctggccccagaggtccttctcccagcccctctctcatggccctgccatggcgccctcactgtgctctgcgcattcgtcaccgactgtgatgatctgtgcacgtgtgtttttgctgccgttggtcycccctcagtgggaggcagcctcctggggtggggaccatgcctgtgggggcgctgtctgcctccgcctcctggcaccatcactggtctgtagtgtttgggtggaaccaaagtccagctccgtccgctcccagcctcctctgcgtgggtggaagacagggtggaggagagcaggatctctgaggctgcacaggaggccatgaggcagcgttcgcctcccacctcaggctggggctcctcaatccagtggtaaatcagaagatataaatatgacctgtggcactaccacactttcaccaacacgggctttgccctcagcgaggtctgagcagcagctgtggggcgtgcgtggcacttccaggggcaactgtttttgagcgcctggtgccacttcttggggaatagtaagccgctgcaggcttttgtgctcgtttttacgtctagaaattttgcctgaatgtttcagtcataatttcagaggaaggagttgcaccaagagtgttactgagtaactcagtttggagaaaaattaccctttgttgttcccgatagagtgaccgccttctgatcagaggtgggaggatcgtgaatgacgaccagtccttttacgctgatgtgcacgtggaagatggcttgataaagtaagtttccgccgaaaatgaaaatacgttcccagctcgtgtgtacacgctggtcacgtggtatccaggcagttgaaagtatgttcccagctcgtgtgtacacgctggtcacgtggtatccaggcaggtgaaagtatgttcccagctcgtgtgtacacgctggccacgtggtatccaggcagttgaaagtatgttcccagctcgtgtgtacacgctggtcacatggtatccaggcaggtgaaaatagttcccagctcgtgtgtacacgctggtcatgtggtatccaggcaggtaaaagtatgttcccagctcgtatgtacacgctggtcacgtggtatccaggcaggtgcagatagttcccagctcgtgtgtacacgctggccacgtggtatccaggcagttgaaagtatgttcccacctcttgtgtacacactggccacgtggtatccaggcagttgaaagtatgttcccacctcttgtgtacacactggtcacgtggtatccaggcaggtgcaaatagttcccagctcgtgtgtacacgctggtcacgtggtatccaggcagttgaaagtatgttcccagctcgtgtgtacacgctggtcatgtggtatccaggcagatgaacatagttcccagctcgtgtgtacacgctggtcatgtggtatccaggcagatkaacatagttcccagctcgtgtgtacacgctggtcacatggtatccaggcaggtgaaagtatgttcccagctcgtgtgtacacgctggtcacgtggtatccaggcaggtgaaagtatgttcccagctcgtgtgtacacgctggtcacgtggtatccaggcaggtgaaagtatgttcccagctcttgtgtacacactggtcacgtggtatccaggcatgacttttgggtgaaagtatgttcccacctcttgttttcaaactggtcacgtggtatccaggcaggtgcaaatagttcccagctcgtgtgtacacactggtcacgtggtatccaggcagttgaaagtatgttcccagctcgtgtgtacacgctggtcatgtggtatccaggcagatgaacatagttcccagctcgtgtgtacacgctggtcacatggtatccaggcaggtgaaagtatgttcccagctcgtgtgtacacgctggtcacgtggtatccaggcaggtgaaagtatgttcccagctcgtgtgtacacgctggtcacgtggtatccaggcaggtgaaaatagttcccagctcttgtgtacacactggtcacgtggtatccaggcattgacttttgggtgaaatccatgggagaggtttcttcttttctaaacccatccttggcagcagtaagctggtggccactgtcagagccccggcctttggtgagggcagaggtatgttgggtggctgtgggcgaaagcaggacaccagcttccacgtttctttgttcatcgcagcacttagtatggtgcctggctcatagcaggtgcttcctaaatactggtgcccacatctattagcgcacctgcttccgtttgtcaagctgctccgtcctctagtcaaaaaagtaccaaccagggacctgagtggaaaaccacagggcgtggcgtctgcgtgaggctggaccctgcagtgaccgtcctgagctgcgctgagtgatgctttgctccctggcactcccgaggagctagtccagtgagtggccggccgtgctggccttttcctcggggtctggagctcatgcaaaccctttagctctgctgcattgctgggagcccatctgggctctgacctgggctccctgtaaccagtgaaatctctgctgctttcagacaaatcggagaaaacctcatcgtccctgggggcatcaagaccattgacgcccacggcctgatggtccttcctggtggcgttgacgtccacacaaggctgcagatgcctgtcctgggcatgacaccggctgacgacttctgtcagggcaccaaggcagcgctagcaggaggaaccaccatgatctgtgagtgtctgggtctcctcctctacagggggcagccagcgtctgctgcccctctctctggccaggtgtgtgtgggaggaggagtgtcgcctaaaggtgcctttctcagctgtctgcctttattgcatctgtctgagaacctggagtgcttttctaatccctgtgtctcactctgggtgtttctgtgtggccagtgctggaatgctcctgggatttccaggactggaaatcagtgactgacgtgtgtccacttgttcttccctgggcactagtagccagctcggagttgggggttggaaaactcaaatgccttgggcgaggggaggggtcatgctgtctgaaatgccagatacatgtttgaccttgagccacatgcctcggaagcttcatatctggaaggttcttgctcatgtcaagaagagttaaggatggagactgtatttttagaaaaagataaaagcaatgctcattattatcccatcaaaaaataacccgagttgctatttctgtagtgctggctgcgtgcccggcacgggctctatcctgacacccatcggctcacatgctctcctcctaaaaccctctgagctcagcccagctgggctcagctaagcctagtttaacaggtgggtgagtggagtccgcctgcccaccacgagcaagtggtgagctcaggaggcaggacgaggcctcagagcctagaccttgactgcactgtgtggccttgggtgccattcactctgcggcgtccgtctggcacagacatcrctgctgtggttgagaacgggtctgaggagcctagctgaacctggttgtatggttttctagctgtgtgactccagataaactcagctggcttttataagtcacactttgttgatctgtaaaacagaacactggcctcatgagcttctgaggcatgtgtgagttaatgcacgtcagttgctttgtgtccctggcacaccggggagggcagctctgaggaccctgaaacacctcgcgggacatttagccattaccaaatcacagcttggtttggtttactcagccacaaagggagaaaacaccagcagcagcccatcttgcagtctgaggagactggccactgctcgcgcccttcagggggcggcccaagccggtcaggacgtctgcacagtcgagaccacctgcctcgtgccagtgccaaggcacccggccagctgtgggtccccgcgaagacagagaaacaccacagacacgaggctggcctctatcctgcctctgtcttcctcggcctgcaggcccaggctggcactgtgggtggctgcagggaggctgggtgcccacttcatcttgttgggatgagtaggggcccgagggagggctgtgctggaggaaggcatccctggcgggtgcgccctcctgtccgaccacctggcttggagctgtgtctggctgcaccaggagaggccagtgagcagtgttcgggccttgggtgtgtggttggtggggcagcagcatgatggctgtgtgcagggggcaggatggcccctttcaagtcttgtggggcactcgggaaaccagcccagctcccactgttctaggaaggcacccagaggtggggcccagcaccttggacagcgcactggcccagcctggccctcggggtgcctcacccagcctgacaggagctggaggcagggcaaagccccgacctcctgtgctcctccaagtgcgatgtgggagtagggatggtttggggtggggcttttcctttctcccctctcccttctgtgctcagagggtggctggggsacttgggacagaaggttcctctttgaacaaagcaatagaacgggttcgtgrcagcgtcatcctctctcaggggccggtggcctctgctgtgtctccctcaaatggtcctctggtctcttgggaacatgaaacagaatctcccatggaggaggcagaggtgggaaccagggaccagtgggggaagctgctgaccmtgctgccttcacagtggaccacgtcttccccgacacgggtgtgagcctgctggcggcctacgagcagtggcgggagcgggcggacagcgcggcctgctgcgactactccctgcacgtggacatcacccgatggcatgagagcatcaaggaggagctggaggccctggtcaaggagaagggtgagggtggctggaggggctggagggcgggcatggagcctggtggaggagcctctgccctgaccctgtgttctgccgatggtgctgctctgccctgggggctggtgtccaggtttgagtggaagttggagaaaagtcatttgaaggcccatcccaccttcaaaggctctagaccaagaggccttctctttcccaatccgagggacccatcctggaattgtcctcctgatgaaaagatgcagcagatccgtcgtttcttagaaragaggctgcccagggtggaagagcagcagttcccyagtctcctagcatctggggatcctttcagagggagacccttttaaatccatatctctttgttgtcaccaatgctaaaacagatcagtctataaacaagttaacatttttccccacaaaaaaccctgaagctaaaactacatcagagtttcatagtgggtttgacaagtggcatatctgattatagccgatctctcctaatctgagtccggcccacagcttccagcctggaggtgggggcgggatggggtccaagcaagcccaggagcctgtcaaggccctggcactcccagggatgcctgctacccgtcccctacagacctgaaggaggcaggggcatttcttcaaggccattcctctgggttcccattccycagagggtgacggtcatcacataggtgccccttgatgtcaggacccctcacctccctgcccgggggctggtggagcccgtcaatcctcagtccctgggcctcactccaggcagctgctctgccacccatgctgttctgtgagtggactcgggaggcctgtggcctcgtgtctcagagcggaggtggaagcagggcctgcacctcccctcaccctgtgttggcagtgctggggcctctgctccccaagmgccatgcaggagtcctcagtcctgtgcccacggggtagtgttgcagggacagcactgcgcaacccaaacatgaccttcctcagacactcgggggcaggcctcaaactccaggtcacatacaggttgctacctggagggatggcttgtggggcacagtgtgactcagtttccccagtgtgccttagcttgtcacactagcactttccacccagcgaggaggagatgccatgggttgggtgggcttgagtgatgggaggttgggatcctgcctccaggcccaggccggtccccacacaagttccgagtcctgggggaggtggatgggctgtggctgcccaggaaacaggagagctcagccctcttcctgtttgggccccaacgtcagaggcagcccctcatccttctgctcgtcctaagggcccagccctgagatctgggtggtcccacaagcctgcactgtgagccaggcatggcaagtggggctccaaggccctgcaggcaggtgctggatgtgctggacggccagaatgcaggtccccagcacagcgcggccckggccgcacttccaggagggagccagtggaacccaggccgagagcccaggcacagcrgctcttccagtaacggggggtctgctggatgggtgtgaggggttctcacctgcatttgccgctgggtggacaatcagttcctaacccggagcacaggagcaggcaaggagggcctggatgtagctgcctccgcctcacttcccagcttgctggtgtgtgcatggaagcgggggactgctcscagggctggcaagccagtgagggaagcactgcgggggaggggcccaagacccccaaccctccagtgggcaggagcagcagaggctccgtaggttgtctgactggtgatggctgagcctctgacccctgcctcttctccaggtgtgaactccttcctggtcttcatggcatacaaggaccggtgccagtgcagcgacagccaggtaagggcaggcgtggggaacggagtgggcaggtatatcccaggccgctgctggtgcaggcgcagccccacccaggacgccaccacttctcttcccagatgtacgagatcttcagcatcatccgggacctgggggccttggcccaggtgcacgctgagaacggggacatcgtggaggaggtgccgtggggcagggctgccgtggggcaggcacaggggctgccgtggggcaggggctgcctgtggggtggggcaggggtctgagggtgactttcatgatacgcagacatcagcacagaatcccacaaaaccttgagggagggtcatagcttaccccgagtcaaaggtcaaccagtgagttagagagactggggggtgatggggagctttgaggccataaaacagcttctccttgatcaacacttcttatccaaaatacctcaaaagcaaagtgtcagccccagggatcgaggcccctcctgtggagcggggtacccgctgggggttgggttaccaccttccttccagccaagggcacccatgttgacagggccacatccttcagacacatcccacygggctggggagggcctgagcccgcgtgcagtggcgccgaccccccaggcccttggggctgaggcaaccttggccctgcaccttgttttcccctctagcagaggcacccacaggtacagatggagttcagagagtgggccaccccatacccgtgggacctcagtgggggtcaccacacaggacacacctcyctgacactgcaaacccacagtgagacttcgtgggacgggacgggctctgcccacctcctgagctctacaggaaggtggtggcactcgggcaggggcatgttgggggtccccagtgtcctcgtccacccgtccagctgtgagggcatcggggcatcacaaacacttctgtggcccaaggccaggccccggctgcaccgtcaggaggttgtcctgggtctagggatgctccacatacagcgggagggagcctcagtattggggctgctgcttctggccggtaccatgtcttccctgacacgagcggatgccgtagtgcaaatctgcacggaaaggcagtgctggaggaaggagtggtcgtccattcctgacctgcagagccctccctgcctgtgcacacccccacacatgcccccgctgggggaggcagcgtgatgggcatagtggtgggagggtggggtcttggtgccrtcagtcaggagccctgcagccttgggggagccactttcccctatccgagctgtcccctccttggtaactcagggagcaggaatcacacctctccaagcccctctgccctctattctgagtgttctgtggctgggaaattctgggaggcctgggggtccaggaccacttggggaatggggcctcccagccttgggcttagcatccaaggcccaggctcccttcagggcttggagcgaggcatcctgttggtttctttaggagcagaagcggttgctggagctcggcatcactggccccgagggccacgtgctcagccaccccgaggaggtaagatcccagggcaccacagcacacccgagccaactccgcccagaccactgctgcctggggctrtgctgaccctggccctgggctcctggccctgccactgtgctcgccccgacctcatctgggaggcgtgaatcctccccgtgccaggcacttgtcctccatccccccacaaccctacagcctgtacccgaggcccagaaggtggcgtgggcaggcccaggcactgagcccgaggctgggccgctcctactaggctgccctgagcctgggatcccatgggtgacacctgggcatccccattgcccacactggtctggagccccagggccctcgtgtggcctcatccctctcatctcgtccccaggtggaggctgaggcggtgtaccgagctgtcaccatcgccaagcaggcaaactgcccgctgtacgtcaccaaggtgatgagcaagggggcggccgacgccatcgctcaggccaagcgcagaggtgagcacccagccccgcctctgatgccgaggggccatggtctcggcctcctgggtgcagccctggggagatgcaggttccctgagtccctgcatcggggcggggcactggaccctgagtccctgcatcggggtggggcactggaccctgagtccctgcatcggggcaggggctggacctgagtttccagcctygctggagcagcagctgctcaccaggggccctgaggcaaaacatggggacgctcatcccatttccagtgggggtgggtgtggggagaatggaatgatgaggagggtctccaagagagaattccagttccaacaaggaggccctccctacattgctatttgctgtgtccagagccggggtgctacctgcccacagaatgccagccagctggagcctggcactgcagagagcctcaggcctgggcgggggggtgccacccagagctgtgattggcagcggcttgactgtggtgtcccccagaggctactgggctcagagggtccatggagccccagcaatcactggggctggagagggccaaggatccaggcacagaacccaggtgacgggtaaatgagggggcatcccctaggcggcctctggatctggtctggtttcccctcctcctgctgtccgcactgagtcctgagagacctcgttttctgggcctgcctggggctgtgcaggtccctgggcagggtggggggcggggtggtggtggtggtgggtggtgcccttctatgtgtttcctgcatcgagggttgaaactgaaacccactcagttaactgggaaaaggactctgaggcgtgcaggtgaatgggggtctgcaggggtgaggcccgggcctcactcaggacaccaagcagcctcggggcagcaggccaggcccttctcaggggtaccccacccgccaggctcttctcggggggtgccccaccccacctgggagcatttctcccccacccactggtgggagctgcctcagctgtgagctggaaccctggtgaggccatggccagggcacccccggccagtcagccgccatgcagttcactgtgcctcgcagcccacaggcacgccctggccccgctggagtgcccggggtcctggggtggggtgtgggcagagagaggacttggcgtccgcaggccagactccctttcccagaaggacccccagggccaaccacgtctgcccgcgacccaggcctctgccccacttcctgcccagggccagggactctagactgggcacaagctgtcccaggcaaggaaagtgaggggcagtcgtgggtgtcagcagcagcagttctcggggccccagggggtgcaggtggtcggtggggcacctctcatgggcctcgtgctkcaggggtggtcgtgtttggggagcccatcaccgccagcctgggcaccgacggttcacactactggagcaagaactgggccaaggccgcagccttcgtcacatcaccccctgtcaacccagaccccaccacggcrgaccacctcacctgcttgctgtccaggtaagcagcctctccaggtggccccaggttggccgcccgctgcacaccctgccaaggctgtggccccgacaccccaggcctctcccacggctcccatagggcagcccggacagtggcgggtggggaagtctgagccctttggtcccagcgggggctcccctggcaggaaccagtccccgctcccctgcacagaggcaccagctctgcccagcgagagccactcagatgacctctagcccctgcggctgtgctggccaagggggctggagctgacctggcctctgccggctcaggaaggccaggaccctctgaccctggcttgtttccagcggggacctccaggtgacaggcagcgcccactgcaccttcaccactgcccagaaggctgtgggcaaggacaacttcgcgctgatccccgagggcaccaacggcattgaggagcgcatgtcgatggtctgggagaaatgtgtggtgagcacaggcctggccggggcacgccgtctggggagcggctgtgggcgggattgtgatggctggtcagaagggagcccatctaaccagtgcacactcgtgaaacagatcagagcacacgggctccggggtggcggattccccacccagggcgcctcagacacgyggttctggcccctccagatgagactccaacagcaacaggggcagctggtagccccccacccctcagcagactctagtgttgcccggacactgtgtttgcccaggggtcagcatggggtctccacgctgtgatgttagtgctcccccgcgatgccctcacgacccgtcgyacaccgccctgtcctgcgccctcccgcatcctcagccccacctccccgggcaactgagctcttcccctcagctgctcctgccttcccagcctccagggctccccaaggagactgtcacgtccttcaggggacacaggtgttgccactgaagctccactctcgctgaaccttcgtggaagctttacccacaaagtgaatgcagaaaggcttcgcccaggaaggggcagaccagcaggcatcactgagatgggctccctgactcaccagtgcagcgttcttaccccaggggttactcaggcgttcttaccctgagtgttgccatggcgagggccgtggctggagccctgtcctgatcttggctgcctgggtggcactctagtgcccgtcttcacgggggcctggtatccgtctttgtggggtcccagcggtccagcatctgacctggcaggggccccgtgtcctgccgtccaaccttgtggggggcctggtggtccagcgtctgtcctcacgggggcctggtgacctggcatccatccttgtggggtcctggtggcccagtgtctgtcctcgcgcaagcctcaccccaaccccacccgtcgccctcagctcagccttcttgttccccaggcctctgggaagatggacgagaatgagttcgtcgcrgtgaccagtacaaatgctgccaaaatcttcaatttttacccaaggaaggggcgagtggctgtgggctctgacgctgacctggtcatatggaaccccaaggccaccaagatcatctctgccaagacccacaatctggtaagagaaggcggctgtaagtcagggttggcctttgtggggccgggaccccagggcagccttcccaggagaggcgcaggacagaggcccacgtggcagcagcagtggcctcagccatcccagggccgtccacacagcctgtcccaggccagacactgaaatgggccctgtccacgtcacctcgctgcgtggccgctgcatctgtggtccccttgtgccatggaggaggctggggcagagcggtgccgtgtgcacctgcctagccaagggagaagtgaccctccctgcctgcccacgcctgtcccctttgtcctcgagagaaacgggactcagaaacgaggtccgtaggccgagggggggcattcctcccgagttccaacccctcagttccagcatcttgctaggggctcagtgtaggcacaccgggcctgctccacgctgggcggccacagtgctccagcggctcaacggggatgggactgttgggccccagcrtggaggcactggaccctcgggcctctctccccagaacgtggagtacaacatcttcgagggagtggagtgccggggagcgcctgccgtggtcataagtcagggccgagtggcgctggaggacgggaagatgtttgtcaccccgggggcgggccgcttcgtccctcggaaaacattcccggactttgtctacaagaggatcaaagctcgcaacagggtagggcggcacccgcaagggtgttgtgcaggtaggcaggtgggcgctgagttctaggcccagaacrcacccctggtcaacctggcccggcctcccgaggggtcaggaagacagagcggggccgctgcttgcccagggccctggtgggtctaagtggagaagagcctgctcccggaagatggcaggggaggcccccatggcactgggaccttcaggccctggatcagctctgcaagtgcctgtgaacggcagctgggtcccacccaagtcatccacggttgttagagaaaatacagatataaagtgagcagaaatctagctccccacgggagctgcccagttggacctcagtgtgggtccttctgggattccccatggacagacgtgcacgctgatttgtggactggggcgtgtgctcctctccacatgggctctcaggagctcagccacgggagcccccccccatggccttccagtctcttactgtggtgacgccacgcttgcccggcatcatccgtgtctgacggtgcagcaggtgtggtctccccagaccaccaggtgcttcacacacgcacaggggcactcgcagtggcgtctgtgcacacacaagtgcacgtggggcctcggagggaggttgagcatgtgcacctgtgttggtaagactgaggggagggacgtttgcacacacatgcagatgggaccgcaggcgggcattatacacgtatggggaggactgcaaggagggaggcgtgtgtgaacttgggttgagcacccccccagggcagccccaaattcctgaagctggcactggagaggcgcagagcaggcccagccctccagctgcccatgctcagcccctcatgccccatctctggccccacagctgcccaggctcagcccctcatgccctgtctctgcccccacccccccggcagctggcggagatccacggtgtgccccgtggrctgtatgacgggcccgtccacgaggtgatggtgcctgccaagmcagggagtggcgctccggcccgcgcgtcctgcccaggcaagatctccgtscctcctgtgcgcaacctacatcagtcggggttcagcctatctggtgagttgggcctggggcaccagtgggggtgaggggctctgccggagcatccagggcctcaggtaccagggcccagcctgtgcccagaggggctgcacacggaaggcacccagctggggactggggcaggagatgctgctgggggtgttgtgggggccaagggctgagcccagttagggaggcccctcctgcccgctgtctgcccagggcagctgtgatgaaccctcaccttcaagacagtggcactggggtgaggctgtcacatggaacccaggagtgagcatggatccagcctcaggggaggtgggaggccttgacgaggatctcaggatcatgtggaatccaggtccccacccagcaggccccagaaccaagcgtgaggcacaagggagggtctgagctgtgtcccggggcctggagggatacacgagaatgcctgggagggctcaggctgccagggtccggcctctggcgtcgcttctggtgcattctccggacccaggaaggtgatagcaaagccctgctcacctcctggggactcaggcctgggggcaggtccctgagaacccrgcactgtctgggaggccaggggcagcctttcatcacccggaacccagagcagggacgaggcaggactggcccgggttcctctcgggacaggaagggcttcctgcagcccacagtccccgcaggtttcatgatctcctgggcagcctcacctgcaccccgggcctcagggatgggagtcctgccgggcacctggtctgcttggccttctggtggtggcaggtgtgcgggggctctgcagtcctggccccactgacgcagccactgactctgcctcacgccttgaatagaagggcccctgcccctgcctcattctcccctgcccatctgtgccctttcttcagggtctcaggctgatgaccacatcgcccgacgcacagcacagaagatcatggcaccacctggcggccgctccaacatcacctctctctcctagacgcccaggaccggccctgtgagccgtgctggccccacccgaggccgcgggggccccagggcactcgcccccctccttagcattttcttttgtagaagtttctcgaaggtgcttggcggtcttgccttccccctccccacaggctctccttgtggggtcccaggtcctgctgccaagagcccctcaagagaagggctgaacctggggagatgtcactgccagggtgaggtggagccacatggcagggacaatgccrgcagcctgagcccaggcaccccagtgcccgctgggcccagcctggggacagggaacctgccgggctcacagtgtgggagcagctggacaccaggcttcttggtgaaccggcgaggggccgagtcccgcctggtgggcatttgcygccgcctccccaccaccagtcactgcctcgcagagccctacactcccgcagccgctcctcagaggcctgtgcccatcgcaggcctgggaggaaagtgggcgcagagccctcctgctcacacagctgctgagacttcagggacccatcagaacttggtgcagcacagccccgcccgtggagggtcccttttacgcaccccaaggcccacacctaagcttccatgtagccctcatccagggaagttttgcgatcctttaggaagacactgtcctcttattacagattgtgtatttccgtaggcttcttagtagcagctttgtacactgaggacactgtagccaggaacctgtgcatgccacccaccgcctggacaggcagtcatcctgcctctgatgtgaatcaggcccattaaagacgtctgggtttgaagccgcctgtgcatggaaggaaggccccgtctcctctcccccacgccgtctctgcacaggcggggcctggctggctgtgggctggtccgacgactcctgcagccgcagctcttctcccctcaactcctgcagccgcagctcttctcccctcaatggcagggaggagcgcaccctctcacagggaagagggccggcagggcagccaacatccagggcggggcagagggccccccccccccccccgcctacattctcaccggacagcccgagccaccccagaaggccggggagcatgcacgggagtgtgtggaagtgaagcacacaccaccgccacccaggtgggcgctgctcacagacgcaggcccagcactcaaggccgggcagctatgaggctgacccgagcccccggtgtgtgactgcggtgctggcgcgtgctgtgtctcataaagggtgcgtggacgttcccagacggttgtcctcatcccaagagcggggcctggtcgcagtcactgggcactcgctgtttgttgagcagagagccagggacaccttgtgccaccggttctctggcccctgcccatgcaccgatggtgacagagaatttcctgccgtggtctctgggaaccacagacaggcccatctctcaccctgggctgcttataaagctgtgcagatcccaggcgaaggccctgggccctcagcatttccttcccggggctccctctggcccagatgtgggagctgatgtcccccacaccagcatctcccactctgccccagtgtggggggcgatcaagggaaccagacagcacccacacctcaccagtgtctcgaagaaggacaaggtgcaccaccctgccatgttccccaaatgcacttattcaaacccccacacctgtccttgccccgagcctgtctctgacatcgccagacttccaccgagtacacggcgcctctgggccctcgcagagaccgggccacccttcctggtggtgatttgggtgccgtgtcccccatgtgagctgctgagggctggaaggctagtttctgccatgattcagaggacaggggtgggtgggggacgggaagctgcattctatcccctcggacttctgactctgctcgtggcatggccggttcttccccaaatgttctttggccgttgtcatctccatctcgcagcccagccaaggacgggagggccctgtttgccaggggtgcagtggggctcatggacacaggtctaggcacatgtccactatggccgctgtcctgggaaggggcacagacccgccacacccatttcctcagaggaaaccagcacaggcctgtctggagcgctgggctgacgggctgagcccgtcctcctccagcgagaccagagagaagcacacaggccgtttacccagttagttacagttccaaccacagaaccacccagccacagtgagagggatacgtccctttatggagggccaagcactgcccggcactgcggyggctccacggtgcacggtgctgtcctgggctcctctgcctccaggaccgtctctgccttccacagccttacggctccagggccacggagacaggcacccaccccaaagccatggtccgggagctctgccctgaggagctgcccaccccactggctgccccaagtccaggccaaccagaaacggcaggcaccggcctgacggccaggcagacacaggacgtacgcagaacatgcaacatcgagcggttctcacattgtaattctcagaggtgaaaactatacagaaattgctggagcagtttgaatctctagaaaacattcacctccccacccactaccccaacccatgcccttgacctccaagaactgagccgagcctggggcacccgcggcctgtgctgcaagggtcaccttgtgacgagggccgtgcacagcctccgggctgagcagggacaaagactcctgtcccatccatggccccagctccccgtgagcggtaagagggcgcccagcagcgcttcctccatctaggcgggtctcgggggcccacgggaaatgccctccacaggtgtcccctgcacccacagcctcttgtcccctgcaccaccacgagcctgaggtgtgaaatgtgtccggggcactgtgggcaccgccagccaggctgggtgggaacgtgaatgccaggcctcggcccatggccctccctctggcagccgagtctccaaagcagctcaaggggtgaggaccacgggcgtcccggcctagccgctcccggccgaggggcaaatggggccgcacatgggcagggcggagcgttccgcctcgtcctccacaggctccgcagcatccctggactcaggggcggggagaggctccctcgggaggtcctggctcctcttcagcctggggtggcaggaacacatggagggcgttatgcccccacctccctggcctcacggtcccatgacctgcccacgggctcatgggataggccatggcgtggatgcccaaacgtgggccacaggctcggtgtctgctggagaggccatgctcccgacacactggcagggagcctggggacgggtgggggcacgtgagcatgctggcgaggctcggcatgtttccagccagaagccgaaaggcctgactgtgcaggtgccataggtcagtgacttgggaatgaggctcggctaagcctcattcttcacccggtcgtctgatccccagggtgccagtcagtgccctcagccgtctgcacgtgctgccctgcacgtcctgtccataagagctcagacccacctcctccaggaggccctccttgccccgtgcgggcagagggagcatccatcctcccttgggccccaccgtggcagctgctgctatttctggcctgccttgcctgctgccagtcatctgtgccctttctgtcccctggggcctgacattcaggaaaggtctgctgagagactgagggcgtgcctgggtgggggagttgacgtggctctgatggggcctcctaggaagtcaccacccctcatctgggcaaatgatgtgtctctccccagaagattccagccacgggccccgcgtggagcacaaacatgccagagcctggcaggggcctcccgccgctcccctccatagctgctgctcagagtccccaaagagagcagggccacgcaccccaggcccacaggtgcccgctcacgtggccaagaaaaccttaaccttagccccattttcctcctctctgccaccacgcccacccacccccaacacactcacttttctctgttaaaaatcacgaagtcttgctggatggcatcgaggcagtcttgaagatagtcattctcctgtggatggaaaggcacacgtgagcgtgggggacgctgtccaggttccgcccatgtcccctcaagtgagtgtctgggcatccccatcgggcctccacctgtggctttggatgacggcctctgggctattgaagtgccccggccctccagcagccagactgcccgggagctcgcatctctgcgggtgactcacccaagcccgaggatgccaaggcccagctcccttgcctctgggtggatggcttggacttgctccgtggggcctgcaggaccaggcagaagctgttctctgcgggactttgctggaaaccactcccttgccgggcctttcccgtctcataccgggttctcccagcccctcatcacagcacacacacacctgtcccaggcctgcttctggggccctgcccagagaatcctggaaccagggctgtcttagaagcaggtcctcagggcaagcttgtggacggaggctgcccctggcaggacccacccttactggtgtgtgatgggcaggcaggactacttccttcaggcagcaggaccacttcccaggacgcaggggtcgggggagggcgtgggtggggtggagggggtgctggccgctcagcgctggcatggtgtggggaaagcatcattatggtgaccgtgaacttggatggtgacgttggtcactaccaacgcgtgagcaaatgacagacccagatgagccaagtcacagtgaaaagtgcagggagtcgcaggcctcgggtggcattaaaagggcccccacctcctgcagctgaggccagaggatgcccacttgtgaggaccacagaacctcagatccataggaagtcacccacgtcacagccaaggccctgggagggagggagctgggctctgaaggtcggaggggacgtgtgagtgggtacacaccagaacgctcaaccctatctagacatacaaaacgtacagcaaaacccagtgttaccatcttacgggaccacccccccatgcgattggccagtgacggaagcatcgtyatgcaatgcgtgacaacagtctgcgttcacccgagacggacaacagcatgctttcacggccccagccagggctaaggggactcttccctgtcacagtgtcgtctgtgcctcgaacacctggacactcttgcctgctatccatggatcctatttttggtctcgctctgtcacccagactagagtgcagtggcgtgatcttggctcactgccaactccgcctcccaggttcaagtgattctgctgcctcagcctcccaagtagctgggattacaggtgcccaccaccatacccagctaatttttgtagagacggggtttcaccatgttggccacgccagtcttgaactcctgacctcaggtgctccgcctgcttcggcctcccaaagtgctgagattacaggcgtgagccaccatgcctggccctgtggatcctattaatgctgattgccaagtggcaagtactctggacaccctgtaaacccacgaacagagtgtgggagatgcagaaggctgttctccgatgaacggttcagggatttgctgacgtgcgtcacactcggacgtgcccgccaagataaaggacaagcggtctcaccttgcgcctcttcccacgaggaaggaagcatagggctcaacacatttcttgggtttggggagcagctcacgttccccaccccgaggcagtgccctccgtgtctctcctggatctgtggtggtgtgagggtttcaccctggcagcgggaatgtggactctctcttcctagccctgagtggggactgtcccgcccgctcctcctggtggtgtcaccctggtcctgggcrttccccacacgtacacggtgtgagcggccagcaccttgccaaggactcgagaagaagccggcagactcccacgctctctgcgggcagccctctcctctccatgtggctctctccctccaggctttgccctgtcactgtggcctcccctaaaggagtcacgatcctggcaggggacctgtccttagtcatcaagaagaggacaggctgggtgatctgctgtgtctcagcactctctggtctaaccctgatatagacagacaagtctgcaaactcgggccggcctgagaaggtgacggtgacctaaggctcagactactcaggaatgagggtccgactgagccgctgggatcctgcgattcacagcgacacaaggtgggaggggctggggtgggcgccagtgatgtagaacatgagcgcccgtcgtggccctgtgtgcagcccagtggcaggggctgttggtcatcctgcaacgtccacagccatgttttcctaggcagagaggccaccagaagcctgaggagctgctccagaaccatctggaaggggtggctctgagcagcgcccaagccgggctgtgtcacctagatgtgtgaccacgacccctttccacagggactcccttcccaaggtgtgtgtagcgccgccagcagtaccccatggcagggtctgtgcctggcctggatctgccctgctcttcctctgacagcccctgcctcctccttgggtggctggaaccctttgccagcacacacacagtcagaaggccacagaggggcccttcgcccatgactgactggtgtgggtgtttgagagc

SEQ ID NO: 94692 - DNA, 156136 bp, Homo sapiens
  misc_feature (1)...(156136): n = A,T,C or G
tatctgcccaatgttgtcttagtctgttcaggctgctataacaaaatgccactgactgtgtggcttaaacaacagaaactcactttctctccattctggaggctggaggtctgagatcatgctgccagcatggctgggttctggtaagccctcctttccyggcttgccaatgcctgtcttcttgctgtatcttcacctggtggagagagagggatagtgagctctctggtttctcttcttataaggacacaaattcgatcatatctgggccccatccttaggaccccatctaacccttattacctccttgtaggctctttctccaaatagggtcacactgggagttaaggcttcaacataggaattttagggggacccaattcagttcatagaaactccatgtttctcctgtattctgatggggaaactgaggctcaggaagatccactcacagaactagggagtgacacagctgggtgcccacttcccatgccaggcctgtctgacgaggagcccatctggggtcttgagctctggtcttccaggcccgataggtcatggacaccatccacagacctcaggccctcctgtcataggacgatggtaatcacctgtccaggcagctgccatgctggctggaggggaggagatggttcttcagtccctatctcaaggctcagccctggctcctggcagccctgattgtttgacccagaagcaggcagctccctctgcaggtccccagaacaccctgggctgggccatttctccaagctctgcctggagcctccaccctgagagaagcggcccccatctcgccagctgccacctggttcctgtaagcgtcctgcgtttcaatagtatttgacaaagagggaagcccacatggcttggagattgttctgactcactgtagaaagtgtccaaggttcccaaaatacggacacagcagtgagtcaggcatgcagcccacctaggtgcacactgtcctgtgctcctttctctccagaggacgctgggtgctgggcgcaagttcctagagaacaatggtgcccagcaggtgggcagggtatgggcctgtcctggagcgcccagcatcccgcactttttgctcgcccttctcaccaggggctgcaactaggtgggctgcatgcctgactgtaccagcaggtacaggcacagagggaggcgtggaccctgcagcaactgggccagcaggtgacagtgtgcactatggatgaggctggctcctctgaggtgcagatgcagggatgcacctggtacaagcagaattggactattttggaaagcttggcctcaatggcattttaaagtgcagatgacactgaagagtgcccttggagaaagtctgggtggggaccaaggggacagggcgatgccctctgccctgtgggaggagatgggtgagcaacaaggcttcttagcattgaaattcaccaaggccgggccgccgcttccgccgtatgttacatgtcaaagaacacttttaactaagcactgccgctttcctccggctgacttcacccagttacttaccccagtaacactgccggcagcccacttgcatcctagaggaagtactggatgagcaagcgaaacaagagaaggctcactcccaagcccatcgttcacaagccctgcctgctgtgggtggaccagggtgcccggtctccaagggagtggccctgactctgtcccctgtccttagcatgtcccttcttcccctccagccacccaccgagggaggtgccactggcaaggtgtgcacaccccagggagggcagccccacctgtgcatcctgctgagggcaactgtagctcagcgccactgaggctagagccacaacaggaggctgtgcactcacagggacaaaaataccccaaggaaatcaatgcgggccttattaatatcagacccatacgtgacaactgtcagacaatcggtcaacaaggggcctcgtgtctgcatgatcccagctaacccactgtgatcttcatgaagtgtccttctggggggtccggatcttcaaatatgaggggaagacccttcccttttattagcagctaagctctttatacttttcccatattgcggcaggttagaagtctaagctttattgtcttatgttattgaaaatccagattccggcaggcgtctccctcaggtcaagctttgtctgcgaatacattctcatttttccatgtacagagaccgtctggagaggggcagaaaaagattatgactgtaatatacttaaatccaatttatttgcctggccagaaacttccaccctccacaattgcttcctacccaagatgcttctttaattctttcttgacagggagtaacatgcggcggcctcttccagcaggtacaggcacagagggaggcatggaccctgcagcaactgggccagmaggtgacaggtggcctgagagagagggccagccgctgactgaagtttcgggttcgggactgctcatttgtgcatgagaagtgggtcctcagttgtatgttgtttaccgggagagaaatgcagtaaatggagaataacaggccgttgtccaggcaaggccaccccagcctgtggctcccttgcaggccctggcttacacttcatctcatccaggagcatctgtcttgggggcccctgggatgagggtgggccccacagcctcacttaaggtcttgatgagcctgtgtaacacttccctgcaggcttacctctgatataggctcacaatccgggaggaaaatggtttcgggggattattttattaattggcgtttgctcgttttaaatgatggatgtaaagggactgccaggacagacggaggtgtgggcatcaaacaccgcccaggcccttccccaccccccaggctgagccatgcctggggccatccttggccttagcctccctggctaatgaacctgggactgggctgccctcccaattatcatctgctggccctgcctacagcccacctcagtgcagcacagagcacaaccattaagcaccgactgtgtatgctttttcctgctaagctggaggaggcggagacggtagcaaggccggagggagtgatgggccagcaggctctgaccacagggcaggggagtgctgcactgggcagggaggacgcagggaggggcttgactgataatgtgtggagccaccgctcttcccagtttgcccaggatgttctggtattggtgctaaaagtcctgcatcccaagaaaggctcagcctcagacaaaccaggacagttggtcccccagcagctgggaacagtgacactagtccagccagtgctgctctgtcaccccagcagctgggaacggtgacactagcccagccagtgctactctgtccatctgtgtattggccagtgtctccagggaaagagaaccaacaggatatacacagatacatggagaatgatttcttatggggtcggctcatgtgattttgggggctgagaagtcccacactctgctgtctgcaagccggaggccgaggaccaccggtggtgctttccagtccaagcccaaaggcctgagagccaggggagtccgccacgtgagtcccagtgtgagtctgaagactggaaaaccaggagmaccagcatccgagggcaggagaagatgggcagcccagatcaagcagagagagcaaacgtgccctcctcatcttcctgttctactcagccctcgatgaggtggatgctgcctgcccacactgatctcatgagtgtttcatgcagtctcctgatttcaaggccttttccagaaacattctcacagacacacccagaaataatatttcactagctatctgggtatcctgtggcacagccaagtggacccataaaattcacactcatgccctgcaagtcagaagatgccctgggcctgtttctcattcatacgctgcaggtggggaggctgacctctgcctctaggaaggctcccgacgtctcatgcgctcttctccttggggcaatggccttccccaagggtactgtggatgactctgaggaaagcacagtgggtgactaccaatttgctgtccccagagagctactgggcatgaaccatttagggacgtggcaaatcacacagcaatgtgcagggtttgggataagaaactggccagcctggggaagctaattctgaaatcagcagtgggaggtctggaagctccattctcttggtatcttagtgaggatgccccaggaggggacctgtcccctgccattctccctttccatgggctgagtgcactcatcagcagggaacatgaggagctggggtgggagtcatctgagcctggatgccccctccctaagggagtgctgggaakttcagcagccagcatcagtaggcctgggatccatgcccccagcccccagtccctgctgggctgaaggcaccccaatcccagctggcctgttgctgagcagtccagaaagagcaccgaggaccatatcatgacatctgcctgtccccgtatatggacagagcagtctgatccctagcctgccgtgcaagcgtggtatgagttctgggtctctccaaggtgaagatcactcgaaggcttcttttgcaaaacggcttaggaagtggatcatttggttcataagacactgagtactgagtcacattcttcctgcacatcagaataaggcagcagcaagtctcctgagactctccaccgcaccctgcagcctccagacagtgaagcgccttattcaagagagtagaatgggacggcgtgctggctcacgcctggggaggccgaggtgggtggaggtcagctgaggtcaggatttcgagaccaacctggccaacatggtgaaatcctgtctctactaaaaatacaaaaattacccgggcttggtggcgggtgcctgtaattccagctactcaggaggctggggcagcagaattgtttgaacctggtaggcagaagttgagatcacaccactgcagtcccgcctgggtgaaagagtgaaactctgtctcaaaaaaagaaaaaaaaaaaaggtagaatgaagggaccacagtggcagggcctatggctcagtgaggggcaccaagggacatgaggcttcaggaagctacactggcctccttgcttggggagcactcccgggcatgaaccggcatgggaagggacactggatcttagtgagggcccccgccaccggcactcccagacctccaggaggccctgacaggtgggtgggaggggctgcgccatcctaatggtatcacctcttccctccactgaagggcaggtgggttgaatccgttctacttctcaggaggccaagctcctgaacggccgtcttgccagggagaagctgtgtttgagataaaatgcaaagcagcgagcacctaaataccgaggctctggttcctgagtccagatggtttccacaaacctgaacttttaggcgtgtggacaggtatcaccagcttgacctctactgagtcccctccgaaggtcaggggacaaggctgggacagcagcttcaggcatgaatctaagctcagagtcagtaccaaggaggccatgatggaccaaaaagcaggggcatttcaaatagtgataggttttgccaaatttcttccacaatgattgaaactcttttttcattgctaccaatggtgactgagtgcctattttccaacatcctcaccagcacgattatgatttttaaaacatgttgccaacttgatagtaaaatgatatatcataaattcgatttgcatttttaacttatgagttttaacacttttgctgtagccaaaatttgagaggaacttatgtgtctgtcagggggatagcagctatgtgaattactgttcatcttttcaatgtagcaacacatggcttttaaaatgatgagttccatctgtgctgatgaaatgtgtccataggaaacactttcaggacaaattaagtgaaaaaaacttgtaggacttttatgtataattttaataagctctgcacacacacacacacacacacacatgcatgtacacacatgcacccatgtgcatactctcacatgaacacgtgtaacacacrcacacacacatgcacacactcatacaattacatatgccctatgtgtacacataaccacatatgtacatgcccatgcacaccctaagcacacattcacatgcacactcatgcacattatgcatgcacacacgttcatacatacccaaatakgcacttgtgtacacacgtgcacacccacacatgcacactatgaacacacagctacacattcatgtgcacacccatacatacacacacagacaaccccaggcagagctctgtgggcttcatgtgggaagaagggaatgattattactttctgattcagggctagactgtttaggctaaatcagaaaatgtgcatagagttatcacgtacatggaacgatcattctgcaaacgttaaccactttcacgccgtttgttagctaacttaactgacaaaggaaacatattagaagaatagaaaatctgctaatttgattaaacttacattcttagaagagtttgtgaatggataaatatgacraagttcctttggctcacttcctcagaagaaacattgtgatcgatttcaccatcgttttctcaaacggtctcagtcctggacaattagctggcgtgtttgctggttggagcgcggaagccctttctgtgctgcccaaggcagcaagctcagcccctcggatgggagacctccctcagctctggcccacccctcctcgcgggcatcactctactgttaacaccatgggcatctgaaatcagttgtttgctgtcaggtttggatccacctctccgtcctttgatccagagctgccgaaagccacatactgttttcatcacctcagccaacgtctggagagcctatattcgtatagccagtgtgagaaaggtggaaactgaaaacacaagtagggaaagcaacgcttggaaaggaggtgggccrtcacggcttggaggaaacttgaaagtgaactgaatatcagactctattaaggaattatggatcattttgttaaatgtgtgtatcagycgtggcaaaatacccttatctgttaaagacacatactgaggtattcaaggtggaattacggattaccttaatacactccaggaaaaaactcggagacagtgcggaagcaagcctgcaaaacgctgatgctcactgcagctgggtgaggggcgtggaggctcactggcctagcatgcttgagtatgtttgaattttccataacaatatgttttttaaaataagaaagttaagcagctgatataattaaaacaccaacagatgagacaatgctgccgtaagtctcaaggttaccgcagggaatgcttcataacctaagtgtgttttcccaaggagttatacggcaaaaaattgatcatcattacttataaacatgctggtattcctggaaaattgaagagaacgcgttaacatattaaagcaaattggaaagkttatcagctggctagacacaaaacacaccaaatctaacagtcctcctaaatatcagccrtaacccactggaaagtatgatttttacaagatgcccattaccaagacgggcaggtgggaaaaagccccgcccctctgtactgtgcttctctctctgggcrgctcagcaactttgctcgttccagcagcagaaagtctctccccaacccctctgtcagccctggtcttcttctcccctcctcaaccatggcactcacgcccagaccaaggggcaggttgggggaacaaaccccataagcacccccaggtgccctgctctcccgctgagtcagacatgccttttcctgtgcctgatacccagatgttctccccgaggggtgtggtcttccagaagttgaagcatctccaccccactgttccagaggtgcttatgccctgccttggcataacaagggcacygtccatcctgacagttaaaccaaaatgaacgagcagatgccccagcaatgtggagctccgcctcttgcaggtggaacctacttgtagctcgtcatgatgggaggctttttagtttctgcacattacagaggtgacactcttagggttggggctcagcctgggcacctggacagtgcccaggggcctttgcagaccatggcagggagagagagagagagagagagaaagagagagagggagagggaggaagggagagggagagagagatggtaaagaaggagaagactttagcttgggacagctggtttcctccagtctgaccaggccaacatgtgaacctggtcaggaaagcttgcaaggctgtggggatgctgtctggggactgcccctgaggagccacccactggtgcactgtgataggagaagccttggcgggaaaagtgaccgagacatttgagaacaggctgagcctgatgggggccgagctgggaactggaggtgagatcccctgtgacttaagaaataggatatgcggatgtggctggaggaggaaagtggagaggtcttggctgcaccccatgacgcctcctccagcccagcccagcctgggcttcccttcactcccaggcttgcttttcttccttccttccacatctacctgccaggtaggctctgctccagccagggctgccagggagccaggggctgggaaccccgggtgtggtctttgaggaagggggtttcattgaggtgagctggtcactctgctaagggctcrgaaaggcatcacgctgggctacaaagtgcacccagctgcagatgagcaaagtcagggaaagggatgcttggctcttaaatcccatttggcttctgatggaaggggtgcgtgcaagttgccagcatgatggaagggaaatcatgaaccagatgacccggtggatccatttgtcaacggaccacttgtcagccttgggaagtccagacttcctctggggatgtacccttgccacctgtgtaccccagaaagggcttcctatggcttgtgggacaagaggtgcaaacagagaggccattactaccaacagcaatgcccagccctgcgcataggtgtgcggattgcaagcagggtccttactcagtgaggtgaagacctaggctggagctcaggtctaccggcccatcactggcatgtggctgatgctccagtgcctgccacaccccgatgcctccctaccggcccctcctgccctgtccccccgtcccctctgttctctggggtccaggggcccccactgcctgtggaggtgaacaaaacccaccccatggagaaagtttaggacctgacccagcgtgggtctggctttcctgagggcaaggaacagctttgtcccagtactggccacctggcgcctccaaatggctttttcttgcagggcaggcaggctctgggcaggcacctcgccaggcattgcgccctctgcctgcaggtcggcggggcctgctcttcccggctcctgaaatgcatttccttcccgactccgaggtcctgcttccagaacctttggcaacagaaaaggaaacccgcacaggcgtcaaatgtcttcggactgaaactagcaggtgacgaaccatacagccccaactctgctgccccgcccacagtgccccgcagacagtggcagcaacgccccgccccgcagcactgcagctgcacccccaggacgccccccgcgagcgccacgccccaaaaccgcgaggcgcccctgggagctgcctccagaccttcgttccgggaacgtttctgttctctggcattttcgtttgaagcagagatgtcaaaaaataaatgcagccaaggtgtcaataggctgccatggtatgtccagccacaccccacacaactggacctgaagtcacgactcagaaagtcacagccacgtcccgccacgcgggcgggaaaacgtggaagcaaatgcgattgcctcgactcgaggctcagctaaggagcagtcaggtccgtgtcacctgtggcttccactcccaggaagtctgatggctccggtcgtggctgttgtggggaatccgtcgtgtggagaacgtgcctgccacgtgcgggggagaaaggagccaccttccgagtacgcgacctcacctgccgggcgtgaggtgctggactgrgaccagggtggggctctgggcatgggaggtggggctgggcgtggggcacgtggcacagagggatgygcgtggtagggctcagggcagacggaacgtggaacagggagtggctcagggcatggggatggggcggggcgtgggacggggcgtggcgtggggcacaggaaggggcagggcacgaggagtggggcgagaggtgctaagtggggcctgagtggggcgcggggcgtggcgcggagtggggtggagcgggtggggcgaggctcggcgtgggacacgagggacgggacgcgggggcacggcaatgggtggcgcagggcgcactctcgggctccctgcaggtgggcagccccacctgtgcacgccgctcccccgcccagcgcctcccccgggacctgctccagaagcgccagttgcgggaccccacacggaaggcagtcttcggtggttctcactgcaattcctcttaattatgtgtgacataaaaagaccacctacagacgagacaatgctgccgtaagagtctcggggttactgcagggaattcttcataaccgaagtgtgttttccccgaggagttatgctaccatttgatttaatttttaatttttacattttaatcaaaaatagatcaaatggtggtggtctctccggggaaacacacttcagataggaagccggccatgctcctttaaatatggaaactgccgtctccgcgctgcgggctgggcgtgtcctttctgggaggggccttgggccatgcacctgaggccaccagctcgcccacgccgcccgctcacctgcacgcggaggttcatttaatccgtgcgtctatgcagcgcctaggcctaactctcccaggaggcgccagtcacgttccccagggggagctccctgacctttctgggggtgacagagtggggaagtgggcagtgtgagcccacccctgaggcgtgtgtgtgtaagcgtgcacacttgctttttaacgttctgtattctagtcaacagacagtacggttgttcagttgcaaggaaaggcgttcacactataatccaggtgtttcactggaagagatgtgtctcgcatccacagtgktcagctggcttgtcacatcacggcactgaggttggtctaggctcctgccaatatccagatgggctccaaaagcagccacccaatcccctgtgtgagcctggcggatgcactgggtgcattctgcagctgctctggacctggtgttatcatacaggggagcctggtgtggaccccatggggttgccgtggggatgaagtttccatggagtaaagtgctacagtactggctgcaggtaggaagtgaagctattttgttcctgttgttattgcaagggaaataaaggcagtctgctccctcgctctctctcagccccagcatcagcacagggcttggggcgggagggtctgtgtaaggcactgagsggggctgcgtacttggtagggaagcctccagagcccaccttccctgaggctgccttaatgccctgatgatgcccacagctctcaacctgcagccgctttctcaaattcctggattcctgcactaagtaacttactaaggccccccgcactccaggcttcctgcgtccagagctggtcagacccggacgaagccagctgagctgaatgatgaggggtccaccttctctttcactcctgtccctaaacccatggacaggtgacacccaggccacgtgaccctagctccctgagacatactttcacatccttctattttaacatggtggccttggcctctagtgcccataagagatgcccaaacccaggtttctcctcctcccatcaatgtcatttccataaagacccactggaaacatttttttttttcggatttatcaccaggaaagtaakgtggcttcccctaaagcacagatgtgcttcctttctggaggccagctgtttttgcctttgaagcccagataaaaatcgagtgctccagtctggcagcctgacttttggtccaagtgtctccccctcaatactatttgcaatttgtctcctgcctctgcctctgtggctcatcacaggacttcatcccagtcatggggcatcacaggccccctatcatcttggtgccctggagcccagtaagcagacagatggaagctatcagggaggaggaggcaggaaggggaggacagcaggcttgccagccctctgtggatatatgacggctgtctgggggtcagctgtccagctcacccctacagctgcaggacagcaggcccaggggaaagatgacctggctgtggtccctccctggacccacctgccttgacagagggtaagagccccagtctgtgggtgcccctcctactggccaggttggctgagagtaggttccctctctcctggggcgcccaatctctgccatccccctccttagccccatcattacctagcctgtgactggctggatacacactcgcctaagtccccagtaccctctgctgggacaccagggtccctgcaagtccccaactcacgtcacagggcaagtggattcagctgttccagatccatgggagcccaaagaattgagacgtgcagggacctcggtcacttttaggctccaagggccacctactagccccacggctacaaaagctccagatactctggtgcaccaagtcttcctgtagaccacgcaatgcagaggaagccatgagcttgagagacatcttctttttaagagtcagaatctcctctgtctcccaggctggagtggagtggtataaccatggctcactgtcatcttgaactcctgggctcaaacaatcctcccgcctcagtcccccaagcagctaggagtacagacatgcgccaccatacccagttagttttatttatttattcttagacatagggtctcgctatattgcccaggctggtttccaactcctggtctcagaggatcctcctacctcggcctccccagtcactggggttacagatgtgagccaccgtgcccagctccattttcttaatataaccaaatgcagacgctctgaaatgtgcaaggccgcagctggcccctaggactccggggctccttctctcagcactatcccaggtttacccctgrgagacaagccccagcttgtgctccttgccagcccactgcccgggcttcctttgcaatgtcaggtgcagcacctgggctcatgcgtttgcacctcctatgttggatctccatccacagggaaatcatccagtggcgatcatggagacagcaggcatctttgagcaatgggggctcgggcaagctccccctctgccactggagggaacacygtgcaggggcccctcgccaccctgktgtgttgtgactctgtggctcatttattcagagccggagctccaaacgactgattccaagtggaaaacatgccccgggtgccatccagggtgggacaagcatggtgtgcggcagacygggcagcccctgggccagccagatcgcctccacctggaggggcccttgttgaaccagccccgggaagatgcttgagtaccctttggtcctgggcaggggcttggggaccggagcccccactcagaccggtgggtgctcaaaggtgggtcctgataagggaacctacaggggttttgggttcacgctgtggccaactcacgctgacttcgcagtcactttgttgtcgctgctaccagtgacagttcttttgcagacaacatgtagaaagaggcgctttgagtcctgagggagaccattccaccggcaggactgagtctgggtttttagaattggaagacctcaccaaaataacaattagggagatttaaaagtcaaaggaaatgacttaaatattaaatgaaaaattcaagatgttaatttgaatttctatccttgtagatggtattgctacagaatcaaaggagagaaagaggaaaatacaccgatggctgtaaaaccatcggtgatgaaattgagtggtttaaaatctcatctccaagtgttctgtgttttcagggcctcgacagtgtgcatggatagcttttatacccaggagaaaatcatcagccataatggaaaaacgggaggcggggcaggattcaaaaacagaaaacaggtggtgggacccgcctgggcgagacattcctggcaggctgcaggcgcatgactgagaagcaggaatgggccacgctcacacccaaacttccactctcgctggccccggccaagtgcagaattgcggctgtggctccccaagttctgaggctcattaagaataggttcagctgggtgcagtggctcacgcctgcaatcccagcactttgggaagccaaggcgggaggatcacttgagcccaggagttcaagaccagcctgagcaacatggctgaacaacaacaaaaattaaccagacgtggcagcgtgcgcctgtggtcccagctacatgggaggtcaaagctgcagtgagccctggttgctccaccgcactccagcctagataacggagcaagaccctgtccattcattcatacataaataaaataatcagaatcatcttagtcacaaaataaaggcaaaatggaaaataacgggtagtaaggccttaaaacaatgtgtttttttaaagaaacttgaacatctatacatgccgtttctacctccattaccatagggagcatctgagttcatttcacataaacaaagaagcatgcattctctctcagatgctatttaagaaattattctaagagattgttttgaatataaagagcatgtggcaaccgaatcagctcttaacacgggatgtaaaccctggcgcctctccgtctggggtcagttcctgctggagcactgacctcagccataggcaggtgtgtggccttggccagtgccccgacttccttgtctccaacatggatgatggtcccatctcaggctgtggagggaccactgagctgttacgtgcaaaacacgccggcccgtgcgtggacaggtgcagcgctggctgtgattacagtccttagattccactgctaagccaacttgccatttattcaaggttcatgtttgaaacacacaaaaaatggaaaactacaatacatagcgaacatccatgttctcaccagaattaactgttaacacttggtcatacttgcttttgcttttgtgatacttagcaaacggtgaccgttgtgctcaccttccttcagtggctgttgagtctcatctccctctcctacccccgcctcattaagagtctcatctccctctcctacccccgcctcattaagagtctcatctccctctccyaccccygcctcattaagagtctcatctccctctcctacccccgcctcattaagagtctcatctccctctcytacccccgcctcattaagagtctcatctccctctcccgcccccacctagttaagagtctcatctccctctcccgcccccacctagttaagagtctcatctccctctcccgcccccacctagttaagagtctcatctccctctcyyrcccccacctagttaagagtctcatctccctctccyrcccccacctagttaagagtctcatctccctctcctaccccygcctcattaagagtctcatctccctctccyacccctgcctcattaagagtctcatctccctctccyrcccccacctagttaagagtctcatctccctctctcgcccccacctagttaagagtctcatctccctctcccgcccccacctcaggaggccaccaccatacatccttccggcctgtataaaatagcttctctacttttgccctgggttaggaacctggacgggagcccgatgggggtcacatgctgctctatggagctccttgaggcaaagaagtgggggtccatgtaccccacacaggacagcggtcacccctgggccacccaatcatggagggtgactccaggtacctccaggtgaggcagcttgaaccaccagggcgatctctggagaaggtagccatgggagccgggagcaccaagcacagtcccccacacccagaagcatccccggsatagttactgcccccagatgacacagccaggacacgtgaggtgcaagctgggtctcrcgcccagaccagctttgaggaggctgccccagcctgcgtcagccccataggacacttgaggttacacagctgaatctttggaccccctcaccttgtcatcatagactttyactgtacctatctaatcacaaacgtaagctgcctattttaatatcaggagctattttaataaaagtacaggattaaaggaagagcttagaccaggacaccagtgaataagactatcggtcaactaatcagcgttrctctttcatggtcctctcagtacccttgaagataaagaaaattattagtagagcatttgaaaattcttgcattcactctgaagagaaaaacaatgcatgttctaagaatgttttccaaacagctaactctagtcgagtagtggtggaggtcattcgtacagtaaacctttgcagccaaacaggaataccaagtgggcagagtcttgcacatttctatgaattgtgtatacagaggaactatgggcaggcagtggcaaaatgttgagttttgttacgctagaagtttctaagtgttttttgtttgtttgtttgtttgtttggagatggagtcttgctctgtggcccaggctggagtgcagtggcatgatctcggctcactgcaacctccgactccagggttcaggcgattctcctacctcagcctcctgagtagctgggactacaggcccctgccatcacacccagctaatttttgtatttttagtagaaacggggtttcactatgttggccaggatggtctcgatctcctgatatatcacatgacctcgtgatccgcctgccttggtctcccaaagtgctgggattacaggcgtgagccaccacgcccggccaaagttgctaagtttttatactgatggagagcttgaaagaatataaaaaatacttcaggatgttttttaagccgctaaaacaaaactgttattcattaaggtttttgggaccacagagtcagaccccctggttcttgcctctacctctgtgatggtgttttccagaacaaggccccaggcatgtgagacccccacaggaatatttccaccggtgtcaggagcttgctgttgggcgtgagactcaagggggcgaatggctgggactcggggcagtttgcgggtagcacagcagccaagagggctcctcgaaagccaggacttttggacaagggatcccgagtacatctgtcaattactatggatgccagtgaaaccgcgtcttaagtggaaccatctggaaagacaaggaagctttgtcagagtctcctcccactctgttgccaggaggctggcccagcaccaactcaaggagaaactgtgggtccctgggagagtgggggaaggccccttagggaccatgcctggatggggagattctcacgtgggagagtgagtgtctgaacccaaatggaaaggacgagagcaagygtgagccatccctccaagtgccaccgtgggtcatgggccagtatgctgttttgaattttattgtggcaggaacacttgccatcagatctgtccttttagcagagttttaagtgtacaacatggcattgttacctacaggcacagtgttgttcgcagatctcgggaacccatgcatctgccataagtgaaattttatactggctgacttgcaactgcccgttttccctccctccagctcctggcaagcatcattctattctgggcttctgtgagctcaaagtttccaggttccacatagaagtgaatcacacagtatgttttttcctgtgtctggcttgtttcacttagcatgatgtcctccagctttgtccatgttgtcacataggacagggtttcctcctttttaaagactgagtaatattccatcatatgtataagtcacattttcctcatctgctgtctttgagtgggcatgcaggttgttttcacatccaggctattgtgaatagtgctacaatgaacaaaggagtgctaataactctttgagatctcattagaattcttttggatacatacgcaaaagtgagattgctggatcatagggtagtgctattttcagttttctgaggaacttccacactgttttccatagcggctgcaccattttgcattcctaccaacagtgggtatggctgccaatttcttcacattctcaccaacacttgtcttttgttttttaaatgggtgtgaggtggtatctcattgtgattttgatttgcaatgccctgatgagtagtaacattgcatatcttttcatctatctgttaaaggcatcacactttctaattttgaaatatattacawagctacagtaataaaaatggtatagtactgacataaagacaaatctatagaccaatggaatagagtcaagaaataaatccaaccatatatggtcaactgctcttcaataagggtgccaagaatataaaatgggggaaatacagtctccaacaaatggtattgagaaaactggatatgcaaatacaaaagaatgaaattgaacgattatcttacaccatacaaaaaaaaatcaactcaaaatggattaaagacttcaatgtaagtcctaaaactataaaactcctagatttccccaagtgggctaatgcctagcaaacaaacagaaaacaaaaaactcccagaaaaaaaacagagagaaggtttcatgacattggaattgatttcatggatattaccccaaaagcacaggcaacaaaagcaaaaatagacaagtgggatttcatcaaattgaaaagcttctttacagcaaaggaagcaatcaagagtgaaaaggcaacctacagaatgggagaaaatatttgcaaaccacatatctgataaaaggtcaattaccaaaatatataaggaattcacacaactcaaaagcaaaaaaagtaatagcccaatttaaaaatgggctttggacatttctccaaaggagacataggaatggccatgggtcattttcgatcatcaacaacttgcagtgattgccccaggcatttatgactcctgagatataatttcttccactgatttaaactcatttttaaaaagtttgtcaagaatgtttgaaaaaattaagaattatgaatcatcactgaattggctttcctgaaatctgaataaatgggcctcacctggccgggcacggtggctcacgcctgtaagcccagcactttaggaggccgaggcaggcagatcatgaggtcaggagtttgagaccagcctggccaacatggtgaaaccccatctctactaaaaatacaaaaaaaatagccggatgtggtggtgcgggcctgtggtcccagctacttgggaggctgaggcaggggaattgcttgaacccaggaggcagaggttgcagtgagctgagatcgcatcactgtactccagcctggataacagagcaagactccgtctccaaaagtaaaaaaaaaaaaaaaaaaaaaaaaaaagaaagaaaagaaaaatgggccttatcagaagagtgatgaaatagatcattttaactgaaaaatgcattggtggctgatgrttgttaactttttaaataactttactctttttaataatggtcactgaataaatgagtaaatgcaatttaaagtaagtaaatttagatgtcagaaaggaaatcttgtttgtcctgatttagggctgaaaacatcaccgtgtatttagtaaatgtgcaattaacccttaccgaccctagcaagccactggtggtctttgggatcctgcccagagggaagcgctgcccctcatggctccaagctccagtggccgtaccagaagatcaggggtgggggtgccgtcatgagcaggatgagggcagcacccctgagagccgctgcatgcacagggctcaacagcaagggtcatgctgagtcaagcgttcagtgaataccccaggaccttcatgtgggtgactgagaactcatacttggctggtccatagtcagtgagaaatgaggaaaagaaacaatgtcattttacagagaaagggaagggttgagccattgagagttttttatttctttcatttttttaaattaaattaaatctattttattttattttattttgaaatggagtctygctctgtcgcccaggctggagtgcagtggcgctctctyggctcactgcaagctccgcctcctgggttcatgccattctcctgcctcagcctcctgagtagctgggattacaggcacccaccaccgcacctggctaattttttgtatttttagtagagacggggtttcaccatgttagccaagatggtctcgatctcctgacctcrtgatccgcctgcctcggtctcccaaagtgctgggattacaggcgtgagccactgtgcccggccagttgctttcattttttatacagagtctcactgtgtctcccaggctggagtaggtggctcgatcatggctcactgcagccttgatctcctgggctcaagtgactctcccacttcagtctcactactcgctgaaagtacaggcatatgctaccagcaggcccagctatttttttttttttttgtaaagatgaggtttcaccgtgttgcccacgctggtcttgaactcctgggttcatatgatcctcccgcctcagcctcccaaagtgctgggattacaggtgtgagctaccacatctggctgaatttttaatttttcatggtggtaagatatacatggcataaaattcaccatttaaaccgtttttaagtgtgtagttcagcagcattgtttcacactgttgtacaaccatcatccccctatccatctccagaactctcatcttccccatctgcaactcagtgcccattaaacgctaaatccctgctgtcccctctgggcccttccaagtttgcactaggaccaccctgtctttctaccaagatgccgaagacttgacagtgatcacagaaaccaaggccaggaaatcctcaccaaatactcttgacatattggtaagcaactggggggccagaagtttctaaaggtcctcaaaaaactgcataaaaatcacgaatcctagctaagaggcagtgggtagagaagatgaggtctgagacagcctctccacgaggcctgtgattgtgggkgaagggggcttcacaacagggtcagcatgtggatggcagagggctggctttaatcctatgccactgtggccctgggcactggagtggcgggttctgaggcctgtgcaagagcacgcggtaaaagtggctatgaacaccatgctccattccaagagcgtcaaatgcagacctatgtcactaactcctcagtgagtgatgatgcaggtactgttgttattctcatttcagataaggaaactgagtaagtggcagaggagccccaggcaggcagcctgcccaggccctcagacgtcatgactccaggaagtggcaccaaggtgaggggcttcctagactggcaaggtaaactgttcaaattattccccaaaacagaatgctttccactctagagccagggaattgtctgcacctccacaagattccatgttaccatattctaaatgatgtgggcaggcaatgtgctataacagtcctgagcatggtctgtggcatctcctgggagcttattcgaaatgcagaatcccaggccttgccccagacttaagagtctgcattttaaccagacacccacccctactccaccaccccacaatccatgtgcagttctaggagtgagsgtctgragaaggcagatgctggagtggaggccaggtctgaccccagcatctgactgtggacaagtgatgcagcctccttgggcctctcytcttagtacagtgaaggtacttcttctctcaaggagttctgggggttaaatatgctaatgtaagtcaagtattcagcacggtgtctgacatacagggtgctcaggaaggatgggcttcctgaggacagccacacaaaacaaaacaaaatcattatgaaattgatgaagcatgtagaaatttgatcaaaatttccctttgcatctgggaaaaatgcactagtaggttttaaacagcattttttttttttttttcagaaatgatctggtataacagttacacatagaaacagtaattgaaccaagatgatctgggatgagcttaaagtgcaggacctatctatactaacgaaacaggaaagtgtttatcagagcaaaatgtaccacgtgtctgtgtaagtctyaatactgtaaagctaccccttatcctgcaattcatcaataatcagcacagaccccatcaacactttatgtgggttttttttttgagatttgacaaaatgatcctaaagttgatcatacccatgcaggtgtactagacctgggcacacatttattcgctcttctgcatgtgtgttatattttaataaaaaggccacccacacacatgcacaatgttatggccaatgcatgagaaagatcaaagaacagagaagcaagtaaagaaactacaccatgtatgataaaaatggaatggacagtcaatggaaaagatgtggttagaataactggttaatatttggggaaaaaacacagttagatatatcactctttaccctccagaaagttgtagctagagtaaagttttaaatgtcagaattgtgcaaaaatgtagatgtgtaagttacaatcaactcatgtaatgtagatgaccttgggggaaagaaaggcctttctcaaatgattgcaaggctagaagccagcaaaaaaagaggctgacagatatgacagagaaaaattgtgtggcaaatgatatataaatatcattgaaaacaaagtgaaaaataataaactgggaaaaatatttccaacatgagagaaaaacagattcaatggccttaatatataaagaactcttaaaaataaataaagacacatgctccagtagaaaaatgggcaaaggtggaaagtttacaaaagacacacacggccagtaagcatctccraaaagcagtgtgtggcatgcaaattaaaactgcaactagcaaagatcatactggcatcaatcaaaagagaagacttgctaaaaaatctaaatagaatccacttaagcttctacatcaactaccaatttgtaggaaacacaggtcagggaagcagataaaacctcagggagatataattagcgaaatcagcacaaactctataatccagttagtggaggggaaagagagagagagagaagatccttgcatagagagagatacttaggaacccatcagcttgtcacagtgtgtggccctgattcggatcccaattcacacaagttgtaaaacacaaaacaaaacaaaatcatcatgaaattgatgaagcatgtagaaatttgatcaaaagctagctatttcatgatataaggaattactgtaaattgtgtgttaggagtgacgactgtattgtggttttgcttttcaaatgtctctttaggagagacattgaaaaaaagcacagctgcagtcatattctgtctggtatttgcatctaacagtgggaccaggtgggaacaggcaggcaggactggcagtggccgatcatcactggagctggataagaactgacggggttccttgtcctgtttgtttgtcctgcctacttttgtgggtgcaaagtgctccatgctaaaaaaaaaagtttctgccaatgttygtgcacagggacaggacatgggctcttggtacctttccagagggcagaaaaccagaaggtgccctctgcaccagcagcacaacttctagaatgttcttttgaatataattgcaaaactttacagaatataaggatgtttagacagcaacttctataatagcaagtagatagatacaacctaagcactcattatgaaggaactgggtaaatgtagcatttccatttaatggtatactgtgtaatcacttaaaatggtaatgatcacttaaaatggtaatctaatatatattaattgacatgaaaagagttacatgatgttaacattaaaaagtatgtgcagccgggcgcagtggctcacgcctgtaatcccagcactttgggaggccaaggcggatggatcacaaggtcaggagatcgagaccatcctggctaacacggtgaaaccccatctctactaaaagtacaaaaaaattagccgggcgtggtagcgggcacctgcagtcccagctatcgggaggctgaggcaggagaatggtgtgaacctgggaggtggagcttgcagtgagccgagatcacgccactgcactccaggctgggtgacagagcgagactccgtctcaaaaaaaaaaaaaaaaaaaaaagtatatgctaggccgggcgcggtggctcacacctgtaatcccagcactaggagaggccaaggtgagcagatggcttgagcccagaagttcaagaccagcctaggcaacatggtgaagccccacctctacaaaaaatacaaaaattagccaggcgtggtgacacatgcctgtggtcccagctgctcaggatgctgaggaggtactcatctgggcccgaggaagtcaaggctgcagtgagccgtgcttgcaccactgcactccagcctgggtaacaggagtgggaccttgtctcaaaataaaataaactataaattttaaaagtacatgcttgggagcatatattcacatagaaaaaattttgaaaggacgcacatcaaaatgtgaacatgagttacttttgagtaatgggattatggacgacttagtttcatgtttatctaaaatttataattaaaaatttttttctttaataagtatggatttcaagtatactttttgttttaaaaacaaatttggaaataaactatatttttgaaggaggaaaaacatgtcaaatgatgttaacacatctttgttaaccacttaccatgcttttgaatgttctaaaatgagtttcgtaagttgttggtttagaaaccattacaaacttactttgtgaaattattaaaggtacgttttgacatttttagcccctatatccccccaaaagcaataacagattataattaaagaacaaattgaaaatttatctaatggacatacagacacatcaatgcccagtctgtttcctcagggtgtaagaaaatgtctttttcctcctcttttgacaagaatacaaagatgaagcactttaaagggataatcccatttcacgctcrtcatgggtgcatcaagacccagtttagtgaaatctatgcaggttttgcctattagctaatctgttttagtacctgtggtgctgacaaattaatttgccagggagaaacagttctgcacggggtgagctcctccaggtaatcccagcaggaggcgggttgggctggagagcagagaccgtcctgtggccagggatgactctggagccagggaggtggggctgaaggccaggatggatgccagggcagctgtgacagcaagtcagggggtgggtggagggcggctgccaggggacaacaaggccacgggcaggacctctgttcacacgaggccagagtaggatgggactgaggtgtggaccacacctaggaaaatctggaatttctgagccttctatttcatggcctgtactaaaatggctgaaaacaccaagaaaatgttgccatccccctttttaggtacccagtcacaagctcctccattcccttcacagtctggaaaatccagcacctggataaagctgctggttctccactgtggtggttaatatcaagtgtcaacttgattgaaggatgccaagtattgatcctgggtgtgtctgtgagggtgttgccaaaggagattcacagttgagtcagtggactgggagaggcggactcaccctcaatctgggtgggtaccatctaatcagctgccagcttggccagaataatgcaagcaggagaatgtggaaagactagactggctgagtcttccaggcttcctctttctcccgtgctggatgcttcctgcccttgaacatcgaactccaagttcttcagcttttggactcttggacttacaccagtggtttgcaagggctgttgggccttcagccacagactgaaggatgcactatcgacttctctacttttgaggttttgggactcaggctgccttccttgctcctcagcttgcagacggcctattgtgggacctcaccttgtgatcatgcaagtcaatactccttaataaactccccttcacatatacacttatcctattctgtccctctagagaaccctaatacacccacattctggccagttacacctcatccctttcgtccttgtcacctgggtcatcaggttttgtgagctttgcttttccagaaccgaaggcctgctttggggtggaggggctgtgtaccaggagggagggcactgacactgaggagtcacactgtgggctaagggcaaaccccaagggcracctccccaccacacagatgggaaccagaggctccaagaagtctaaggactcatcaaggtcaggtggagatggtcggtggagatgagatgggaactcaygtctgtctgactctgaagcgggggcattttccttggggcaggaggatgcccggggactgttctctacaaaagccagcttcgtatgaacagctggagggacgcgtgccacgtcagctacaaaacacccacctgacaccgggtggacacctgctctctccatgaacgagggtgagaaggaagagtttacacacaaaaaagaacatgctgtccatctaagagttttctttttttcccgtaaaaattagacgtgtatctcattttggaaaagagaagaacaaactaaagctcttcataaagatctttcgtaaggctacaaacgccaataccttctccctctttcccggctttggttgtttggcacgaactggcattttttgatcgagtcatagctctgggatcttacccaggcttaatgaagacgtgtcctgtaattctggatcatccatatcccaggtggtgctgtactggtttcaacaccttgtcttcctctgctccatctttcccgtatggaactctcccatgaccgaatgccatgatgacttatagagggggctcttcccacatcagtgccraggacactccctggagggagcacattccctgcagataacgtgatgcggacaggagcttacaaacaggacatctcaggaagctttcaaacccagagaaaataatgccagcctcacagtcagacgatacattgaaaacccaagagaaaatgagtaatttccacttgaatataaaagggattctgtctctgataacttcagttggggaacagattggacactagcatttagtaaaattcactccaagattagaacattttaaatataaaaataagccttttaatgaaagagtgtgtaaatagccctgggtacatccacaaaacaacgaaaaagcatgatggcggggctgcgtctgggtgggcctccataggccatgagtgcccaagctcataggaagtttgatacaaaattttttgacttgtaaataatgcaattgatctccctctcaaccaggaacattcgaaaggaggctgtagtacgtagtaaggatttgggggctcttttgaagtgatgtggattctcctggctctcgtgcagaggatggtggatttactagaatgaaaggacagacaaacctccccccacccacagaggacaccgggctgctatttgaacaggtaagtccccaaacccatctgtaggagattcacatttgctgcaacatgaagggttcaaaaccaaaactgggaccttcttttttccagcttgcatcttctaatgattcttggtatggctaaaatgtccctacaaagataaaacagcacattgcgggaattaatttaccttggccaaattaatacaccttggctatatatacatttgccaacacaaagcactacatttaaaatgactacttgtaagtgataacttaattcctgaggtatctgttyatagatatattaatatatattacattataattaagatatttaaagcatttccagtagtgrctggtacacagaagactttcaataaatgttacttcccttctttcctatagtactttgaggaatagcaagagaatgaaaatactattcatatattcataaaataaatttttaaaaaaatgtctaaatattgaatcaggattcagcacaaaagcaacacaaaagtggctcctctcaccagggacatccgggagtaagagaggctcacggcaatccccrccagggcccctccggcccccaacccatttcctagagcaggcctctcatctcctcaccttcacccgcagaagtaactgggagaaccagatggctggggatagacagttggccagacacygtaccactgtgcaatgagaggctcgtcagcatctaggaatctctgtcacacttggccacatatcctggcacatagcagcgtggcactctggcccacaggcagagacaggcacagcctccctgtcctgaaaggactccaccatcagggcaacaggctcctgagctggctgcagcccaggaagggtggggtaggctgggcagtggggaaacaaagaagtccagttcttgatgatgtccctgcttcctggaaggcaggggctgccctgacccacagggaccagacaggagagactctgaacttgcctggagggattatcagacagcagagtactgacgtcagatactgatggctccttcgagtgatcagaacgaaatgctacaggagccagggaagacagcacgtgaccctacctggtgaggggcytgaagaaggcttcacacaagacaggaatctcgggtgggccacgaaggagcaagagaatctttggaggtgggaaggtatacctcaagcagtaagmacagtacaaggtcagactgttccaggatcggagaagctgtggcggctggagcaggggcttgtggcgcacatggcagggatgggagcagctgtctgggaggtcaagcaacactgagatttgaagggccctggatgccatggtgaatacaggtgctgcatttactcaacaggcctgcgcttcccagaatattcccagaatcacatgtgtagcaggtatccctttacaaaaggacattttggaaacmagtttcttcatgcaattctcgaggtctttcacagtctaatggacatcaagtctctaaaaggcaggggaaagtatgtagcatttcctgaacttctctggacaagaacctgttctgttgggagactctgaacgcaggagcccagctggcaaatcacggctctgggctgtgcactgaaggggcagagtcagtggaagcctgggaggctcacttggaggtgccgtggggtgcgcagacccaggaggcagcaggcgtctcttagrgaagagacaggggaactgcagggaaatgctgtttaattcatttcgtcatcaccaaccacagaacttgaaaaacacaatgatttcttttttaaaaamagctattcactgaggtgacttattcctgacgcatccttccctgctctgttcaaggaggggtatacctggaagacatgtttgagacagaaaggataaaacgtggggacaaagagccacatcaatttgaggactgagacctggatttttttttttttttttttttttgagacagggtctggctctgtcacccaggctggagtgcagtgtcacaatgatggctcactgcagcctcagcctcctaggctcaagagatcctctcatctcagcctcctgagtagctgggactgcaggtgcttgccgccacacctggctaatttttttttttttttttttggtagagacagggtttcatcatgttgtccaggctggtctagaactcctggcctcaggcgatccactcgccttagcctcccaaagtcttgggattataggtgtgaaccaacgcagctggccaagacccagaatcttagacacaaaggaacctttagaaattgctctttagaccttttgccccggtgtgatctcaagcccccgcaccattctactctctcttagacacaaaggaacctttcgaaattgctcatttaaacctctgccctggcatgatctcaagtccccgcatcatcctactctctcttcttgacacgtcccagtttgtctctgtctctctcaaagcaagcagcccccagtgacacccaaagagaagcctcgtactgaccccaatctagactggggctgggccagtgggacctcaagtcatcagactctgggactcacagatggcccacaccagccaccagaggcaggtctgacgaggagcatcaggctcattgtgcctcgactgtgagtcttactgcagacaattaaaatgccttgcctcctgtttggtcaggcttgaaaagtgatttgatcagcaataatgggaaaacccttttccacttttggtaaaacacaattccacggagcaagagaacgatgtttgtgaagagggagtttttatttgcttctaaccttggratgaaaagggcccagggccagctgcttctggttgcacctgctgcccagcgccttctcctccacacccttggggcacacgtgtgtggcctcagcccttctttcatctctcactgcaacggcttctttgtggggtttgccaccacgcatgaactccctcaaaacgtccccctttcctttttggaagccttcctcgctgggctctccatgacctctctgtggagccggaaggacagcagggccaacagggacacacctcactccatctgggaccattaygtgaaacacccagattgatgccctcacctctggtacatctagctgcaagtcatccctgtggactgggggaggagagaactgcaccccacatctccttccctttttgctgaagccatttttccttaatgggcagagccctggctgtggctagctctctgcttctccccgagtacctgtgtgacaggatgacagcagccctctgtgggttaaagatgttgacgattcctgccattaccatctgccagaggagtcattttttcttcctttaacagcatattcgtctttactaccacaaaacactgtcccttctcaagagaattctacaaaggcctacagtaaaagcttggacctctaagacaatcatccgtctttaccagcatgcatctttgtatgatgaaatgtctttagagcacctgctgtgccctgtgccgagggacacctgtcacacccttgcctcatcttcctcccttccttcttggaggcgtcaacacttgaaagtgggcgtgcacccttctgtaccagtcatagccccaacaggaaacagatacatgggcgaacaggagacctcacaaaggggttattacaaaaggatttgtcacaaagttgtcctgggagccgcgagggacagtgcaggggccagacccaagggataaagggcagcagcggctaccagaacctggaaggaggagatgacacatgctgctgagtgacactggccaggggacatggccacataccctgccctcgttctccagcctcctgttgcctgccccaaatccccctagcggctgagcccaaagggaagtgggagagcccaggtgcccycggcaccccctggatgtaagccatgcaggctggcctcctgtgcagatgccaggaaaggtgggcagtggatctgacctggaagggcaaacagaacacaaagcccagacatgaacttaccagagacttcacctcagccattttaaatatggtcaaagaactaaagaaggtcatggccgggcacggtggctctcgcctgtaatcccagcactttgggaggccgaggtgggtggatcacttgaggtcaggagtttgagaccagcctgatcaacaaggtgaaaccccatctctactgaaaatacaaaagtcgccaggcatggtggcacacacctgtaatcccaactacttgggtggctgaggcaggagaatcgcttgaacctgggaagcggaggttgcagtgagctgagatcatgccattgcactccagcgtgggcaacgagagcaaaactccatctcaaaaaaaaaaaaaaaaaaaagaagattatgattaagaattaaagaaaagcagaatgatgtctcaccaaatagataattatcaataaagagagaattttatacatataaactaaacagaagttctacagttctacagtttagaagtataagtgaaattaaaaactcattaacggggatcaacagcagatttgagcaagcagaagaaagaactagtgaacacaaaatcaattgagattatccagtttgaggaacaggaaaaaaaaagcgaagaaaaatgaacagagcttcgaagacacctgtgcagctccatcaggtgtcccaacacacctctaagcgggagtctcagaggaaaaggacacagagaaagggcagaaagagtatttttaaaataatggccaaagacttcgcagatttgatttgaaaacattaatctatatatacaagaaactcaattaacttccactagcatgaacccaaagggatccacacctaaacacatcataacaaagtgatctagaaccaaagaatcttgaacacagaaagggagaagcgacatactatgtgcaagtgagcctcagtgataccaacagctgatttctcatcagacatcatggagtgagaggcagcsagatgacatactccaagtgccagaagaaagactgtcagcacctgttactctacttcaaaaccatgtggccacatatgcctttcctcaatatccaacaaaaccaaacgacattgaaattataatgatagagaaattaagacatccccagataaacaaaaacagaaaatctgtcgctagaagacttgccttacaagaaatgctgatgaaatacagaacactagatagtaacttacatcctcacrctgcaaccatgtgaatggagttttgttcttctaattgactgttaccagtaagtaagagtctatctatttttgtgtgttcatcttatattcaacaatcttgctggatattagttctactagtctatctgcagattttctggaaaatttttttttaagagatggggtctcaccctgctgcctgggatggagtacagtggcataatcatagctcactgcagcctccaactactgggctcaggcaatcctcctgtctcagcctcccaaagtgctgggattataagcatgagtcactgtggtcagccttggatattctatgtagataattataccatctggaaataacaatttagatttttctctttccaattcttatgtccattgtttcttttttttttcttatcacattatgccagctaggagccctagcataccgagcagaagtgctaatagcatcctcgtccttttctcttcaacacagatgcttccactaagtatcacgtccttaatttttaccagaagaaagccttctatttctggtttgtggagtttttaaatatatatcatgaatgggattcgcatctgactgtatgctgttgctgcatgtaacagatgatctctattttccctttkatcagacaatgcagtcatttttctaatgttaaatcatccatgtgttctttcatacagggtttttaaaatctgtaaaatccctgtgatgggagctttttgataaccttcccagatccttccattgttactgatctgattctgttctctgttcttgagtcagttttggtaactgaattttctggggtggggagaggaaccccactgcagtggccatcgcacccccggacctggtgcagcctgtccacatgcacgtcacagtgcagtccccttagcagctcaaagatgcattccaagctcttctggcatctattgctactaatgagagatctgttgtcaaattatcatcccttcatgcttagccagtcatttctctctagcagctctacacgtttctctgcctttgatgtcctccagtgtcatgatgacctatctatgtgtggatacatcacrcccaagactcacaaaacttaggggataaaacattagatatcaccaaaacactgcaccctgagcccttccactcagtagaaataacgcccttattttgaagttgtttaccactctcataaatgtttttattcctttagtagatatatatcaatgtttcccatgcttaaaattgtatctagatagtatcattctacgtagatccttctgtaatttccttttttctccatttgatttgatccattttcactgctctctgtaacayttcattgagtaaatctattgcaattcatttattcattctattgatgaacatttaggttgtttctggcttttcttactctaacagtgcaacaacaaatattttgttttgttttgttttgagacagagtcttgctccgtcacccaggctggagtgcagtggtgggatcttggctcactgcaacttccacctcacaggctcaagtgattctcttgcctcagcctcctgagtagctgggactacaggcatgcgccaccatgcctagctaatgttttttgtatttttagtagagatgaggtttcaccatattggccaggctggtctcaaactcctgaccttaagtgatctgcctgcctcagcctcccaaatacaacaaatattttgtatacactttcttgggcatctactagggtatacacctaggaccatatcttctagcttaccagaaatgcccaccataagctttacccatgtacatggcttctgaggaagtgaacacatcctttcactctacctcactcacagttatagcaccatttttatttttgctaatttgatggtttaatttgcaagcccttaaattactagtaaggttgaacacctatttatatttaytggctattttgggtttcctcttctctgaactgccaggtcatatactttgcccatttatttactggactgatttgcatatttattcaagaaacccatctttatattttgtgcattgtaaatatctttcctgcaaaaagcttttcttagacaatgatgaaagaattctgatatgtagcatgtcttaatatatrcagttatattctatatattttttttgagacacagtttcactcttgttgcccaggctggagtgcaatggcacaatctcggctcaccgcaacctctgcctcctggattcaagagattctcctgcctcagcctcccgagtagctgggactacaggcatgcaccatgcctggctaattttttatttgcagtagagatgcagtttctccatgttggtcaggctggtcttgaactcccaacctcaggtgatctgcccaccttggcctcccaaagtgctgggattataggcatgagccaccgcgcctggccgtcatattctatattttctactaacaatgttaaaggtttttctttcatatataggttcttattaactcccacccccacctcccacctcctagaattgattttgtgtgaggcagagatstaattttatctttcctcatatatggataactaattgccctggcacaatttataggtgtatgtaaatctcatttataatgccttcaaactgccatatatgcatgtttaaagatctcaattttatttcattggttagtctacacttaggccaattaacacattgtcttaatggtcacagctttgtaatatatcttgatatctgatggataatttcccttgcttgttattctacttcaaaattgtttgaccacatatgcctttcttcaattctggaaaattctcagccattatcttttcaactattctactcaaacattctctaaagtccttccttctggatttcctaatgggcattctcattctttcctctatgactcctaattacacttttatactatccatctttttatctctcttgctgtgcttgggggatttatccagctctatcttctaattcactaattctgtctttaactgtgtctaatctgatgactttttaaaaaaacttcaatgaacatatcatgcacttttagttctttttaaaaaaaccttccaattttttttcaaactgtcttcctttcttactatggctctatttcttctttaatcattttataaaataactacaggatacttcagagacatggcaggcttggttgcagaacactgcaataaagtgagtcacacaaattttttggtttctcagtgcatatacaagttttgtttacaatatgcttgtagtctattaagtgtgcaacaacattctgcctaaaaatatgtacacaccttaatttaaaaatactttgttgttttaaaatgctgacacagaagcatgagatgaggatatgcttttgggacaatggcaccaaacagacttgttcaatgcaaggttgccacaaatcttcaatgtgtaaaaaccacagtaccttcaaagcacaataaagtgaagtgcaataaaatgagttgtgcccgtactttatatccaccttcaggttcttcaattatttcagattgttagagactttgattctactgtttatttcttgacccctcttctcaccatggtggtagatttgtttatgtgcttatttttctagtgtgatcttatcctccgtgggggttgttttatctccaaatctcctacacactgggtggtggaggcatgcctacaggacagttctgcacctgctgccacccaaggccttcaggacttcaatgggctgcaactgtttttatggcagggcttctacttttggttcctgtatgactgagataaaataaacttggagcccatacccatgcatggcctggtattgtaatttccagtccccttttagggtacaatcagatcttcaggctctaaactttatgcaaggatccaaattctagctcccacacctttgttaggccaaaaccacatctatctctggacgtsagcattccagttcccagccctgggtgcaatctaggaccaaacccaacaagtacccagacccaggaacggccactaaagagtgtgttggtcccaacggcactacttttgttttctctcttcgcctattacrtgatcagctgtgtgttttttttttatcagagtctaccttgagtctctgcagcaggagggggacacatctgtgttggttttatctaacatgtttgtaggaagtctaaattgaacttgtttcttttttcttctagtcatctgaagcccctcagctccttcagtgccagaaaatgacctaaataacagttaaaaatttttttaaaggtagtttttcaatatccatattccagagaaagtactcactgtcagctactgctagatgctaaatctgaagattttgtcagtggtctattcatacccatctattctgggattcgtatttggctatactgacacagccagactcttccattcccagcttattccctcacagtgtgagtaaatcagccctgtrtcttagccaagagcttctcactgtgtccggggatgaagtccacaaaaacccgcactgtcactgccacagttctcatagggtgttcgagcctgacgctgggccgccagtcttggggagtgatgccggcatgctgactgcaaacacactgatcagccaaaaagagcagaaagcagagggggctccaagcagagtgctcaggcccctgcctccccatcaaccacggtgcatggcagtccaatggcttagcccctggggacctcactttccttatctgtaaattgacagggttagaccaatgaactccaggatccttgacaaacctgggggtagaaatgcatggagcacaacttgattcttacagaatgatcaatgaagttcccgttgatccctccatgattgtgttttcttctctcaggacagaagaagaaagaactgacaaggatgcttgctatcagctgtggccgagacaggacacaaagagcagggcactgcgcatcgatctctgttcatcgatatcagaacgttacatttccatctttggtcccgtccccagcttgacactcggacccgccctagcaagcacaggcagtgttctcagccgtcactgcaggcaccagaggagggcagagatcactgggttccaaggcttcctgttctagtgcagtatttatagatgatgtaggtgtagaaagcaatgaccaataatgtacaaatatgtaaacaaaataaacagaaatactttaaaggtaacccatttggagataaaaagaaatacaaagaaaaaatgcatccatttagaatcagaataatcatactttggctcctcctggtgtccctacaagggaaaactgaaccaaaacaataggtttggaccaaacacctcccttcccctgccctcaatttctactcctacgttggctgactccacacacacagacatgcacacacactacatatgtacacagacacacacatgcacacacaccatatataccacacacacaaatgttgtcaggcaatagatttcaatgtcaaaaagtgaataatacggaggcttattaagactgctcctttgctatttgccctcaatgaaaaaaaaaagaaaaaaagataaggctaatgacaatgctggtatccagaatcaacgtggggagcggagactccatggcaccaggaaacaccatgttttgcatgctggcttttcagtggtaactccctacccgtttgagtaataaaaaccaataaccacagataaaaggcagcgaaggagcattagcgatgggcaacattgaagggcctgactgtatttttaactttcatgtccaggctctcgggactcatgtggcttatcaccaggatcagccctgccagcactctggagtgccaagcttgcggactactgactgagcccttgcaggggacaatacaggcccggagacctctgttagaaacagcaactttcctccccaggagaatctgtccattcattagctgattagcgctggtaagaaaacagaaaccaatctaggtatatttcaaacagagggactgtaacaagatttggctacacaaatgatggaagagatgagaagccaaacgggggagctgatatggttcggctctgtgtccccacccaaatctcatctggaattatactccacacatgttggaagggagctggtgggaggtgactggatcatgggggcggacttccccttgctgttctcgtgatagtgagttctcatgagatctggttgtttgaaagtgcatagcacttcccctctggcgctctctctctctcctgctgccatggtaaggcatgcttgcttccccttcaccttccaccaggattgtaagtttcctgaggcctcccagccatgcttcctgtacagcctgtggaactgtgagtcaactagatctcttttctttataaattatccagtctcaggtagtttttgtgtgtgtatgtgtgtgttttttgtttgtttgtttktttttttttttggaaatgatggagtctcattctgtcactcaggctggagtgcaatggcgcaatcttggctcaatgcaacctccacctcccaggttcaagcgattttcctgcctcattctcccaagctggaattacaggcaccaggtagttctttatagcgatgtgaaaatggactactacaggagccaaacactcaccaggaggacaaagggaggaggaggtggamctcgcaagagatgggcccagagggactactctgcaggagctatgtactgcgggagggctagagagagagagaaatgctctggcctcctcctccttctcccccacattcctgtgtcccaccaatgcctcacgttggctggattctcccagaagtcagaagcaaaggagtctgggaaacagtctccacaacacagaggaggggcagacaaaggaggtcggagctgagaaaaaaacaggcaacaggctgaccagtgacccagtaagatctgagggtggccccttctccagaggattccagcactgagaggctacaaaacgtcagagaccagagaccactaggaaaacacggtgctgaggaaatatcatcatatctcccctcaaccaatatcctaaatcctttctacagttctctgccttataagccttcctccccttttcatgtaccttcttttgattattttggagacctctggcagacccctaaggtttcatttaattgctctgaatttgcaaggagcagcttcatttccatttcacacttggttaccgtgtggcctgtgcacacgcaagccgcgcgatccgggaatggaagcctgcagcctaggtgactgtccagcatgggagccattggtggcaggaaaggaagcctcctagccatggcgatcatcctctacgagacttgcagccccagacagcacatgacagggagagcaagcagcccgaccctgggcaggagcggacgccctgatgctgcaagactgggtcccaccacattcatttcgatcatcagtaacatgagcagggtgattcagggctacgaggtgacggtcctaaataataatgtacagcaggagataaaccctaacagtaattactataagaaaccacctcagtcactcctgaaatagtaaccattgtaacaatggttacaatacgccagaatgagtcaacagaaatagaccgaaatgcaaacttggaaaatgaggttgaagaggtctaccgaggaagtccttgcatatgagaaaatgtcaaaaccctgtatgtgtgagaaacaactcaatcataaacataaggaaaagcttaggaacagaaggaccaccaagctcagacggctatactgagaattcagagcagaacagatcagattagctgacatcctacgaaggtcaaaaatacactagagaattcaggatgcaagggagcttactggagaacagccaccaaataaactgagaatcacatgtaagtttcccattaggaatkccacacaaactacccctcacatcaccttggcttctctctgaccaagagaaccattctgagctgcctacgggcatcatgggagagtgggcaggcccacgtgtaagcaggcatttgtgaatggaactgcaagtttaataaagtcttctgaaatttggaattgtgccccattggtgatttattgttaagcacgactcccagggatcttgcatctctaaaaatactatttgctttttatttaacactgaaccttttgatgttttataatacaaaaatagtgtcttattattttaaaagcttaggagagaaactagccatattattagaagaagaagatatatgcagctatagtctgttcaaatatcaagaggtgtgacttttcaaattcacatttcaatctttatttacattagacttkcagaagtagtgggtgtaaatattaaaacgcccaagcctgggtgaaattttattgagaataactacaaataaaaggaaactgattttttaaagtcagtttctgaaatttagatgaaaagaatattgagtattaacaaaaaaatgatatttacatatcaatgaaggttttctgctcatagattcatttcctacgaaacataacagaggcaagcttggggaattacaaagaaaggaaaaaccctaatcaaataggtactgttgttcaaacagaatattagccaaaatgatccaatcagttgcttgaactaaattttttttttctttaagccattcatgccagaacacaagctctcaaagcagtaagaatctgtactacattccaagtgtttgcttccaacagatggggggatgtgaaagatacattccatggaaatggggtggggacaaagaaggcaccggtcagtcatcggcaaacaaggaatgcaaccccaatggaggcatagttctcaaagtaagcattattcgtttgtattctagggtatgtttaacagttacatgaatcaacataagcatactaaattcaagttgctggatctttaatttcaacattgttcagaattacaccatagaatgcaacataacctatgaaaatttttctaaagagagtacaaaaagtagcaaagtataccttcatggaatgagttacatactaaactttgttttcctatttgtctaaggacttcagataattagaggttcaccctgtcatcagacacggtgatggctgtcatggtttcaggtctccgtttgaaacaaaatcagtgcttatcatcgtaaaacacagtagcttacagtatgtcaattgaggatctccataatttattgactcaatcttttgcttatcaaaaacagcaatacatttctctaaagatctttagggggcaatctcagaaatacacatatacacacgcacaaattcctggtttctaggtggaatttaaatataattctattttattgcaatattaagattccaaatgtaaaattaaagaaacccaagaattatagaggttatcaaagacatattaacttgttcttggagtaagttcaaaattaataacaaaggtattattatgctaatatatactttatgatattctgcccagtagaagagactgagaatctgactctggcagtttctgacctccctttactttgaattaatggtgtraacactgtgtttgcttctgaaatctgtgatttatgtgaagtttatgatagaaacatgcaagaaaagcataaacagggaaaagaaaaaagcaatgttgattgctatttggaaaattaaatgagaaagatcttttctccaagatgtccttaaatrattctctattttaaccaaatccagtggcctggtccctttcctaaaccctgttttttagaaggaattttaaatgtatttgcaatttatatttccaatctgaagctggacacaaattagtttgtacaccgatagaatgctaagaaaagcttaaatcaattttcacctttttatttatgttcctcattcttcagaaacataattgcagtttttattaactttgttttatggatctaatatttaagaagaagtctatcttttatgtcacagcaagaaggttaatgcacttacagattcccctgcaatacatcttgggcaaggctgggctgagctccttccaccattctgagaaatctagttaacaaatcacagttgcagatatatcagaacaatgattatttacactttctattaaaatatttcaacatgctcacaagtagtttggtgggaagaggaacatacccctgtacttagcctcccctggccactctctggccttggtgctgggaggcagcctcttgatggaagctcccggtcctctgggccccaggaygccagggcacaggcaktcacctggtggcagccacrctcatgcccactggcttctaatctcctgcatacccgtttctgaaacaaacaaaattttactttagatggtctcataaagcacacaacactctaattgaatttgctttcagaaaacttcagctgcaaatacagacccctgtggagctggaaaactttatagggcatttgaggagatgactttaaactttatcttttcagaataacaatcatccattacatttaacctcattatttcwtgcattgcctgatatttacttagctttatacatttaaaayagtcatttcaaataattttggctgaaactcttgtaataaamtatggtgactggtttattgatrttgaaaatgtgsaaaacctataaattttgttcaagaaactagttatatgcttttgcttagtatcaagttacatactttcttaatacaatatgaataattcacatgtgactacttctgtgtctcactggcactgaagagcaaattaattttatttacaaaggttgcatacacagtccataactgataacctttgggaaagttagcatttggtttttactactatgtgaactaaagaaaataattacaaaaggaatcctgtaatgctaaagaaaaaaagtactcagtttgaaagtcccaagactttgtgtatttttagggtaacaatgttgtaactgacacagagtttcagaggcaggaggacctctgtaaacagtcatggaggccaccctggcccagggcgagaaatccaccccaggarccctggcagccagcccaagaggccccgctgctggacagccctgatgtcagaacacacttcatggtacactggcatctccccaacctctgcagtcacttgcaaaccacctttatcacttttgcaaaatgtgtttattatccatactactattatttaatatattattaatggactttttcacttaatgcatctacacaatatagaaaccttatgacagactagaaatgatgcattaaaaatgggagatgagggaaaaggaagagaggagaattctcattactgtatagttcattatcatataagcaataggtgagtattaactgatgctgaaaaaactgagaatcagacaataaagggttaaataataaaacaggggacctaaggatattaaatcggtttaaatacaaataatcactagaaaatacaaatccttctacatccaaaattttaaaagaacaagacccaactatacagatgtacttaaaatcaagtgattctgaaaggctaaaaataaaaaggatggaccaaggtataatagagaaataaaaacaaaaagagagcaggagcagatcacatagaacataagcccaaagtgttaaatacaaccaaggactttttttttaatgctaaaagccacagttcacagtgaagacataatgctcatgaacacctatgagccgaataatacaaccataacctttatcaaacaaagactacaggagatgtgagcaaacacggttagaaacatactaataacaggaggtttcatacaccattctcagtacaaggcagagcaagtacacagaaaacaagtaaggagatagatttaaacaacataatcaaccaaggttgaccttatggacatatatattgaactctgtaccctgataatagagtatacacattcctctcaagaactcacagcacagttacaactgatggcattaaaggaaaaaacaatgatttctatagggtagaaatgtagccaatactttctgattataatgcaataaactatcaattattaacaaaaacaaaaaaacagaaaggcacttccacctggaaatttaagagtcttattatttcttaggtcaccaactgagaggaaagaatttaaaaaaaaattacaatgaaaacactacatatcagaatccatgaaatacatttaaagcagtaatcagagaaaaattcattgcattgacacttttatcaataaaaatgaaagaatgaaaattaattaataattcccagccaggcacggtggctcacacctgtaatcccagcactttgggaggctaaggcaggcagatcgcttgaggccaggagtttgagaccaacctgggcaatatggtaccctgtctctaccaaaaaatataaaaattagccaggcatggtggtgcacctgtagtcccagctactcaggaggctgaggtaggaagattgagcccataaggctgaggctgaagtgagctgacatcatgccactgcactccaccctgggtaacagagtgagactgtctcaaaaaataaataatamcaataataattcccagctcataaaaactaggaaaagaacaagaaagcaaaacaaaagaaaacacaaagaaaaaataaaggaaaaagctaaaattaatgagaaaaaagaatatataagataaaattaatgaggtagagaatagaaaaacagtagatctaatgtacaaatataaatcctggtttttggagggaaaaaagtagataaaccactagttaagttactcaagaaaaaggaggagtgaatacaaaaatagaaaataagaaaggacacaggggaaataaccaatgaaacaagaaattataaaaatcttaagggaatatttcacagacctctatgcaaatgaatttgaaaaatgtagatgtaactgataacttcctaaggatagtctgattaccaaaactgatcccattagagttagaaagcttaaactgatgatttcccagaagaaacagaaagagttattaagtaactacccacaagcccaaggaccagacggtttcccaggagaattctcccaaaccttcaaaggccaggtaatgccaatgctctatgaagaagattctagcacactatctccttttatcaagcaaatgtaacactgataagccagacagaaagtacaagaaaatacaactacacaccaatcagttgctcggtatcgatgtaaaaatatgaaatgaggtctaagatattcgaaatattaggaaactatataatgtactatattaataaacataaggaagtagtgtgatgacctccatagattctgaaaaatcctttaacaaaatttaaaacctatttacgataaaagttaaagaaaacaggaattgagggttatactgttaaattaataaaatacacattccttaattcattactaaatgggggaaaaactaatagcatttctactactatcaggacagggcaaagatgctcactgtctccatttctgttcaacactgtatgagaggtattacccaatatattgagacgagagaaatcaatcagcattataaaaaggggtaaagtagtaaaaccacttctatttgcagttgaaaaccatatatatatatatctggaaacccccagagaatcaataataaaattaactcaaacaataaaagaattcactaacacagaattaacatacaaaaatcaatagctttcaaatacaaaataataatcagagaaaacgccatttaaaataattgcaacaaggattaaatatctaggaacaaatttaacaagaattgcacaaaatctatacaaggagaatgtaaggcattcttgaaagacactaaagtagatatgaacaagagaaaagacatccccaactcttggataggataacccaacattataaagatgacagttctccctaaaaattaatttgtaaattcaatataatcccagtaaaaatcccagtaaactattttatacagttatactagttgatactaacggtcacaatgaaaaacaaatatgcaagaagagccaggaaaaccctgaaggaaaaaataaaacaactcctggacacgaaaacaaaccatagacactccataattaaacacagtggcacacaaggagacaaacagaccagtgtggtagcattaaaagtccagatataaatcaaaatatatatgaaagtttggcttcaaatcactgtgataaggatggactttttatacatacatatatratcttctttttttttttagagatgaggtctcactatgttgaccaggctggtctcacactcctggcctcaagcaatcctcccttcttggcttcccaaagtgctgggattataggtatgagccactgtgcccagcaggatggactttttaatatacggtcccaggacaacttggagccatttggagaaaagaaatttagatctgcacctcacaccatgacatggtttggctgtgtccctaccaatctcatcttgaattgtagctcctataattcccacrtgttgtgggagggacccagtgggggataattgaatcatgggggcggttcccctacacggtcctcgtgttagtgaataagtctcacgagatctgatgttttataaggggcttcccttttgcttggttctcattctctctcatgcctgctgccacgtaagacgtgcctttcaccttctgcaatgattgtgaggcctccccaggcacacagaactttgagtccattaaacttctttttctttataaattacccagtctccagtatgtctttatcagcagcgtgaaaacagactaatacaaccacatacaaaaccaaaccagatgcattagggacctgaatgcaaaagatctaattataaagaactatgcaattcctaggagaaaatacaagtgaattctctaatcttggtgtagggaaagattttctaactatgattcaaaatacagaggcaataaaatcaagattgacaagtttgactatatgaaaataaaaacttctgtaaggccaaacaaacaaaaaaatcctaaacaacatcaaaagataactgataaaaggggaagaaaaatgtttgcaatatataccacagaaaaagggtgaataacctgaatataagaaactgttacaaaagctgagcaaaaaaggaccaaaaacctgaaagataaatggagaaaagacataaacaatttaaaaaagctattaaaatggtcctcaaacatgaaaaaaagtgttcaaatgcactcatatttaaagaaatacaaattaagtcaacatcaagatatcatttatcatcagaatggcaaaaattgtagaatgtggtgtagcccctgttggtgaggctgcaggaaaacaggcacctcctgctttgctggtgagaatgcaaattcttgcagggaaatttggcaatacaaagctatatgcacattttttaacccagcaattacaactctagaatctacccaaaacatacacctccaacgatatgggaaaaaagcacatttgcacagttattcaatagtgcaatatattggaaacaacctaaatgcccctacactggagagtggttggataaactatggtacatccaagcaacgaagtactaggcaactgagaaaaggaagaggaagatttccatgaactggtctagagtgatttccagaatacattgttaagtgaaaacaacaaagtgcaaaagagtatctataatatgctatcctttgtgtaagaaagaaggggttataagaaaatggacactatctgctcatttctgcaaaagaaatacaggaaggatatttgagaaatgaaagagactgctttcctacagagagtggataggaaagggctggggaacagggtggcatgggaacagaaatgaagagggagtgtagagctctgcattaaagcaccagagtaacatttcacatgccaaaaagtgagggaaaaatgkaagtaaaccaagacatagggggagaggaacccaagtggaatacaaaaataatgaacctaactacattacaaataagtaacatagccacactgaaaagaactaccccaaataacttttaaaaatactattttgggccaggcatggtggctcatgcctgcaatcccagcactttgggaggccaaggtgggcagatcacaaggtcaggaatttgagactagcctggccaatatggtaaaaccccatctctactaaaaatacaaaaaaaaaattagccaggcgtggtggcaggcacctgtagtcccagctacttgggaggctgaggcaggagaatcacttgaacacgggaggtggaggttgcagtgagccaagattgcaccactgcactccaacctgtgcaacagagcragactccatctcaaaaagaaaaaaaaactattttgactagaaactcaaacgctaaataaagacgacaaaaagcactgtatagaaatcctgtactctagctagtaaatgtgtttattacagggttagcaatttttgaaattactttattggcattggataaataagtaaatacactgtaaataacaagagcaaagtttctcactgtttaagaaataagctacaaatacagaaaagggagaggctacaatgaacccagtggtgttgcattagaatttttratacatatccagacagagatatagaaatatataaagatatgtatgtgtgagttactgtgtgtgcaggtgatacacacacacacacacacacatacatatatatatcctagctgtgtccactaaggacagtggcatcctagtagcaagattacacttatcacctagaaattggtttcgaaataccattttcccttaaaaggaatctggactccatgggaagcagctgattcagggaaggagtagggaaaatacaagatgagcctcaaacacttcataggccaaaaacttagaaagttcttgtaaaatgagggcatgtcaaaaagacaaaggcatacacctgaaggacttcctgttggccaaagctggaatgatttaagcaataaaataaataaaaaacagcactggataatccacagaataaagtaaatgcctattagtctacccatatcaaaaataattgagtaaatamatagctgaaaagggaaaggacttccttacagttgaattctaattaacaaatgcaaaaggaaagaaggaaatacattaagtaaataccacagtaaaaattattgcaggcaagatctaataatagatgctaaaattaggaggcaaaagtttaaggagaaactggatgtttgcacagcctcaaactatcttccccaagattngtattaattgtaaagagaaaaatagtaactttaccgtggataaaaccatcgtaatcaagtgacaaggttaacaacagcagtaatgggacacaataccatgaaccctcctccgtacaacgtaccaagatggcacaacatcacttctgcagtactcatgccaaaaatgcrcaccctgactctaatcataagaaaatgtgggacaacaaaataactaaccaataatcactaagtgtcgaggtcctaaaagactgtcaaagtgtcacagattggaagagaggaaggaaacacaataactaaatgcaatgtgggatcctgggttagatcttgcaacagaaaaaggatattagaggaaaaactggtaaaatggaataaggtctatagttaacagtactacaccaacattaatttcatggcatgctaactatactaagatcattaacaagcttaagtgaaggatgtatatgaactctatactatgtttttgcaacctttctgtatgtctaaaactatttcaaaataacaagttttttaaaatgaaaaaaaaaatatcttgcatccctaatgtgagagaaatactgatctaaaccaaattgccttctcacaacctcaacccactgtttctaattattctcctttgagcaacataaaataaacaaarccccttgtgtatgagataaacattcagatatttgatgatcattctcagacactttggaggcttgttctctccaaccaaatatccctagtctctctcactattccatttcaaagatgttcttcagactcttcatatcctagacaccctagtccagtgtttctaaattgccaatatcccgcttaaaataaaccacgcaaaatactttcaatgccatgtaactagcagagtagaatcaccacttgmcactgtgtttgcacaggagaaacccacactaggtcaacagccccagcaaccacatcacacacaggtccatgcgagctcacctcccctgcaaccccctcagcttctccacacaaacgtactctctcattcctggggcttattaagtcgtctttgtcttcctctttttcttcttttaatttaactgtaggctctcctatgtacactagttaaatctgatttccatggaatatgtatttgatttgtagcatatcaaaatatattcaatccttattctgccatatattacagtaatcgtattaatcatccttaggacttttgcaaataatgcagccttctatgtcttcacctaagttggatgacagtttgaagaactaagaccaaggctttcaatctctggttattcaggatctgctcaatccttacagtgcaaaaggaggtgtgttatgttaaaactggtttgctgtcaactttcaatcamctggattaaaggggaaaagtggaaatattaagtattccccacataattttacaagtttcaattttcccccatcagtaacaccatagtcggctaatagcaataatattatttcccttcctcttttctcaataacacaggacttactcaaaaggaaagcaaacaggcatgcatgaatatgaatgagaacctgtactttctggatgaaatttacaacacttatgaaactatattctacaccttttctgtgtggttgaatggcccttggcacattaaggtcagcagacttgtgattatctgcaatgaaaagctgacattcttcaaggggcgcagggggctgaagggccagggtcccgacagcctgtagtaggagaaaggagagccaagccatactctgccaccaaggcgagcagagygtgggttctagtagggaatgtgaggatgacatctcagtggcactcagccagcacagtgaattaatttattcatattttctgttacttactgtggattattgagagctgaccacatacgatactgatctayacacttacttgggaaatagttcagttgtcatggatgggcctggaccaaagaaaaatgactgccacagaggcatttacatctggggctgcttacgttgaacgagaagatctgtcagccttcgcaaaggcagatgaaggcttatgccaagctaaaaagacacttgtactatatgaacgaaatgaaaatcctaagtatacacaaggaccccattacataacaataactagaatagatcaagtgaccagcatcctcatcagagaaaggtgaagcaggagcgtggccgagaaatagacgctgtttcaaacgatgctaaattaaaatagcaaacagggatggtgctgcctcaatgatagaaacacacgaagctgccacagrtctcaggaagycttgctgcctgtcctgaggaggcaagaccaaccatttgttgagggggacttcttccttttccggaggtgatggtcccaagtgagcttaatgagtgaagtgtctataagggatagggggttgaagacctaacagtttgccagagatgagattcaaagctttggtttctgtgctgagaagagccagcccttatatgaaccagacaggggacatctccccaaagcccctagaaacacacagcagagccagagaacacggagcagggtgagcagagcccagcgccagctctgccaccggtggggctctgccatgctggcagcctccgctctgggctcaagaggagggtggagaatagagaagaggcatggttctctgacctcttcaacagaaaagcaccacatactctcttcagtcagcaaagcaagaaaatggcacactcttcaacatcaaacacactgaattaagcatatgtattacatgtgttaacacgtgagcgagcatatgagttaagcaaatatacagcaaattaacataccaaaggagctagccaggtgcagtggctcactcctgtaatcccagcactttgggaggtcaaggcgggtggatcacctgagatcaggagttcgagascagcctggccaacatggtgaaattscgtctctactaaacatacaaaaaattagccaggcgtggtggcacgtgcctataattccagctactcaggaggctaaggaaggagaatcacttgaacccgggaggcagaggttgtagtgagccaggatcgcgccattgcactccagcctcagcaacaagagcgaaactccatttcaaaaaaataaattatataaataaaataccaaaggaaatcattagaaatcagtaatgcaattaataagtccacaagaaaatatattttatataaaataatctaatctttcattttgaaggtattttgagaatttttattgactaatggcccttatgccgaagatcatttgtagtgtaagtgtataatgctgggtaattcagtccttaggtaccaggaacagtcagctgagggaggtttctttggttcagtttagttcaagtcctaccatgataaagttacttctgcaggatggagcagctgatacggatgcccattggtctgaacacagaacaggtaatgctggatggaacaagattgagaaggcgccacagattgccatttagaaagaaagcattctttccatcaagtaaagattcctttcctatgacattttcatttggagaatgaccttgtactcttaggaggtttctttctatgacatttggtactgcatcaactaaggagggccagaagttaggattctcacactgaactcctgcattaccagggcacactggggctttaccaacaggatcttaacatcttgatactgtgaccttttttaaaaaagactcctcagcctactatgctcgagctttcagtccacactcttgaccaagtctagcttggcnaagagaaggcaagttctgatatgagcaagccaacactcaaagtaagagggcaactgaattctaggggagtgagttatcttgagataatggagaagattaaggaaaaaccactcttctactttgattctgaaaaagacataaatgaacacattggacttgttgaggattaattttaggcttgcaaggtttaccaagcacactgtaaacctaagttatagtcctgaataaattaaggatcttaaggaaagcagttatgcacatttacttgcaacaggcagagcctaataaatgtcctctgcatttatagaaaactagtttagatgtttccacatttgttatttcatttgatcctcacaataatcctgtgacaatggagggatatggagttttatttctattttatagatgaggaaaaagaagtaaaaaaaaaccttagccaacttgcctgaagtctggtgatatgaaatgactgagctgggtcagctgggtcttgagtctgctttcaggctaagtggagaaataagactgaaaaatacaactaaagaagcactagaaactaaacaatgtataaaaaagacttcaaaacttaatataatagaaacttaatatacagctccagtaatcaatatggtattggcataaggatgaacatacaggtcaatggcacagaactgagagtccagaaatgaacccttatatttatggtcaaatgatctttgacaagggtgccaagaaaattcaatggagaaagaacagtctttagaagacatggtgctgacacgattcaatatccacatgtaaaaagataaagttggcctcttgacatatatcatgcacaaaaattaacttgaaatggatcagaagcctaaatgtaagaactaaaagtgtaaaatttttaaaggagaacatagggaaaaaaaatccttatgatcttggaataggcaaatatttctcagatacaacaccaaaagaatgatccctaaaagaaacaagttgaaaatttggatttcatcaatattcaaaggtttggggcttcaaacaacaccattaagaaagtggaagctggcaagatggccaaataggaacagctccagtctgcagctcccagcaagatcaatgcagaaggcgggtgatttctgcatttacaactgaagtacctagctcatctcattgggactagttatacagtgggtgcagcccatggagggacaactgaagcagggtggggcatcgcctaacccgggaagcacaaggggtcacggaactccctccccagccaagggaagccgtgagggagtgtgccatgaggaacggtgcactccagcccagawactatgcttttcccatggtcttcgcaacccacagaccaggagattccctcgggtgcctacaccaccagggccctgggtttcaagcacaaaactgggcggccatttgggcagacaccaagctaactgcaggagttttttttcataccccagtggcacctggaacaccagtgagacagaaccattcactcccctggaaagggggctgaagccagggagccaagtggtctagctcagtggatcccacccccaaggagcccagcaagctaagatccactggcttgaaattctcactgccagcacagcagtatgaagtcaacctgggatgcttgagcttggtggggggcgggcggggcatctgccattaccaaggcttgagtaggcggttttcccctcacagtgtaaacaaagcctccaggaagttcgaactgggtggagcccaccacagtttgacaaagccactgtagccagactgcctctctagattcctccactctggtcagggcatctctaaaagaaaggcagcagcgccagtcaggggcttatagataaaattcccatctccctggggcagagcatctaggagaaggggcaactgtgggcacagcttcagcagacttaaacgttcctgcctaccagctctgaagagagaagcgggatctcctagcacagcactcaagctctgctaagggacagactgcctcctcaagtgggtccctggcccctgtgcctcctgactgagagatacctcccagcaggggttgacygacacctcatagaggagagctccagctggcatctggcaggtgcccctctgggacgaagcttccagaagaaggaacaggcagcaatcttyggtgttctgcagcctctgctggtgatacccagacaaacagggtctggagtggacctccagcaaactccagcatacctgcagcaaaggagcatgactcttagaaggaaaactaacaaacagaaagcatcaacatcaacaaaaaggacatccacacagaacccccatccaaaggtcaccaacatcaaagaccaaaggtagataaatccatgaagatgaggaaaaaccagcacaaaaaggctgaaaattccaaaaaccagaatgcctcttctcctccaaaggaatacaactcctcgccagcaagagaacaaaactggagagagaatgagtttgatgagtcaacagaagtaggcttcagaagatgggtaataacaaatttctctgagctaaaggagcatgttttaacccaatgtaaggaagctaagaaccttgaaaaaagttagatgaattgctaactagaataaccagtttagacaataacataaatgacctgatggagctgaaaaacacagcacgagaacttcatgaagcatacacaagtatcaacagccaaatcgaccaagccaaagaaaggatatcagagattgaagatcaacttaatgaaataaagcatgaagataagattaagaaaaaagaatgaaaaggaatgaaccaascctccaagaaatatgggaccatgtgaaaagaccaaacctacatttgactagtgtacctgaaagtgacagggagaatggaaccaacttggaaaccctcttcaggatattatccagaaaaacttacccaacctagcaagacaggacaactttcaaattcaagaaatacagagaacaccacaaagatactccttgagaagagcaaccccaagatacataatcgtcagattcactaagattgaaatgaagaaaaaaatgttaagggcagccagagagaaaggttgggttacccacaaagggaagcctatcagactaacagcagatctctcagcagaaaccctacaagccagaagagagtgggggccaatattcaacattcttaaagaaaagaattttcaacccagaatttcatattcagccaaactaagcttcattaagtgaaacataaataaaatcctttacagacaagcaaatgctgagagattttgtcaccaccaggcctaccttacaaaagctcctgagggaagcattaaatatggaaaggaaaaactggtaccagccactgcaaaaacataccaaattgtaaagaccatcgacastatgaagaaactgcatcaattaacgggcaaaataactagctagcatcataatgacagaatcaaattcacacataacaatattaaccttaaacataaatgggataaatgcccccaattaaaagacacagcctggaaaactggataaagagtcaagacccatcggtgtgctgtattcaggagacccatctcacctgcaaagacacacataggctcaaaataaagggatggaggaatatttaccaagcaaacggaaagcaaaaaaagcagggttacaatcctagtctctgataaaacagactttaaaccaatgaagatmaaaaaaaagacaaagaagggcattacataatggtaaagggatgaatgcaacaagaagagctaactatcctaagtatatatgcacccaatagaggagcacccagattcataaagcaagttctaagagacctacaaagagatttagactcccacacaataatagtgggagattgtaacaccccattgtcaatattagatagatcaacragacagaaaattaacaaagatattcaggatttgaactcagctctcractaagcagacctaatagacatctatagaactctctaccccaaatcagcagaatayacattcttctcagcaccacattgcacttattctaaaattgaccacataattggaagtaaaacattcctcagcaaaygcaaaagaacggaaatcaaaacagtctctcagaccacagtrcaatcaaattagaattcaggattaagaaattcactcaaaaccgcacaactacatggaaactgaacaacctggtcctgaatgactaataggtaaataacgaaattaaggcagaaataaataagttctttgaaatcaatgagaacaaagacacaatgtaccagaatctctgagacacagctaaagcagtgtttagagggaaagttatagcactaaatgccacaggagaaagtgggaaagatcaaaaattgacatcctaccatcacaattaaaagaactagagaagcaagagcaaacacattcagaagctagcagaagacaagaaataactaagatcagagcagaactgaaggagatagagatacaaaaaaacccttcaaaaaaatcaatgaatccaggagctgattttttgaaaagattaacaaaatacataggccactagccagactgataaagaataaaagagagaagaaccaaacagacacaataaaaaatgataaagggggccaggcgcggtggctcacacctgtaatcccagcactttgggaggccgaggcgggcggatcacgaggtcagattgagattgtcctggctaacacaggtgaaaccccatctctactaaaaatataaaaagttaaccaagtgtagtggcgggcacctgtagtcccagctactcaggaggctgaggcaggagaatggcatgaacccgggaggcggagcttgcagtaagccaagatcgtgccactgtactccagcctgggcaacagagcgagactccatctcaccattaaaaaaaaaaaaaaattataaagtggatatcaccactgatcccacagaaatacaaactaccatcagagaatactataaacggctctacacaaataaactcaaaaatctagaagaaatggatacattcctggatacatataccctcccgaaactaaaccaggaagaagtcaaatccctgaatagaccaataacaagttctgaaattaaggcagtaattaatagcctaccaaccaaaaaaagcccaggatcagacagattcacaggcaaattctaccagaggtacaaagaggagctggtaccattccttctgaaactattccaaacaacagaaaaagagggactcctctctaactcattttatgaggccagcatcattctgataccaaaatctggcagagacacaacaaaaaaagaaaatttcaggtcaatatccctgatgaacattgatgtgaaaatcctcaataaaatactggcaaactgattccagcagcacatcaaaaagcttatccaccacaatcaagttggcttcatccctgggatgcaaggctggttcaacatacacaaatcaataaatgtaatccatgacataagcagaaccaatgacaaaaaccacatgattgtctcaatagatgcagaaagggcctctgataaaattcaccagcccttcatgmtaaaaactctcaataaactaggtactgatggaatgtatttcaaaataataagagctatttatgacaaacccacagccaatgtcatactgaatgggcaaaagctggaagcattccctttgaaaaccagcacaagacaaggatcccctccctcaccactcctattcaacatagtattggaagttctggccagggcaatcaggcaaaagaaagaaataaaggtattcaaataggaagagaggaagtcaagttgtctctgcttgcagatgacatgattgtatatttaggaaaccccattgtctcagcaaaaaaatctccttaagctgataagcaacttcagcaaagtctcaggatacaaaatcaatgtgcaaaactcaaaaacattcctatacaccaataatagacaaacagagggccaaatcatgagtgaactcccattcacaattgctacaaagagaataaaatacctaggaatccaacttacaagggatgtgaaggacctcttcacaattgctacaaagagaataaaatacctaggaatccaacttacaagggatgtgaaggacctcttcaaggagaactacaaaccactgctcaaggaaataaaagaggacacaaacaaatggaaaaacattccatgctcatggaaaggaataatcaatatcgggaaaatggccatactgcccaaagtaatttatagattcaaagctatcaccatcaagctaccactgactttcttcatagaattagaaaaaactactttaaatttcatatggaaccaaaaaagagcccgcatagccaagacaatcctaagcaaaaagaacaaagctggaggcatcacgctgcctgactttaaactatactaaaggctacagtaaacaaaacagcatggtactggtaccaaaacagacatacagaccaatggaacagaacaggggcctcagaaataacgccacacatctacaaccttctgatctttgacaaagctgacaaaaacaaacaatggggaaaggactctctatttaataaatggtgttgggaagactggctagccatatgcagaaaactgaaactggaccccttccttacaccttatacaaaaattaactcaagatggattaaagacttaaacataggacctaaaatcataaaaaccctagaagaaaacctaggcaataccattcaggacacaggcatggacaaagacttcatgactaaaacaccaaaagcaatgacaacaaaagccaaaattgatgaatgggatctaattaaactaaggagcttctgcacagcaaaagaaactatcatcagagtgaacaggcaacctacagaatgggagaaaatttttgcaatctctccatctgatgaagggctaatatccagaatctacaaggaacttaaacaaatttacaagaaaaaaataaacaaccccatcagaaagtgggtaaaggacatgaacagacacctctgaaaagaagacatttatgaggccaacgaacatgaaaaaatgctcatcatcactggtcattagagagatgcaaaccaaaccacaatgagataccatctcacgccagttagaacgrtgatcattaaaaagtcaggaaacaacagatgctggagaggatgtggagaaataggaacgtttttacactgttggtgggagtgtaaattagttcacccattgtggaagacagtgtggcaattcctcaaggatctagaaccagaaataccatttaacccagcaatcccattactrggtataaacccaaaagattataaatcattctactttaaagacacatgcacatgtatgtttattgcagcactattcacaatagcaaagacttggaaccaacccaaatgcccatcaatgacagactggataaagaaaatgtggtacatatataccatggaatactatgcagccctcaaaaaggatgagttcatgtcctttgcagggacatggatgaagctggaaaccatcattcttggcaaactaacacaggaacagaaaaccaaacaccacatgttctcactcataagtggaagttgaacaatgagaacacatggacacagggaggggaacatcacacacccacacactgggacttttcagggggcagggggctagggcacagatagcattagaagtaatacctaatatagatgatgggttgatgggtgcagcaaaccaccatggcacgtgtatacctatgtaacaaacctgtacattctgcacatgtatcccaaaacttaaaatatattaaaaaaaaaaagaaaacgaaaagacaagccacattcgtggagaagaaatgtttacaaatcatatatatgatacaagtatccagaaaatatatatatataaaatttaattttttaatttttttttttttgagacagagtctcgctctgtcacccaggctggagtgyagtggcgtgatctcagctcactgtaacctctacctcctgggttcaagcgattctcctgcctcagcctcccaaaatgctggaattacaggcataagccactgcacccagcccagaatatattaaaaactcaacttgacaaaaagacaacacaattttttaaaggggcaaaagatgtgaagagtaatttccccaatgaagatatatgaaaggtcagtaagtatatgaaaagatgctcaacatcaatactacagtgatggccaggcatgggcgctcatgcctgtaatcccagcattttgggaggctgacttgggaagatcatttgaggccagggtttgagaccagcctgggcaacayagcaagactgtacctctacaaaaaaagtaaaaataaaaactgcagtgagatactgctccgtatctactagaatgactatatatgaagatgtggacaaaatggatccctcatatgttggtggtgggcatgtaaaatggtgtagccactttggaaaatattttggcagtttcttagaaagttaaaaataaatttaccatagaaaccagcaattccagccctaagtatccatctaagagatatgttcacacaatgatcggtacctatgtgaattttcagaattttctgcactattcataaccaaaatgaatggataaacagaacgtgttctattcacacaatggaatattatacagccataaaaaggagcacactactgatctatgcttttatctggatgaaccttgaaaacatgatgcaaactgaaagaagccagctgcaggagaccctatcaggtatgactccctttacaagaaagttccagaaaaggcaaatccagagagagaaagtcagtcagtggttgcctggagctaggggtgtgaacagagtgactaccaatggccagagatttttctgaagtgaagagaatgaaaactgggtggtgatagttgcacagctgtaaatttactaaaaaccacttaattacacacttaaaaaaaaaaaaaactctaaacctggccaggcatggtggctcacacctgtaatcccaacactctgggaggcccaggcaggaggatcacttgaggccaggagttcgagacaagcctggccaacatagggaaaccctgtctctactaaaaatacaaaaatcagctgggcatggtggcacgtgcctgtaatcccagctactctggaggctgagacatgagaatcacttgagcccaggaggcggaggttgcagtgagctgagatcacaccactgcactcaggcctggatgatagagggaagctctgtctcaaaaaacaaaaacaaaaaaaactctaaacctaaataacacggtcttgrtaactgccaagagagaaatctaaaaagatagtagctatgtgatgataaygaagggtgaccatgtggcacgctgatggcgttttccccaaatgaattataattttccctaaacaaagatgttttgaaaataccaacaattttatgcatttgcttaatcctcctttcaccaattctcagttaaacacacacacaccctcacgtgtcagtcaaccaaaaagcctttcctgaatacctactatgtgccccactcagttctgggcacttggtaattaaagaaccagaagccaaggcagagtccttccagggtcagtgctggacacaacagacacctgaagaggtggctaaccacagaaaatggcctccttgccgatcctaacctcattgtgactttctgtgtcatatataaagaaacctgccaaaaatyagaaatgattggctgggcgcggtggctcatgcctgtaatcctagcactttgggaggccgaggtgggtggatcactgagatcaggagttcaagaccagcctggccaacatggagaaaccccatctctactaaaaatacaaaaattagccaggcgtagtagtgcacgcctgtaaaatctcagctactagggaggctgaggcaggagaatcacttgaacccagggggcggaggttgcagtgagccaagatcatgccacttcactccagcttgggcaaaagagkgagacaccatctcaaaaaaaaaaaaraaaaagaaatgattgagtgtaggcataactggcagggtgaacacctgtattagggttgtaaccaaagatgaattatcattgatcaatttcctatatctacatgggaggatagtggaatctcattaaactgwgtataacagatagtataatatagctcaacagattgtttccaaaatacaaaatgggtgagagaattaaatagcttgcttcttgaggaatgggtgataattattgagaaggagaagagtgaccacagaaggcaaaatgagggcttctgtcaggggctgcatcatcagctggttatttactaggttctcacggcaaagatcttactcagcagatgagctataaaatctgcaaccaatggggtaaaacaargatatttaactctgaatcttcttcttttatttttatttatttatttatttatttatttatttatttatttattttgagacacagtctcactctgtcgcccaggctagagtgcagaggcatgatctcggctcagtgcaacctctgcctcgtgggtttaagtgattctcctgcctcagcctcctgcatagctggggactacagccgtgtgacaccatttttgtattttttggtggagacggggtttcaccatgttgcccaggttggtcttgaactcctgacctcaagtgatccgtccgcctcagcctcccgaagtgcaaggattacagccaccacgctcaacctaawttttttttattttttctttatttttttttttttragatggactctcactgtcacccaggctggagtgcagtgaygtgatcttggctcactgcaacctccgcctcccrggttcaagcgattctcccaccgcaggctcttgagtagctgggattacaggcacgcgccaccacacccggctaatttttgtatttttagtagagacggggtttcaccatgttggccaggctagtctcgaactcctgaccttgtgatccacccaacacagcctcccaaagtgctgggattacaggtgtgagccaccgcgcccgggcttcattttcttttaaactctgacccaaactgtattatccaacttcctctttgggccaatctggaccaacaagatttactctcctgcatgaactgaccaaaaatggacaaaacagggcgaggcacagtggctcacgcatgtaattccagcactttgggaggctgaggcaggtgggtgacgaggtcaggtgttcaagaccagcctggccaacatgatgaaatcccatgtctactaaaaatacaaaaattagccaggcgtggtggtgygtgcctgtagtcccagctactcgggaggctgaggcacgagaattgcttgaacctgggaggcgaaggttgcagtgagctactgcactccagcctgggcaagagagggagactctgtctcaaaaacaaaaactgccaaagaacagacacagatgttaaatttagcagagaagaacattaaaagagttaatataactgtatatgtacaaaatattaaacaaaacacggaagatattttttaaaagataaaaatcaaatgttatgagatccaaatcaaatgctataatgtctgggattaaaaatgcactggatgtaattagtggacggctagacattgcagaaaaaaagattcatgaacttgaaggcacagcagtagaaacaatcaaaaatcaaacacagaaaagagatttttaaaagtagacatagcatcagggaactgtgggacaactatcaagaagcttaatagatgtgtagtgggagttgtagaaggagaggggagaaaagggacagaaaaaatgttgaaagctataatagctgaggccgggcatggtggcttacatctataatcccagcattttgggaggctgaggtgggtggatcacctgaggtcagaagttcaagaccatcctggccaacatggtgaaaccccgtggcgactaaaaatacaaaaaattagcggggtgtggtggagcgcacctgtaatcccagcaacttgggaggctgaggcagaagaatcactcgaacctgagaggcagaggttgcagtgagccaagatcgtgcgactgtactccagcctgggcaacagagactctgtctggggaaaaaaaaaaaaaaatctatctatttatctaggctgaaagtataccaaatttgatgaaaactataaacccagagatccaagaatctcagtaacccaagcacagaaccatgaagaaaactatatgagagcacgtgatgagcagttcaaagccacaggtcaagggcaaccttaaaggcagccagagacaagagacacgttcaacactgaggagcagagagagggtggctgcagctctttcattggaagcaactgtgtcaagacagtggagcaacatttttatattactgaaagaaaaaaacctatcaatttagaattccacacacagtggaaatatctttcaaaataaggataaaattaagatttttttgrccgggcatggttgctcatacctgtaatcccagcactttgggaggtggaggcgggcgcatcatgaggtcaggagattgagaccatcctggccaacatggtgaaatcccatctctataaaaatacaaaaattagctatggtggcaagcatctgtagtcccagctactygggaggctgaggcaggagaatctcttgaacccgggagacagagattgcagtgagctctctgcaactccagcctggtgacagagggagactctgtctcaaaaaaaaaaaaaammaaaaaaaaaaaaaaaaaaaactttttcagaatatagaagttaaaaaaaaattatcaccagcaaacctgtcctataagaaatgtttaaaaaaaattccttcaggcagaaaacaaaattgaggccaggcatggtggctcatgcctgtgatcccaacactttgggaggctgaagccaggcagattgcttgagcccaggagtttgagaccagcctggacaacatggtgaaaatctgtctctacaagaatacacaaaaattacccgggatggggtgccatgtgcctgwagtcccagcttatgtttattgagccttcstttatggcccaaaatataattagtcttgggaaatttgttttctgctgtttttgagtgaagagttctataaattccaagtaagtcaggcggtttgatagtttattatttttatttttttttgagacactctcactctgccacccaagcygaagtgcagtggcgccatctcagctcacagcaacctctgcctccagtggttctcccacctcagcctcttgagtagctgggattataggcgcctgccaccacatccagctaattttttgtattcttagtagagatggggtttcatcatgttagccaggctggcctcaaattcctgacctcaagcgatccgcccacctcggcctcccaaagtgctgggattaaaggcgtgagccactgcactggccagtagtttagtttacattttctatatccttaataattttcttcatatatctatcaatttttgtgagaagatactgaaacttactaatataattgtggatttgcctatttttccttgcagttctatcagtttttgcttcatgtattttgaagctctgttgttagatgcataaacattgatgaattttatgtcctcttgatgaattgacttttttaatcactatgaaatcaccttttatatccatggtaatattctttaccctgaaattgactttgtcttttattaatatagcaactccacctttcttctggtcagtgttagcrtgattttttttgcgtccttttatttatctattgcatctttatatttatagtgagtttcttatagatggacttataattgagtctttttttttttttaaagattgtgtttcgcatttgttgccacccaggctggcgtgcaatggtgcgatctcggctcactgcaacctctgcctcccgggctcaagcgatcctcctgcctcagcctcccaagtagctgagattacaggcatgagccactacgcccagctaattctgtatttttagtagagacggggtttctccatgttggtcagactggtcttgaactcctgacctcaagtgatctgcctgccttggcctcccaaagtactgggattacaggtgttgagctaccacgcacwgctgagtcktgattttttaattctctgccttttcctttgggtatttagttttatctctactaaaattagaaaaattagctggcacactcctgtagtcccagctacttgggatgctgaggcagaagaatcacttgaacccaggaggcagaggttgcagtgaaaccagatggcactgctgtactccagcctgggtgacagaccgaaactctgcctcaataagtaaataaatacatacacacttgtacacgaggccaggtgcrgtggctcatgcctgtaatcccagaattttgggagtccaaggtaggyggatcacttgagcccaggaatttgagaccagcctgggcaacatggcaagatcccgtctctacaaaaaagttttaaaaaattagctgggcgtggtgatgcttgcctgtagtcccagctactcaggaggctgaggcaggaggatcgcttgaacccaggagattgaggctgcagtgagccatcatcgctccactgcactgcaacctgggcaacagagcaaaattctgtctcaaaaagaaaacaaaaaaaaaagctagaaagaaggatcttgaatcaactcatatgacaccagaaaaaaaaaaatattatcgacttgattttccagcccaggtatctaaaatgttgctctacccaagaaacctggtcttcagtgagttctttagggagaagagtctcagcaaagatgaaagactaagtggacatgaatctttaggcgttctaggcaggcaactttcaatctgaaacacatgagtgtggccagggtgtggtaagcaggggcacttactgtgtaaaaagccgagcactggagttgcagagtaagcctcatcatgagttgcaggataaacgtaagcaaggcctctactcatcgtttcttcatctcatctccagtgcctaggacagggcttgagacacagcaggygctcaaaacatgtctgcccaatggaaacgataaaacactactgtcattgaactatgacacatgtgaccacgctagctaactggactgcaaggaaatgcacagtgataagacactcgcatcacagcagaggtgcttcactctggccctgcccgagaatcacctgcaaagtcactacagagatgggtcctggctgctgtgttttccaaaactttgctggtggttatgtgcagagtacagagcctctaggctgggaacagaagtaagaaactagttaccgttcctcagtaaccaaattctggagacgcctgtgagagagaaatacacagagaggcagagagaggacagaaaacttggtagaacttggatactttattgaactcaatctggattattaaatcaaagactaggacacaatacaacataaacaaaactttatcaaattaagaggcaatatacaccatgccaataagatacccaactcattattctttggtaacagtcaagaagtattgcaacctgaagcctggcactccatttcagcaattccaacctgatagatcattcagggtgtcttccattaaaccttccctgttcgctctgatcaataatgacctctggctccccttccctgacagcccacagcatcacacttttcatcattttatgatagccaatttaggacttcattgtgaagctttgtgggtatattttatttttacttttttatttgagacagagtctcactctttcatccaggctggaatgcagtggtgtgatctcggctcactgcgacctctgcctcacgagttgaagcaattcttctgtctcagcctcccaagtagctggatcacaggtgtgtgccaccaagcccagctaatgtttgtatttttagtagagacagggtttcaccatgttagccgggctgatctggaactcctgacctcaagtkatcagcctgccttggcctcccacagtgctgggataacaagcatgagccactgcgcccggcctgctttgtattttagttccacaaatgccacrtgggaagctgtgcagccctgtggttaagatggcaggctctggagccagatggcttggatttaagacctagttctaccatttactagctgtgtatccttaggccagttaattaccccctctgygtttcagctgcctcctttgtatcatgggaataatttagcagtgttgtgctataaattcagataatccaggatgggcacggtgtctcacgcctgtaatcccagcactttgggaggctgaggcaggcggatcacctgaggtcaggagttcgagaccagtctggccaacatggtgaaacctcatctctactaaaaatacaaaattagctgggcatggtggcgggcacctgtaattctagctactccggaggctaaggcaagagaatcgcttcaacccaggaggcagaggttgcagtgagccaagattatgccactgcactccggcctgggcgacaagagtgagactccgttcccctccccccccaaacaaaacaaaacaaaacaaaactccccacctccccacggctgcctggccaaaaccaaaccaaggggtggggcttgcgcgggtccaacatgtgctacctcaggatgtagtgtaacaagggggctgggtgggcagagtgggcctgtgagcgcccgcatcccccagctccccccsgcagccggctccacaatggtctgctccggttgccgggtgcggattcgggttccggacgcaagrctgcgagttctccgctgcttgttgtggccggggttactgcggcraccgccagagcagccttggcgctatgttggagccaggggctacccctcagcggtacttggggctggtcctgggggagccacgcagggttgtggcagcgctgcctgaaagtatgagactggattcgaatcctcatggttttccatgggaaatggtgatatgtgcagctgttgctgcattttttgctgttctcctttttctgtggagaagttttasatcggttaggagtcggctttatgtgggaagagagaaaaagcttgctataatgctttctggactaattgaagaaaaatgtaaactacttgaaaaatttagccttgttcaaaaagagtatgaagactatgaagtagcgtcatcgttagaggatgccagctttgagaaggcggcagcagaagcacgaagtttggaggcaacctgtgaaaagttgaacaggtccaattctgaacttgagcatgaaattctctgtctagaaaaagagttaaaagaagagaaatctaaacattcgcaacaaaatgaattgatggyggatatttcaaaaacgatacagcctctagcagatgagtcagaatccctcaaatcacaagtagctgaagccaaaatgatcttcaagagatttaaaatgactgagaaacaactgaagatagcaataaaagatgctttgaatgaaaactctcaccttcaggaaagccagaaacagcttttgcaagaagctgaagtatggaacgaacaagtgaatgaacttaataaacagaaaataacatttgaagactccaaagtacatgcagaacaagttctaaatgataaagaaaatcacatcaagactctgactgaacatttgctaaagatgaaagattgggctgctaggcttagagaagacgtaacggatgatgataacttagaagtgaacagtgaatcagaagatggtgcttacttagatgatcctctaaaaggagctctgaagaaactgattcatgctactaagttaaatgcttctttaaaaaccttagaaggagaaagaaaccaaatttatatccagttacctgaaattgataaaacaaaggaagagcttacagagcatattaaaaatcttcggactgaacaagcatctttgcagtcagaaaacacacattttgaaagtgagaatcagaagcttcaacagaaacttaaagtaatgactgaattatatcaagaaaatgaaatgaaactctacaggaaattaacagtagaggaaaatagccggttagagaaagaagagaaactttctaaggtagacaaaaagatcagccatgccactaaagagctggagacctacagacagcgagccaaagatcttgaagaagaattggagagaactattcattattatcaacggcagattatttcccatgagaaaaaggcacatcataactggttggcagcttgggctgctgaaagaaacctcaatgatttaaggaaagaaaatgctcacaacagacaaaaattagctgaaacagagtataaaataaaacttctaaaaaaagatccttatgtacttgatgttccaaatacagcatttggcagagagcattccccatatggtccctcatcattgggtcggccttcatctgaaacgagagcttttctctctcccgcaactctgttggagggtccactcagactctcacctttgcctccagggggggaaggaagaggctcaagaggcccagggaatcctctggaccatcagattaccaaggmaagaggagaatcaagctgtgaaaggttaaccgatcctcacaggtctccttctgacactgggtccctgtcacttcygagggaacaggaccrtaggatgatgtttcctccaccagcgcaatcatatcttgattcagctcttcctccacaaaggcaagacagattttattctaactctggtggactgtctggaccagcagaactcagaagttttaatatgcctcctttggataaaatggatgggtcaatgccttcagaaatggaatccagtagaaatgacaccaaagatgatcttggtaatttaaatrtscctgattcatctctccctgctgaaaatgcagcaactggccctcgctttgttcctccacctcttgccctaatcagaggtccactgtttccagtggatacaaggggcccgttcatgagaagagcacctcctttccccccacctcctccaggaaccaggtttggagcttctcgagattattttccaccaggggatttcccaggtccaccacatgctccgtttgcaatgagaaatgtctatccaccgaggggttttcctccttaccctcccccaagacctggatttttcccccgacccccacattctgaaggtagaagtgagttcccttcagggctgattccgccttcaaatgagcctgctacggaacatccaaaaccgcagcaagatacctggcaatatttttgctctcttcaaaagtaattctgactgatctcatttcaagtaactgctgttacttaagtgattacacttttgctcaaattgaaacttaatggaattataattcttaggatagtattttgtaaataaggatgatttaaatatgaatcttataagtaaattatttccattgtattttattcgatagtataactattttaatttgattaatccactattatagaaacaacagtgggagttttacgtatgtaatcttgcaggtggggaggctttaaattctaaaggctgtgtctttatgccaacaactgtatttactgtaggtgtagacaaatgtgaaagtaactttatgcttaaataaattttagttgattaaagaaattcagataatccacatgataaccattcaatcactagcagtatttgccacgtctccactaaacgtctcaaagtcgcagaaaacacagcatggcctaacaggagctcttcattgcctccacaccactcttctctcaaggagcagcagtactgccctcgcagggctcaagtcaacccctacaacaccctggactccactcttcacattaccctgccactgccactccatcagtgagactgtctgctctccctctacacagtcacgtctctctagtgtcaccaccccactgccctctcttgtgcaaacctctgccacttctcctctgacacactactgtagccacaagccttgcctccctgcctgcaccctgatcacacctttcattttccagggcagtgaagtaaggtctcaacacatcagcataatcatgtcacttttctgtttgtttttctgccatctggtagcacrgtagcagtgagccacccttggctatgcagaggagggtgacacccaggggatggtgtgaggggaaggaacttaggtcccygcatatcccctgatctgggtaccaccagccctacgcctatatttagtgaccctgggctccaccccactggactgctcacgtccatgctgttctgtgcaggagaatcaaacttccatcttgttagggccagcgtgctttgaaggctcttggttacaaaagcaccctaacctgctatattactgtactatactattactatactacattactataccatattattactatattactggggtaacctgcaccctagtaatataacaattggtacctggaggaggggtgcggctgtgatagaaacctaagtggtactggcttcacggccaggcagtgagtagtgaggaaagagatggtgcagggtagaaagcyagtcattcccgctacgcagtaaagacatctaaaaaaatgctgcctgtattaactgggaagacggatcctgcacttaccaagcctgtgtagctctagaagaaaaaaaaaagcaaatatgcggtatgttggctgctcactgctgcccctagcgaggaactttgaaataaacgaggttaagtaagaactggccaatttgcaagcagaggtggaagataaaatacaggaatgccaagcagctctgtcttccagctccaatcctgcagtacttctttcagtgcccctaagacgctaagctccttcctccaacactgttttttgtcacctcccatcctgcctacccccggtcatccttcaagtctcacacatacctgacttacccacgcaccctgggatcttgtgcaagtctccccattaccatctcatcttaccctctgctcatcagttaatggactcagcccaagaagcactaacacgctcaatgccgggtaattttctgcgcgtgttcgctccccacgtactcgtcccccaacacccagccctgggcctggcacgtggcaggcgctcagtgaacgagactcaggaacagtcargtgtagacggcaggagaagacatgacacggataccaagcacccgaggtcctgcaatgagtctcggcccatgttttagggagcctgggtctggagccccagtgagcgtgtgggtcaggaaggtgcccgagctccgcgcccgaccgcgcaggcgcgaaaccgggagagcggcgtcacaaccccgccctaacaggccacgcccatcactggccacgccctcccagggacgtacgcgagcgtgcgagtgtcttgggccaggcctcctcacaggcagggccgcgccggcaaaaacgaggcgcggtgggaacccgcccaggggccatccgccctcccgtccctaacgcccaggccccgggggctcaccacgtcccccggaacctgcagatcctccgccctccgctgtcgccagcggccgagcgmtaagctgtccatgcagccccagggtcaaaccctmccggcatctcaggcctggccgaggcccgcgcaccacgcccccttccgcacaaggccctggggagccaataaggagagggaggggcgggacgccgcgggaagcgcgagagcaccaaggcgaggaccgcaggcaggagtagcagagmccagagtcttctgagactattgggatgctgtgggcgttgtcsgtctgccccaagtcattacttcgcagagaggtccctgcatatctcygcttgtcgcttctcccttcacaggagcagccgtggggctctaaagaaagcattctttcaggatcccgccaaacttttgacaacaccccgtggatcggctggaggagcgcccgcctcctctgtcttatgattggttgttaggcctcgtggggagccgtctccctgtggctggttggctaatagatggcgcagcgggtcaattagcttgagcgagacagcgggtgtttctgggagttgtggtccgcagggctgcctcgcttccgggtgggagctgctgttgccgcggtgggaagacgcagagctttcaggccagccccgcgcggctcacggcttttgtggctggtggctggtggctgctggttgggaggccccggaaggacttctactcctccgtaggctggagggcactaggaggtcgcaggtgctgagctgccggggcctttgggctgtgctgaaggggaaaagcgcagccactgtcgggagtgtgtgctgtggaggcagttgccgcggtgatgttcgctccgcctggcccctgccggggattcagccaaccaaccctcaacagccggcggcggctcagtctctggcccggcgcggtgctgagcaccactgagccctcatcttagggcaccgaggcccggactcctgcagccgcatgtccaggcccctcctgccttagcacggagctcccttgactgctccaaacagcccagactggcgccttttttggataaattaaaacggggccaatccgttgccagcgattggctaacgatgggtacacgacctagtacgggccagggagaagtaagcgaggtctgttgaggcagagtttcgggaaagatcttctagttaaaaggggagttgggtgggtgggggctgttttcttcctgttgtccttgcccagtgtaagtttcctggagctgcagcagcctttttgtcaccatgagggcagctggtgggaaccctaggaaagcaggaaatcacctagagccggaacagcctgagcckctgaaccaacccacagctgactacccgtcactttgtcgtgtctctgtgatttgagtccatcattctgctgcagttgaaggtatcctttgacaaagccctgttcttaaccattatggtgaaacgcatgaatccctcttcgggctatttgctgcatgatcctcagcaaattaaatagttaatctccctcagtttcctcatttataaaggataggatgataaagcatagagatcgtgaggattacatgaggcatttacctagaagatacttagaacaatgctggacacaaactaagtacttaacaaatgtaacatttctcctattagttagtactcctaagactaattatgccaccactgattcacagtcccttatcaaaaacctttcaggccagatgtgtttgtgaaattcagaattttttgaatgtttaaaaaaggtgagatatattgtatgcccccgtagtcaaacaatgtttctatagcagaaatgtgtgagtattcacaaatattcaccctaagtgggatatataaaggttgtaaatagggccaggcacagtggctcatgcttgtaatcccagtactttggaaggccaaagcgggaggattgcttgaacccaggagtttgagaccagcctcggcaacacagtgagaccmccgtctctacaaaataaaaataacaaaattagccgggcactatggcgcccacctgtagtmccagctactcagaaggctgaggtgggaagattgcttgggcctggaaggttgaggctgcagtgagttggctgtgatcacaccacagcactccagcctggccaatagagtgagaccctgtctcaaataaaataaatacaataaataaataaaggttgtaaatagtctcatatcagttcaaatgagtttactccaagcgtggggaaaaactaatttggaggactttctgcatttcagaattgaaaataaggtatgttgtaggcctctcaaaatgcttgtcttgcagtttagattagatgacttgctttgttacccacttttgatatcgctggcctttatactgatggctgcttttcagatgtgtataagaacaaaatttcaacaaatttagtttcaaagatctgattggtttttaatagcattgcatgcaccaggcagtctacaagatagaaaggtgctccaatgaggaccgagtgggtgagtttgacaggcaggaaaaagtggaggaaagcaggaagaatgaacaaatagcagatcagtcatttcaagrttactttccttatagaggtgtagacgaaatcttggtgtaatgtaatttggctttcatccctctcctgatttctcagaagatcttacaagtaagcaacccaggtttcagtttggtagcatgaatccttagcatttagtgactccagttttggtctgctgtctttcttaaatggatgcatgaggcaaccattgggtactgggggggggactgcttagcttaggaatgagatacagcaataggtatatttagaaggatgcagtttagcttagcacagtatttaccaagcatcagtcacttgggtactaactgcaagatgtatgctaaacctctcctattatttacatagtatatttatttaaattctcaatatcttaagtttgaaaaactttaaaaataatatgtgacatctataaagtgatggtttgaatgctcactattttaatatgttaaatagattaattattagaagaaaatatgggaggtcaggcacagtgacttatgcctgtaatcccagcactttggaaggccaagacaggcggattgtctgaggccaggagttcaagaccagctggccaacatggcaaaaccctgtytctgctaaaaatacaaaaattagccaggcatgatggcgcatgcctgtaatcccagctttttgggaggccaaggcaggagaattgcttaaaccctagaggcgcaggttgcagtgagtcaagatcacaccgctgcactccaggcctaggcgacaaaacaaaactctatctcaaaaaaaagaaagaaagaaaaattggccaggcacagtggctccagcctgtaatcccagcactttgggaggccaaggcaggtggatcacaaggtcaggagatggagaccagccttgccaccatggtgaaaccctgtctctactaaaatacaaaaaattaaccaggcatggtggtggcggcacgtgcctgtagtcccagctactcgggaggctgaggcaggagaatctcttgaacctgggaacctgggaggcagaggttgcagtaagccgagaccacgccactgcactccagcctgggtgacagagtgagactccgtctcaaaaaaaaaaaaaaaaaaaaagtaaagaaaatatgggaaaacttcatgatattggattcttgcatatgacaccaaaagcacagtcaacaaaagaaaaaaataatttggactatatcaaaatttaaaattttgtacatcaaaggacactattaatccagtgaaaaggcaacccaggaaatggagaaaatattttcaaatmgcatatctgataaggagttaatatccagattatataaagaatacctggctgggtgcagtggctcattcctataatcccagcactttgggaagccgaggtgggtggatcacgaggtcaggagatcgagaccatcctggccaatatggtgaaacctcatctctactaaaaatacaaaaattagtcgggcgtggtggtgtgtgcctgtagtcccagctactcaggaggctgaggcaggagaattgcttaaacctgagaggcggaggttgcagtgagccaagattgcgccactacactccagcttggaygacagagcgagactccatctcaaaaaaaaaaaaaaaaaaaaagaatgcctacaactcaacaacaacaacaaaaaacctgattgaaaacatggacaaataccagcatgggcaagacagcaagaccctgtctctccaaaaagcaaaaaattagcctcttgctagagaggctgaggtggaaggatcacttgagttcaggagtttgaggctgcagtgaaccatgatctcaccactgtactctatctgaggtaacaaagtgagaccctgtctcaaaaaagaaacaaaacagaaaaatagacaaataacttgaatagacagttctcaaaagaagatatacaaatagccaataagcacatgaagataatatcatcagttattagggaaatgctaatcaaacccgtattgagataccacttcacacccattaggatggctattatcaaaaagaaaaaaacagtgaccaggcactgtggcttatgcctgtaatcccagcactttgggaggctgaggcaggcagatcacttgaggccaggagttcaagacctggccaacatggtgaaacccygtctctactaaaaatacaaaaattagtcaggtgtggtggtgcaggcctgtaatcccagctactcgggaagctgaagcaggagaatcgcttgaactcaggaggcagaggttgcagtgagccaagatcgtgccactgcactccagcctgggtgacacagcgagactcsrtctcaaaaaaaaagcagccgggcatggtgggtggctcatggctgaaaactcagagcttcatgaggctgagctgagcggatcacttgagtgtaggagtttgagaccagcctgggcagcatggcaagacctcatctctacaaaaaaacagaaatacaaaaattaaccaggtatggtggctcccgcctgtagtcccacctactcaggaggctgagaggtgggcagattgcctggaaggtcgaggctgcaagtgagctgaaattgtgccactgcactcctccaacgtgggcaacagatgaagaccccctctcaaaaaaaaaaagagaaaaagaaaatgacaagttttggctagggtgtggagaaattgaaacccttgtgcatggctggtgggaatgtaaaatgctgtagccactgttgaaaacagtgtggtgttttttcaaaaaattaaaaataaaattaccgtataatccaaaattccacttctgggaatatacacaaaataactgaaggcagggactcagaacagacatttgtacacccgtgttcatagcagcattattcccaatagccaaaagttggaagcaacccaaatgtccatcagtggataaataaaatgtggtctgtatgtgtatatatataatattctactgtatatatatatatatataggtagaataatacacagccttaaaaaggaagggaattttggcatattttacaacacggatgaaccttgaagatgtaatgctaagtgaaataagctaatcacaaagagtccaaactatgattccacttatatgagctgcctagaatagtgaaaggtgtggagacagaaagttgaatggtgattgtcagggcctgggaggaggaggaggaatgggaaggtactgttaagtgagtacagagctttcgcttgggaagatgaaaacattctggagctgaatgatggtgatgtttgcacaacattgtgaatgtacttaacactactaaagcatacacctaaatatagttaaggtggcaaacttcatcttatgtatattttaccacaataaaaaatacgttattaaaataaaagtttctcagccaggtgcagtggctcacacctgtaatcccagcactttgggaggctaaggagggcagatcgcttgagcccaggagttcaagaccagcatgggcaacaaagcaaaaccccatctctaaaaataaaataaaaattgtttctcatggcycggcatggtgacacacatttgtaaccccagcagtttgagaggcataggtggggagatcacttgagctctggagttctaggccagcctgggcaacatagggagagcctggtttctacaaaaaatatatatatataaattagcctggtgtggtggcatgcacctgtagtcccagctactcaggagcctgaggtgggaggatcgcttgagcccaggaggtcaaggctgcagtgagtcatgatcacgccactgcactccagctggggcaacacaagaccctgccataaataaataaataaataaataaataaataaataaatwcctgtttatgcaccactaactgtcatcttgcacaccaccttcaagggaagtatctctcaggtrgaaggtgattcgagttcaatcccaccctgccagtttccagcacctggacaaagctgcttgaacctctaagtccccttcccctttttggtgtataaaattggtatcgggggaaccagcccccaatatttcaatataggttctttctattttccctaagtttcggccggtctgagaaataaagagtacaaagagaaattttcagctgggcctcygggggtgtcatcacatattggtaggactgtgatgatgacccgagctgcaaaaccagcaagtttttattagggattttaaaaggggagggggtgtacgaacagagagtaggtcacaaggatcacatgcttcaaagggcaataaagatcacaaggcaaggcaaaattagaattactgatgagggtctatgtcccgctgtgcacgcattgtcttgataaacatcttaacaggaaacagggctcgagagcagacaactggtctgactacgatttaccaggctggaatttcccaatcctagtaagcctgagggcactgcaggagaccagggcgtatttcagtccttatctcaactgcataagacaaacactcccagagcggccatctatagacctccccccaggaatgcattccttccccagggttgttccttcctgggaaaagaattcagtgatatttcttctacttgcacatctgtctataggctttctgcaagaagaaaaatatggctctattctgcccgaccccacaggcagtcagaccttatggttatcttctcttgttccctgaaaaattgctgttattctgttctttttcagggtgcactgatttcatattgttcaaacacatatattttacaatcagatttcatattgttcaaacacacgttcttcaatcaatttgtacaatagtggtcctgaggtgacgtgcattctcagcttacgaagataacaggatcaagagattaaagacaggcataagaaattataagagtattattagggaagtgataaatgtccatgaaatcttcacaatttatgttcagagattgcagtaaaggcaggcgtaagaaattataaaagtattaattttgggaactgataaatgtccatgaaatcctcacaattttatgttcttctgcctcagctccagccggtccctctgttcggggtccctgatttcccgcaacaattggaataataaaacctggcatggtggcacatacctgtagtcccagctactcgggaggctgaggcaggagggttgcttgagcccaggagtttgaggctatagtatgctatggtgtaacctgtgaatggctactgcattctagcctggagaacatagggagaccttgtctaaaaactagagaaataaaattaagaattgggatgctaatagtatctacctcagtggaatacttttgggtttgtttgtttgtttgtttgtttgtttttcccccaagacggagtcttgctctgtcgcccaggctggagtgcagtggtgtgatctcggctcactgcaacctccgcctcccgggttcaagcaattctcctgcctcagcctcctgagtagctgggattacaggcacttgccaccatgcccggctaatttttttttttttttttttttttgagacggagtctcgctctatcgcccaggccggactgcggactgcagtggcgccaatctcggctcactgcaagctccgcttcccgggttcacgccattctcctgcctcagcctcccgagtagctgagactacaggcgcccrccaccgcrcccggctaattttttgtatttttagtagagacggggtttcaccttgttagccaggatggtctcaatctcctgacctcatgatccacccgcctcggcctcccaaagtgctgggattacaggcgtgagccaccgcgcccagccctaatttttgtattcttagtagagacggggtttcgccatgttggccaggctggtctcaaattcttgacctcttaatccgcccacctcagcctcccaacgtgctgggactacaggcatgagccaccgcacccggccactttggagttttaagtgagatgtttgtctgtgactgtggagtggtgagcactgtgtctggtaaggtctcaactaatggtagctggtgtgaccatctctagtctttctctaactgagcacacagtctttccccttcctggatcacatagagttcaggcggtttccagagaggtttgattcggtaatggctcctgtattcaaatgatgagtgtttgtttctgagcctcagttccctcatctataaaataggaataaaatagactgcttctgtcatctgccttccagagaagtcagagcttccaagagtggctgctgatttgccaatgaacacactcattttggccatgccaagggggatctgtgtgtgtgatggggccgggccaaggagcagtttgattcaacttttgcaaagccatgacttctgtttttccatttacccaatcttccccctttcaaactcccatgacgtcttttaaaaagcaccatgtctgctcatcttactgagatgtacaagataacacgtaaagcctgtagtagggagcctggcatggagtaggcatttccgaggcgctccttccatkccctgctgccctcttatttaaacattcccagcacttccttgggcactagaataaggttagattttacctttgaaatttacggtttctttagatattacaataacaataattggttatcktctttacctggaaatgcttccccctttgattagtctgttttgcactgctataaaggaatactgaggctgggtatttacaaagcagtttatttgtctcatagttctacagactgtacacgaagcaacggtgtcagcatctgcttccagtggggcctcaggaagctttcaatcatggcagaaggccaaggggcagcggggtctcacgtggcaagagagggaggaggaggtgccagcctctttaaacaatcagctcttgcatgaactcttagagccagaactcactcactacctggaagacggcatggagacaataatgagggatccacccccatgacccaaactcctcccactaggcccacctccagcactggtggtcacagttcaacgtgagatttggaggggacaaacatccaaaccgtatcacccctcaacccctcaactacacctggtttgctccttgttttctagattttgactgaaatgtccccttcccggcaaagccgtgtggaccacccgggctaaagcagccacctggtgctggcctgtgtggcccaattccagttctccagggtgctcatcactctgtggcagtttgtcttctggtttgtgagagaagaataaatctgagggacccaaaatcactaaagggaaaagtcaagctgggaactgcttagtgccaacctgcctccccttctattcaaagtcacccctctgctcaatgaaataaatgcatatctgattgcctcctttggagaggctcatcacaaactcaaaagaatgcaaccatttgccttttatctacctatgacctggaagccacctcccgcttcgagttgtcccgcctttccggactgaaccaatgtacatcttacatatgttgattgatgtatctccctaaaatatataaaaccaaactgtgctctgaccaccttgggcacgtgtcatcaggacctcctgaggctgtgtcacgggcgtgcatcctcaaccttggcaaaaataaactttctaaattaactgagacctgtctcagatattcggggttcacaagctgatgttctgtactctctccgcaaccccccagagtgctttgttccctgctgtccagagccaggcacactgcaggcactcaggaaagaagtgtgccaacagagagttcgctagttagcctggcacctttgatttcatttaattattacagtaataccgcaggactatcctcattttcagacaaaaaaactgaggctcagagaagttacccatggtgtccacggccgcaaggccaccaagtggcagacctgaattcaaccaagtccatctggtttcccacccttctgcacccagtagcctttgggttcccatgtaaagcctccttattaagctgcaagtcttcctgaaaacaaggtgagttagacaaaaacaaacaaacgaaaacagcaacccacagctctagcttgtcaggtaccccaaaggcctccatttcccagtggcattttctgggcaccctgctggggagtgacgtgcaaggcccagggcatggctttctgacatgagcctctgttgcacacgcttgtgtactctttattctgcatctgaagtggcttgtgcagggccatgtgtgattaaggggtttgtctgcttccccaccagactccttgctggtcccgcttaccagccagttgccggggcctgtactgccccggggccgtgtattccaggcttggcttcatgccatgccctctccacctctctcctcctgcgaggtgcagccagtgttgcatggggacttcccatcgtggctcaggcttgctcctctgacctctcctggcacttggtcctccaaaggagctcccctttctgctggccatctgcgtttgctcacctggacttgctgagggagctcgggtgccctgtgtgtgcttatctgtgtgtccyggcgcccggcacaggcagggcccagagtgggtgcctgctcgaggccaggggatgggtgagttcagcagttagctgtggggtgtctgcttaggcccagcccttgggggcctctaggaggggtccccctgcyctcctgccctcctgccctctctgcaggagaggctccagtgaagcagacacagctcgatgttaagtgagacaagtcggtgagaatgcacaagccacgcaggcgctgcttcgtgattttctcataacatctgacacttgtatgttcaaatcgcatcactaaagagtagctgcataggtctgtctatggagggtctcccactttgctgtctcttgtctctcctgtctagcctcggtctttagccctctcctctccctgtggacagggcagttgttctagcccaagaggattagaacctgaaggatgcccttctccctataagggaagccacacatttgttttggtgagggtcatggttttgttccaatatcattttagcttaggctgtattttcttttataagactcagtttaagacttttctacctgctcataaaaatgagattaaaaaaagagaaagacttttctaaatgcaatccttataataatccaggaatacttcattaaaacaaaaaagaaagtaacaatccactatttttcaactttcttttttttttgacggagttttgctcttgttgcccaggctggagtgcaatggtgcgatctcggctcaccgcaacctccgcctcccgggttcaagcaattctcctgcctcagcctcccgagtagctaggattacaggcatgcgccaccatgcccagctaattttgtatttttagtagagacggggtttctccatgttggtcaggctggtctcgaacttgtccccaccttaggtggtccacccgccttgacctcccaaagtgctgggattacaggcgtgagccaccgcacctggcctcaactttcaaaataatgtctctacatgcagacttttgtaatctaagccagtgccctgaattattttctgacattgtaaatgtgctttttaaggatgataaacaaagataattatttaatatcaaaagactttaggccaggtgcgatggctcacgcctgtaatcccagcactttgggaagctgaagtgggtggatcacttgaggtcaggaattcgagaccagcctgaccaacatggtgaaaccccgtctctactaaaaataaaaaaaatagccaggtgtcatggcgggcacctgtaatcccagctgctcaggagactgaggcatgagcatcacttgaacctgggaggcagaggttgcagtgagccaagatctcaccactacactccagcctgggcaacagagtaagaccctgtctcaaaaaaaaaaaaaaaagaaaagactttatgaccagtgcaaattagagatctatatgacactgtataacgtatatgcccaagtctgtctcacaatggtactctaaacactcgctatatacagaaggtaagaattttatagtcattttgcattttcttcaaaggtgctgttgataaataaaaatattaataaaccacaaatgtaccttccaaagtcaatagttttatgtttgaatggaaagtactatctcccatcttaacctacccctgcttctaagagcttgacaatgtttgttaaatgccacacaccagtgtcctttctaagtcatgttttatttcaacaatagattgaaattttaccatgatgttttatatttcatcctaagtttttttattttcaagtgtatgaagtcacatcagttatgtctgataatccattttggacatgtattttcatataaattataggacatttttgcctttcagttctcacaacatagtaaggaaaaaaaaaaaaaccccagcatgtggaaatatgactgatgccatgttagtgtgtggttggaaataataaagattataaatgactccataggtgtagaaaataaggggagaagacttattggggagaagtaaaaaagcttgttttctttatgcatagcagaaagaaggcaccatgactgatatattactattcaccttctttttatttctaagggggtttttattaacccctttttatcaatcaaaataaattgattgccagtgaatgcaatattttctgactatttgaaattatacaatgaaagcaaagacatgtaaactcacatactacatttgctgacaaacaagagacaacctttcccccaaaaaaggattgctaaatagttaaagattgttacagctatctcttaaaaaaagaacattttaggccaggcatggtggtgctcacctgtaatcccagcactttgagaggccaaggcagaggatcttttgagcccaggcgttggagaccagccttggaaatataggcgacccccatctctataaaaaataaaaataaaagtagcctggtgtggtggcacatgactgtggtcccagctattcaggaggctgaggcagaggatcccttgagcctgggtggtctaggatgcagtgagccatggtcacgccattgcactccagcctgggtgaaaaagcaagaccctttttcaaagaaaataatattttatttaaggataggattaggccttgggattcctttggaattcaacttcatccagctgtgttagtggtcatgtagtcattaaatatcagaatactgttatttaataaatataccccatcataaaaggtcatatttctttagggcaaatacagttaggaccaatctccgtcctgggcaaggacttacctgattcaagaggggagaaaacagggtggtcaggaatacatttgtgattcactccctgaagaggcagtctggtgacgtggtttggctgtgtctccacccaaatctcttcttgaattgtagctcccatgattcccacgtgttgtgggaggtaatcaagtcatgggggtgggtttttcttgtgctgttctcctgataatgagaagtctcatgagatctgatggttttataaaggggagttccctgcataagctccttgcctgcctccatgtgagacatgactttgctcctcctttgacttctgccataattgtgaggccttcccagccatatgcaactgtgagtccattaaacctctttcctttataaattacccatcttgggtattttttttttttttttttttttttttgagacagagtttcgctcttactgcccaggctggagtgcaatggcacaatctcagctcaccgcaacttctgcctcccaggttcaagygattctcctgcctcagcctccygagtagctgggattacacgcatgcgccaccatgcctggttaattttttatttttagtaaagatggggtttctccctgttggccaggctggtctcaaactcccaaccttaggtgatccactcgcctcagcctcccaaagtgctgggattacaggcgtgagtcactgcgctgggccagtatgtctttattagcagcatgaaaactgactaatgcatccggtcactcttagcacagtgacattgaatgtgcacaaactaaaaaataaggtttcaaccaaactggtgagagcattcctcttggtgttctctaggaagaaggccagagggtttgggacaatagaaataaaacacagtggttttgaaaatggggccaaactgtgcttccccgtggcggggctgagaaggagggagcagggcactgagcccgctgttctttcggccctgggctctctgcctcctaccatcagccctcagggcagctgctcctcgctgaccacctggctgctgatgggcttggtggccagcagagctgccccgttttgtctgtgcagagtcagccagacgtggctcagcgcagctctttccctcggtttcatggagtaaagggttcctcattagggccccacacatccgtctctcatcataggagggtgactttcttcctgcatctcccgtttccacttagtcatttcaaccagcggcaaactggaaaaagaacgtatatgttatggtggcaaagtctgaaggtaatgttggcatggagtgtttcaataagatgtttcttttgattaaagcatatttcatatgatgggcaagtaatagatacaacctcagacgtaggctaatcatggagtcaacagcaaacttctacttgactcctaggaaactagctccctcaccagaacattaccgctgtatttctttctttctttctacataccatcaggcaactggggcctatgcatccttaagaattagtggtttgttttttcttttcttttttggtttgttctagaagaagaaatttaaagccagccattgttttacagaaaaatcatcctgccattgaaacccaaagtggtccatccagtctggaggccgtgggaaccatgaatcctttcagagtttgaagcaaatgcaaaactgttcacgtcatcctgggttattttattgtctcaccaccttcctgaaatggagctcgaacttcatttagagtagctctcgggcacgctggcaggggggctcccagagctgagtgagcaaggggtgcattgagaagcaggcgttctgccccgaccggcccacctcactctccgcagagggaggcatttgtggtgggccaatgtgcatgcagccccaggctggacaactccagaagaaactcaagaacacaaatgtagatgattaaccaaaatagtctgttccatcttcctgcactggggggaaatgcctcttgtattttagaggagagagagaatgggaaggaagccactgcaggtgtggcagacattggaggactcaggtcaagtataaaactgctgtggccacrgatttaactaagtttcaaccaagtagctttccaggttgggtgacatctgctacatgctagaactagctgtggagtctgtgctttggccccagtttggagtccagaactattagcatgtatcaccgagttgtgtttgtaagggttgtgtgtatttttagtgcttcccagagctttctaccctgatcgccttccacaggtagaagcggctgactgtacctggtacctggggccactccagaggtcccctctgggaggtgatgcctctgtgcacaagcagcctgtgcaagaatgtcaaggtcagcggaagagagggcacacgccctccaaggaggtggtgtgggttgggactcagtgtcctggaagggacctccttcaggcaagagctcttggagtcagacggcacgaaagaacctgagtatagaacttctcaggtctctaaggaattacatctgattctataagaatcagaagtttgttggccaggtgcagtggctcacatctgtaatcccagcacttggagaggctaaggcaggaagatcacttgagctcaggagttggagaccagcctgggcaatatagtgagacctcatctctattaaaaaaaaaaaaaaaaagtttgtgacaccaaggaaagctcatctgggtccttagtttcttagatatgaaacatgaactacaaataacagcagaaaattaactccatctggacttggaggataaatacacatatgcacacacatgcacacaatactatttacatataaaacattgtgactcaaacggagagaaaatgcagctgcatgtaaacatctgtggtgattaggtatacccaytcagtgaccaacaaattgcattcagtgtgtctggggtgatcgcctcaggaactgggccttcrgttagtaacgatgctttggaagcatgtatgccagtcataacatgtggagggcttttcctctctccctccctgtgttaacatgctttcatatggctagtacagtcttgataaatcttgcaggatctcaaatagcctagtgaaacgggaagagaagaaggtgttaaaagtttgcaggtcaggggaaaagcacgtgttttgggtgagtcggyggagcctccacaaatacagcatcggtttgtgtgaattctcagctgtggtttctcaggttgaataaagccactcaacaaaggctgctgtttctccagcctgaagaggcacttatgccacctacagcctggaatctggcactacaattcgcgcccaagtccctggctcatcctaggtgggagattagaatctatgtagggaatggaaaatgggcaggcattccagggtgagtttttcttcccccccgawaaattgtaaacaaacaattacaaacatgtttgaaaattgttttaactagtttttagagattgcaatagctgggttgggatttatgaactacatttcttataaatacatttcttctagagaacttcttgtgggacgtaatcacttttcccctctgtatagcagccccacaactcaacccaaagctaggttaggctactgggtacacacttacccagatagtcttagcttcttaggggaaaccagattactgtgaagccatcagataagacatacttctgaaaagaaatggaatgtatttttattggcagagtcaagatgaagtatgttttgaaatctgttttacaaataaacttacacataaattgtccatccactacttggaaatcttttttcgtgtttgaggagctgtcagaggtctctaataaacagtgagtcttatttagtttactggatatgtaattcttcttttctttgaaaataattatttttcaagcaagtgcagcaaaaatacaaccaataaaaatctagctatgacagcataaacaacctttatggcatgcatatacatagacttcttccaataaaagcagttcctggcaagaaagggaacagaaaattggctgatgtgttcccagataagttctggactcttaagggctgagagaagagtcctcacagcccatctccaactccccatcccagaccggtccttggttagcgtgagggaggcaggtccccattgccagagtggcttgggctaaggagaagggacgggctgctgtcaacttggagtcaggggagccccttcccaaggcccgttcttggggccaggaagtctgctggacagaggctgaacccccctgcaggctccggaggagcgggtgggagaccggccactgttcaggctccccattcttggtccaggccaattgtccccgcgggagggcggtgccacggtgggtgacagggctgggggcggggtaggggtcgacttaagataatctggtccaggggttctgctctgggctgggtcgacccggctcgcggggaggctgtttgccctgggccttcccatccccgcgccttcccatccccgcgcccacgccgcacccaggcgagcaacgtggagggtcggcgcggggctgctcccggggagcctggggttgcaagttctcagcagacgtgcgggtgctcatttatgctttttatagtagctggagaagatgttatcgcagcttgagaacagaaattaaaatatgtatccttcaggtgcaaatctactgtacttacagttttaccgtttctctgcaggggggctccattaatcttgtaagagtgaaattcctaaggaaattaattccctccagttggggttattctcaactggtctttgggggcggagtaattggaatttaagagtcgctcttaaaagaaaggaaacgttggccattttactcgaataacactttctaatgccaggctttactctttaaaacacctcctccttctttctctccctgcacctctttgtgtttctgggcttcccttggtagggtttacaaagacccccaccaggtgggacctcccctcccagttttcctgaggctgaccccacattcctttccacgtgggttatttgtggccccccacccccccttctcccactgcgcagcctgaggaccacgggaccacaggagggaatgaggcatcatgaaaagttcatggctaaatcatttccttgcctgtttaggagcagtaaatgtttgttgtcatcacccagcaaaataattacacctcaatttctctctctctctctctctctctcwcwcacacacacacacacacacacaccctttaaaatacaggcaattcataggcaagaggtgaagttttttttgctgccaggaaagtccaggaaagcatcttccactggagcttcaggtctccaaggcctaagcttcagtccccaggcccagagccccaggcccttattcttcaggctatgggaaccccaccaccaccaccaagacggaatagaacttggctaaatggctaaatgcaggtgtggtggcacacgcctgtagtcccagctgcttgggaggctgagggagaagaattgcttgaacccgggaggcggaggttgcagtgagccgagatcatgccactccactccagcctgggcgtcagaacgagattccgtctcaaaaaaaaaaaaaaaaaaaaaaaccatggctaaatgatgcttatatacagggtcagtagaatattagcgrccaggaggaacccgtgggcacatggccacaatcagccacagtccttgcttttcagcttaatggggcttaagggaaaggccaggtccagcgcattctaggccaggtccagcgcattctgtgccagcccaagccaatttaatagggtcatggccagtttttccctgtgggccctaacatggtcatagggagagaggatggactttccagggcactgttcggggcagtgagtcctggcgatgtccctcctctgctgtgggttgggcagtttccttagctatacagtgggtcatgggcagtgtgggtcccacatcatcagcttaatggggtgctgaatgatcaatacagatgtttacctttgggggcttttaatagctgaaaagtgccatctaccagtgggcacctgtgtatcccatagctccccaaaacctggctcagctcagggcagagcctagtagtctgctgtccatgtcagaatatcagagctcctagagctgggaggaggtcatctgctgcccctaggcctcttgatatcaacagtgacaacatgggctcaggaaacagaagcctagaatgaggcctcagctacaacctcagaagcaaaagtttttctctgatcttctcttgccctcctgtccctgcccctcattctcctctgaggctagccagagaaactagaatccctcttcccttaggcacatcatagaaaccagtacccctttcccccaaataattactctaactccctgccccccaacacccgaaaatccaaaattctccgtgctacctaatacaccatatcctatagcaaggtcagctaaataagctgaccccacctttcccgtgtaaaaacaaagaacccaacaccccaccttttctctgtaaaaactggccatgggccagacatagtggctatgcctgttatcccaacactttgggagaccaaggcaggtggatcacttgaggtcaggagctcaagaccagcctggccaatgtggtaaaaccccatctctactgaaaatacaaaaaattagcctggtgtggtggcgcatgcctgtaatcatagctactcgggaagctgaggcaggagaattacttgaacccgggaggtggaggttgcagtgagccgagatcatgccactgcaccccagcctgggtggcagagcgagaccccatctcaaaaataagcaaacaaaaaaactggccaaaaagaaatgttctcacctaccttgcttgagtgtagttcataagacctcattccacagagggtcttgctcctttacccagaaggaaggaggctgcacagaggccaggaagaatctgaacaccagaccagccttgctgggttctcccagtcagttcttttcaaagacaaaacacaaagtcacatttattagagttgtccacagtcagcaatggtgaccttcttgctggtcttgccatttctggaccctcatgccttctttcatcttgccaaagaccacatgctcgccatgcaaccactgagtcttggcagtgcagatgccaaactgggaaccgtacgtgttggtccagcatttgccttggacaacatgccgggacctgtatgcttcaggctacagttttcatcatcaaatttctccctgtagatggacttgccaccagcgccattacggcgtgtgaagccaccaccctaacacataagccctggaataattctgtgaaagcaggaaccctcatgacaaaatcctttccctccagtgctcagagcatgcaagtgttctgctgtctttggaatcttgtctgcaaacagctcgaagggctgtttgatggccccagggcttgccattgacggccatgttgaagaacatggtgggattgaccatggctggtagcagggggttctggggggcgtcagcatctgcaaagcccccagtgagttctgctagcataagagcatacccattttgtccaatcgtatttctacataactgtccatacttcgttgaacctaagcatacaaatggacagttttccctgtatctttgagtcttcacgtgtcacgtgaaactgtgatcaaataaatttgtttatcttttctcctattaatctgccttttgtcagtgattttcagcaaaccatcagagggctaaggagaagctttcctgtggcccctacaataataaactacaaaaagggcagaaatggaagtgttatccaggagttttcatagcattttttttagagtctgctctgcaactggtttgtgccactttcagcaaattccatttaaaagaaaaatcagcgggccgggggcggtggctcacgcctgtaatcccagcactttgggaggccgaggtgggcggatcacgaggtcgggagatcgagaccatcctggctaacacggtgaaaccccatctstactaaaaatacaaaaaattagccgggcgtggtggcaggcgcctctattcctagctactcgggaggctgaggtaggagaatggcatgaacccgggaggcggagcttgcagtgagctcagatcgcgctactgcactccagtctgggtgacagrgcaagactccgtctcaaaaaataaaaaataaaagaaaaatcagcatttataaaacagccacatttgaggggtgattactgcttttttttttgaaaaggattcactatagcacatttcccctgtgcaatacaatttcattattttttaaatgtcaaaagcagtctatgctattagaaaacaagcaaatgacacaaagaagtgtgtaagtcaaagtgaagggcctccctttagctctcctctgtttctgccctctggaggcaagctctgataataatttggggagcatccttctggagacccttttctatgagccattcactgatatagttatatgttttatttacattcaattctacttaaaaatgataatcacaggccgggcacagtggctcacacctgcaatcccagcactttgggaagccgaggcgggcggatcacctgaggtcaggagttcgagaccagcctgaccaacatggagaaactccgtctctactaaaaatacaaaattaggcgggcgtggtggcacacacctgtaatcccagctacttgggaggctgaggcaggagaatcgcttgaacccgggaggtggaggttgcggtgagccgacatcacgccattgcactccagcctggccaacaggagcaaaactccatctcaaagaaaagaaaagaaaaaaagtgataaccagaatgtgtatcttgttttatgacatggtatctttttctttttttttgacatggtgtcttttttccctcctattgcattcttttcatagtaaactttaaagtcttatttacatggtttttaactaaactttttagtttaaaacaactgtagattcacatgcagttgtgagaaataatacagatcctgtgtacactttcttccgatgacaacaccttgcaaaactgtaatactgcaaccaggatgttgatatttataaacaatcgactgatctttttcagattttcccagttttacttgtactcgtgcgcgcgtgcatgcgtgtgtgtgtgtgtgtgcgttgtttgtttttgtttttgagacagggtcttgctctgtcgcccaggttagtgggcagtagcagtggcaggatcatggctcactgcagcctccaactcccaggctcaagtgatcttctcacctcagcctctcacctacctgggcccacaagtgtgagccaccatgcctgactcatatatatatatatatttttgtagagaccgggtcttcctatgttgcccggctggtctccaactcctcggctcaagtgatcctcctgtctggggtttccaaattgttgggattacaggtgtgagtcagagcacccagccaagttctatacaattttatcatgtttagtttgtgttctcaccaccacaggcaagatacaaaatggttcctcatcactctcctgttgcattttaaataacacaatttacygtgttcaataccatgtatttctccaggtgaggtatacatgtgacaggctccaaaaggcttttaatcaccacagtagtgctgcccaagaaaattcaagggccacgaatgaaagttgcctatgaaattagacatttctcaggagccaaaggtaaaagagaccaatttaaataatatatttcagaaaaccgaatatatccaaatatcctcatttcaacatgtaatcaatataaaaagtatgaatgatatgctacttttctcgtacgaagtctttgcaatccagtgagcccagtcctctggcagctgttagcatggactgagtacctcctatgtgtctgactctgatccaggcactgagacacagatcagctcctgccctttaagaacacaggccaatggaggacaagcacagttctacaacatgagacaggccacggtagaagcaagcaaaggaggcctgggaacacctggctagtagggaaggctctgtgggggcttggcctcaaagcccagggacagcagggggaccagtcagaaggagccccaagtgtctgggtgggagcgatggtgttccctgagatgggaaccaagaggagaggcactttggagggaaggcccagtgtggtttggggatatccaataaaagatggcccctcctcaaagttagtggatgctaggctctgggatgcaggggagggttctgggcttgctattgaggtttccctggaggttgatgtcactgggggcatggagattactcaggccagaaggtgtgtgggaagcatggggtgtggggtacagagtacaccacatggagagccaacatcagggggattcccaagggagaaagacaagccagggatcatccaaggaggcaagacgggaggagtgcagggatctgtggacccacccagccccttctgttctgaggttacaatgggtgatggctctgtggggctgcaatgagtggyggcacgcgcggagggccaggggaggagggacatgctgtgggctccgggttcaggtcccaggactgaattggaagcaccctgtctgtgttgaagttcaagatctaccacttctgttcccagacctcccagttcttcctcacctttatgcaatttcatttttgataatttcagcttcctaaatgtacacatctgacttcactttcactcacatgtctcacccccacccctccaccggccccttctattacagacccaggagacacaggaagtgcaaggaaggtctggagccccaaaagccaggagcctcaggagtcaggtgtcctgacagccaggaaccctgacacccaggagccctggcacccaggaamcccaacagccagaagcctctaccaccaggagccctgacagcaaggaaccccgacacccaggagcccctactacagccwggaagccaggaaccctaacaccaggagccctgacacccagtcaccccgacagccaggaagccaacagcaagaagcctctaccaccaggagccctgacagcaaggaacccygacacccaggagcccctgctatagccaggaaccctaacacccaggagcccctacagtcaggaaccccgacacccaggggtcccgacagccaggaaccccgacacccaggggtcccgacagccaggggccattacggccaggagccccgacagccagggacctcgacggccagaatccactacatccagaagcccttataaccgggaacctccatagccaggagcccctacagccaggagccccttcagccagggagccccgaaagccaggagccccgacagccaggaaccataacagccatgaaccccgggagccaggaggcccgcagcggagtgcccagacttggcagggtcagagccccccagcgggatccagagcccgccgccgaggccccttytgggatttctcaggctcggcagcctcagcgcaggcaggggcggsgctttccctcgcgcagccgctcagctccccgyggccccgcccacatccggcsrccggsactggattgcttctgtctggcggcggcagcatggcggcgggggcggctgaggcagctgtagcggccgtggaggaggtcggctcagccgggcastttgaggagctgctgcgcctcaaagccaagtaagcggggcggcgagcggtaggagtgaggagccggagcgggagcggccgcgagaccgggccggtgtggggcggcgggtggcccakcctggcttcttggtgcccggctcccttcggcctcgggggaccgggcccggcgccacccgtagactcccccgagcctccgcgtgagtggcccgagccgcaggttccccgccccggaacagcgagcagggcgcgaggctcgcctggaagccccggccccagccctggctccgaccccgacggctgtccaagcccgggggacgcgaccttcccggcctctggcctgggcggccccgccgcgggacggaggcggtggtgactcagccgtgccgcaktggcggggcgggggacggggcggcgccgagaccccggccctccgcgccacggagcgggacccacggctgcgggctccacctttcctgtgcccgccgggagggagcggcaggctcggcgtcggcccattgctcttcagcctcccttcaggaacgcccctgtcgcaggaagagcggcgagggaaggccccgttgcattagctaggcctggctgccttttgaagtcagcctttaaagtttgttggacagcaggtagcctcagtcttcagacttaacctgttgccggagacagagatttcctgttccatgaactggtgtagtgagagtctgttcagatttggcgccggtgtccaggtcttcaatccctgggaagactrcaaaaggagatccagaggaatgcatagaaagcgttttctgggtggactagaagctctgaactgcaagcatgcttacgagtaaatgcttactagcgtgcgtgcctgcagggaaaggtctgcacgtggactctccgtgataataccacctcacattgtagactactccaaggactgagttgttctcttagttgtattattagcggttgttatgggaactcttatgtcggattgcctgggatccagtcccaccgcagccactcagtagccatgtaacccctgggcacgtttcatgccyaagcctcagtttcccracggtgacatagattagcacctgttagtacctcagggttgttgtgagggttaaatgagatgacgtatgtaaaatacaaataatacaatgcctagtatgcaggaagcactcagtagatgttggcmcttagtatttcagtaggaagtagaatggttcatggaattcacaggcaaaaagctttgttttkttttgtttttgagacagggtctggctctgtcacccaggctgcagtgtagtggagcgatcacggctccctgcagcctccgcctcccaggctcaagtgatcgacccacctcatcctcccgagtagctgggaccacaggtgctcaccaccacgcccgtctaatttttatttttttttatagagacgaggtctcgccatgttgcccagcctcgtctcgaccttctggactcgagcgatctgccctcctcagcctcccaaagggttgggattacaggtgtgagctaccacgtccggccagaaatgcttattgatctaaattttgttttgtttgttttcgagacaggctgttgctctgttgcccaggctgagtgcagtggcgtgatctcggctcactgcagcctctacctcctgggttcaagcgatcctcccacctcagcctcctgagtatctgggactacacgtgcggtccaccacgctgggctaatttgtgtatttttmgtagaggcagggtttcctcatgttgsccaggctggtctctggaactcctgagctcragtgattcgcctgcctcggccttgtaaagtatcgggattacaggcttgagccsccgtgacctgccctgttgatctaaattgagtgaaattttgccgactgaatttgaattagaggcaagtagtactctgattttgcaatggagagtgcaggtgagatggggtgttgcctttggaaatggggagrggtgcgagttactgactaatggttagaaatgctttatgggggtgatgaaattaaagtgttatttaaacagctctttaggcatttcaggtttacctgggaaattgttacggaaaaaagcaggggttggggagggacatgtgacatttactcactgatggaagctgggctctgactcatccagtacagatcagcacaatcacaggagtcaccagaagtggcctcttgaaatgagcaggtcttgtgtggacctgccctaagtaaacgttttgaatttaccatcacctgaaaggctgttttgtctgttttacatgtttgttttaaatgcttcatgttttaaaaagtccttaaactatcaaaatgaataaaagtgtttttttttttttttttttttgggggggagacagagtctctctctgttgcccaggctggagtagagtgcagtgacacaatcttggctcactgcaacctctgcctcacgggttcaaatgattctcctgcctcagccttctgagtagctgggattacaggtgcccgccaccacgcctggctaatttttgcatttttagtagagatgggtttcaccatgttggccaggctggtcttgaactcctgaccttaggtgatgggcccgcttcccagcgtgctgggattacaggcatgagccactgcgcccggccaaaatggataaaagtttaaatgtaagtaccatttggatgttgtatccttgccgctggcctgtacttgaaatggcccaggaaacaatgtgcactttccttagtgactagttcaaacggacacgtgataaatgatgtgtggcatctggggaaggagcacatttctgcagcttttttggtgaagatggagacatttaagaatattaggccgggcgcggtggctcacgcctgtaatcccagcactttgggaggccgaggtgggtggatcacgaggtcaggagatcgagaccatcctggctaacacggtgaaaccccgtctttactaaagaaaatacaaaaaattagccaggcrtggtggcaggtgcctgtagtcccagttactcgggaagctgaggcaggcgaatggcatgaacctgggaggcggagcttgcagtgagccaagatcgtggcactgcactccagcctggacgacagacgaagactccatctcaaaaaaaaaaaaamcaaaaaaagaatatcatggtggcttacaccagcaaacccagcactttgggaggatggcttgaggccaggagtttgagagtagcttgaacaacatagaacccatctctacaaaaaataaaaaaagtagccaggcatggtgatgcatgcctgtagtccccagctactcaggaggctgaggtgggaggattgtttgagcccaggagttccaagctgcggtgagctatgatcctgccactgtactccagcctgggtgacagagtgagaccctgtctcaaaaaacaaaaagtgcccgaattttagtacttgtgttgatgtaataattttaaatctactttccaaatcatcgcttctccaattttaaaatttgacatgaattgaaatttttttcttttaagtagttgaatcagatatttacataagttgctgaaatctcagctggtttgtacaatggggttattaatatccatttgcagagtaagcaggtttagtatatgatatgtttaataagcagtagctggtatctgcagatgaatgtagtagcagaatactataataattgaaaaacaactatttgctgatgaagagctgaagtttattacattgtctaaagttacattagtcaggatttgaatgtggtttttgtctgatggtttttctccaacaatgctccaggcatatggggctatccattaagatggaaagaatactgtaacatgtaatccaaaaggggataacgtttatatttgtttcagatatagtatgtccttataatattggacattatgtgcttaattgagaaatggaaggtaagcattaaataggagaatattgtggataatttcaactaacaatatcatgttttaatgttttcaaatgttttatatttttgtttcatcttctcaacatcccagagtgttggttattgctgttttacagatgtggaagttaaattactcttcaaaaccatgttagtaataatgaaactgaaatgaattcagtttctatggcatactttcttcttttcttttttacttatttgggctcatactattataaagtttggtaacctactttaatttttgaaaaatgtagttatattagtattttcctgtggcgttgaaagttctttgaaaatttgatttgtaatggctttatgttttcttatgaccatttaaaaactattattgagcatcagaaatttttctgatttgctacgtaaagtagtgggaaaatatccatgtacagaaaatctttgtctcttaattacttccttaggattgatacttatgtgtaagaaatttctgaaaggtcccaatttaatttttaccagcaggacatgaaagtacttctcgtcatcctttttatcattgaatattatgatttaaacagtccttttgttggctgggcacggtggctcatgactgtaatcccagcactttgagaggcgaatgcaggcagattgattgcttgagcccaggagtttgagaccagcctggtcattggccaaagcccaactttacaaagaacaaaatatgcctgtagtctgggaggctgaggtgggaggatcacctgagcccaggaagtcgaggctgcacttgccttgcactccagactgggcattagagtaagaccctgtctcaaaaaaagaaaaaaaaaattttttttttggtcaatttggtggaaaatggtatcccagctttaaaaagaaattgaagtattacatacagtaacaatgcacagatcttaatcgtcagatgtggtgaattttcacaattgtatacacaccgataaccaccattcacaggaagartatagaacccaggaagttttccatcccctttagcccagctactgatttcttactgtcactgtagatgagttttccctgctcttggactttgtgtgagtagaatcatacagttctttgtctgtgttatcttttgctcacatattttcaagcttcatttgtgtcattgctyatgtctgtggttggttcctttttactggtaagttacattctgttgtatgaatgtctatcactttctcctgttggcggacatttggctaatttccagttttgatttattatgtatagggctgctgtgagcattcttgcatgaggcctctgtgaacctctgttttgttcttgccatccttaggcaatggacaaaaaagcttccctggatcctcttcattgctggaggctatggtgggcagaggctcctgagggagggttttgaggggtcaggcctgtgttctagttttagggccagaattcagttccagggccccagacaactgcaaggaagactgaaaaatgtaatctagctgaatgcacaggaggaagatgaaacagtgcttgattgaaacagcacagtctctgccgtggacctgaggccccacctactcaaccattgaagctgctgagttgtgctggatgcaaattaacatccggtgactaggggctcctacaatgtgtccttccctgccttaggtgggtcttcatttggagcttcctgctttccttgtgtgcctgtggacactctcccttcatcagtcctaccagtggtcttgccctctgttttcctatgctttgataaatgaccttgcttcccacctgagagaaaacaggatttcaggtagcatctccccaagccctccttccactctcacctctcccaacacttaccatttatttgtagccttacccattcttaattccttggctcctgactcagaggagactgcckycttcttcttcaaggtaagctcttctctgctctggatttcccctctcctgcctcttctgagtccttgcatcctcagctgtcttgtgtctacggcccttccctctccatttgcactatcccctagtaaaataaacatataaggattttcttgtattaaaaaggcccatcccttgattttgtctttttctctgcctgtacagatctcttagagtacatctctgcttcctcatcttcacttcagtcctcagtggactgcagtctgacctgtgcttctgctattccattgaaggtactctctctgttagttgccctttcctgttgcattggatgattgtcactccctcttgacactcttctcttgacttctatgtgacccttcaatcttccagtaccgcctaggaccccttaatcttccagtaccgcctaggaccccttctctgctttactacataagttccttctcctccatctgtcctaacttaatgttgataagccccctgaggcgctgacctcgggtctcctctgtgtccctctgtaaccctttgcggtgtggtgctggcactgttcctttcttgattcccaaatctgtatatcargtgcagacttcttccctgagctctagacatcatactaacaacccattaaacttcctttcctcaggttggcagcttctgcactatgatttgaggcatagtgccaccactagccatcagtctctaagccagaacttggagccagctgtagactgccttatctgtcaccaaatcctgccccttctaccttcgaaatcctcatgctgctctttgcttctgctttcctgacactttattgtaggcttattctcttctcgctggtattatttgatcagtttttacagtttgttattcctttccttacccataggttagttgtccttggttctttttgccatggaacatatttctgttcgtgatttttcagatttttttgggaggtggtattatatttgaacagaattccataaaactgaaggattttttagttggatatgaccatagatatctttgccaagataattttgtgtgaaaactaactaaaatagatactgagttattaatatattctgtgtgttcatactataaatgtttagaattttttttttttaaatgggtcttgctctgttgcccacactggagtgtagtggtatgatcatggctcactacagcctcgaccccctgggctcaagtaatccttccaccttagtctgccagaatgctgagtacaggcatgagccaccttgcctggcctagaaaaatcttttttttttttttgaggcagagtcttgctctgccatccaggctgcagtgcagtggtgtgatctcagctcactgtaacctctgccttctgggttcaaacaattcttctgcctcagcctcctgagtagctgggattacaggcatgcaccaacacacccggctaattttttgtgcttttagtagagttggggtttcaccacattagccaggctggtctcgaactgccgacctcaagtgatctgcctgcctcggcctcccaaagtgctgggattacaggtgtgagccactgctctgggtctagaaaaatcttttgtagcataatattaaaaagtataaaaaaaagtctttgtgaaaagcagttctattcttttcctcgttttgcactggcatgccttcattttcaacacttactgctgtttctatggtcacggttatgtctctccatcactataccacatttaaaaagtaaataatgatattattagtaatgtgtctacaaccatttttcacaaacattgtgccattaatacagaaattcagtttccactttgcccaggggtctgaaaatatggttgatttgcctggctttttttttttttttttcgtttactttaagttctgggatacatatgcagaatgtgcaggtttcttacataggtatgcatgtgccatggtggtttgctgcacctatcaacccatcatctaggttttaagccctgcatgcattaggtatttgtcctaatgctttctctccccttgccccccaccccctgacaggccctggtatgtgatgttcccctccctgtgtccgtgtggtttcattgttcacctcccacttatgaatgagaacatgcaatgtttgtttttctgttcctgtgttagtttactgagaatggtggcttccagcttcatccatgtccctgcaaaggacatgaactcattcctttttatgactgcatagtattccatggtatatatgtgccacatttcctttatccagtctgtcattgacaggcatttgggttggttccaagtctttgatattgtaaatagtgctgcaataacataatgtgtgcatgtgtctttatagtagaatgatttataatcttttgggtatatacccagtaatgggattgctgggtcaaatggtatttctgattctagatccttgaggaattgccacactgtcttccacaatggttgaactaatttacactcccaccaacagtgatttacatgacttttaattgaggtggatgaatattcagatctacttcaaatgggcttcacttgaaatatcattgaattgaaaatttatctgaaagagtctcaagaccttgcagagtgcttttatgttccagtgttgtatacaacaaaattctagcaatatgaaaaacttcagacggttcttttaaagctttcttttttttctttttggtaatttatatcagtatttgtktatttccaaaattggtataattttaaataaatgcatttaattgatttacaggtccctccttgtggtccatttctgggcaccatgggctccacagtgtgcacagatgaacgaagttatggcagagttagctaaagaactccctcaagtttcatttgtgaaggtatttatatttcaatgtcatgtcttttgtgaatttaattctgatttatgggttagattagggctgggtgcggtagctcacacctgtaatcccagcactttgggaggctgaggcgggcagatcacctgagttcaggagtttgagaccagcccagccaacatagtgaaaccctgtctctactaaaatacaaaaattagctgggcgtggtggcgggtgcctataatcccagctatgtgggaggctgaggcaggagaatcttttgaacccgggaggcagagattgcagtgagccgagattgtgccactgcactccagcctgggtgacagagcgagacgctgtctctaaataaataaataaataaaataaaaaattagattttattaactaatataaagatggagtggtatggaattccaaatatgtataattggtgtgggatctgttatttttgcacatcattcttaaaaatcttaaaataattttgcattttttttttctttgagacagagtcttgttctgtcgcccaggctggagtgcagctccagctcactgcaacctctrcctccccggtttaagcgattttcctgcctaagcctccygagtagctgggactacaggcacatgccaccacacccagctaattttttgtatttttagtagagatggggtttcaccatcttagccaggatagtcttggtctcttgacctcgtgatctgctcaccttggcctcccaaagtactgtgattaggcgtgagccaccaygcctggccaaatgtacacttttccttgatcatcctcgggtgtgaggcatgactaccaaatgtcaaggtggctgtgggctggagttttggagagcacaggcagacaarttagttccctgtgggtaactgtggttttaaggcatttaaaatagtaacacaaattatgtcattgaaaagctaggtgtgctgtagaaaataattcaggaaggggtatgtaaatgctgctagggaccagggaacaggaagttgctatcttggtttagatgaaggcagacctccgggagaaggtgaaagtctttctaacctgttcagaatgtagaggaagatggaagccagtcagtctcttccttgcctcttttgtttttcactctggttatgtgtactcctacattcctgctgtctctcttgagtggatgagtgctaggaaagctgtagttttgactgtggattaactcaattggtttagcacgttaaagatattattcaggacttagtactggtttaggcagcagggccaaaatatgtgttgagagtcttagaaatgaattatcaggaggggaggtgcaccttgtattcccaagcctgaatccttaagatttaaaaaacaaatgaaaaaccaaagtcttattttttaaaacaagaatctgtgagttcagagtacatgttacccaatatactcatatatgggattaaaaataacatcaactgtattggtctgtatgcctctttctatgtaaactgaaaacacagaattttgacagggtaattcattcgtatagtaggtgataaaattttcaggaggcttctgtataaataagtttgctttgaataggcattatactcagttggctcaaaattccaaacagtgtagaaagatgtccgttgrgaaggcccaccccgttcctctgttgtcacccttgtgtcccaccacataagtaactgcttgtattaattttgtatgaatccttctagtgtttctttatgcaaatagggcagatgtgaatatagtgattagctttttaaaatttaaggacttatttaaaattccaatgaaatgtataatgtaactgtagagwgtaaccctaaaatgtccaatataaataatagaagggggcattaaaactgcatgtttggtcagtgataaaagataatgattacaagtgaaatgaatgattaaacatttcaatcataagattaatcaagatgatggtaattgttctaagtctgcttttatgtgtatcatgttactggtttaggtaacacattgttcttagctgctatctgaatgatttatttaaagtgactatagaattacttctcacattggtaccagacttggcagtgagattttaagttgttcaagtgcttaagtatctctgtgagccaaaggttggaggagccctcagcgattttgggttgtgggggatacctgagcctgactgcacctgccactcatgaggatgatgacagcgtaagattggtcattcttccaggagtcatcactttccagaaattcactctataacatagtttttctttgattagccatcattaagggcaaaggtactttccatggcatttgtaaggcagctaattaaaaggcacttgccggacaatagtaagcaaaagagaagtagaatgagagatcatcgttctttcccagtaagagaggcgtgcaggctgggcgcctcggctcacacctgtaatcccaacacctcttgaggctgaggtgggaggattgcttgaggccaggaattcaaaaccagcctgatgcacatagcaaaaccatctctacaaaagaaaaactaaaaaagttagctgtgcatgttggtgtgcacctgtagtcccagttacttgggaggataaagcagaggattccttgagcccaggaggtctcaaggcggtcacaccactggacgtagagtgataccatgtctcaaaaaaaaggaggaatgtagttcattttaaaacagctttctttttgttaatgagagtttttggaaasttctagagtatgaactaatgttcttctgcttcatcttgtgtctatttgatttcttagtcttttttttggagacaaggtctcactcttattgcccaggctgtagtgcagtgatcttggctcactgcagcctctacctcccaggctcaagcaatttctccaccttagcctcccgaatagctgggactataggtgtacacccctgcccagctaatttttrtattttttgtagcgatacggtttcaccatgttgctcaggctggtcttgaactcatgggctcaagcagtctgcctaccttggcctcccaaagtgctcagattatagatgtgagccactttgcccttcagkctttttttttttttttttttttttttaatgatgaaatggtttggcatttttggcttgtgaagtaaagggatcagttcatttttgtgactgggatttataaaatcattaaataagtgatcatacactagatatttttaaacagattgtaaacttttgtgactatcaacaatttcttattttgtaggagctggtaaaaatagagttagaagagttagtcacccatttttggtcagagtagttagtttgtgctctttggaattgaatgctgaaagacaaggttttcrtatttattgcatctgaatccctcattctctgtattgatgatatggtcgtaaagtgtatttggggtggggcacagtggctcacacctgtaatcccagcactttgggaggtgtgagtgggaggattgttcaaggacaggagttcgagaccagcctgggcaacatagggagacttcatctctacagaataaaaatttaaaaaactagctgtgtacacctgttgccccagctacttgggaggctgtggtgggaggattgcttaagtccaggagttagaggctgcagtgagctatgattgtgccactatactccagcttgggtgacagagtgagaccttgtctcttaaaaaaaaattaaaaagtgcatctgtactccttttgggtgctgtgtttataatgggtggtgttccatttacctgagtcactgccatgtctagtgggctcttctgggctccgtcctgagtttgtcacacctcctagggcccagaggagatgatgtggtatttctatcactaaaaggagttcaagaccagcttgagtaacatggtgaaaccctgtctccactaaaaatacaraatttagccaggcatgatggcgcatgcctgtaatcccagctactcgggaggccgaggcaggagaatcatttcaacccaggaggtggaggttgcagtgacccgagatcgcgctactgcactccggcctgcgtgacagagcaagactccgtctcaaaaaaaaaaaaaacaaaacaggaaaagtcttagagaaaccttgtgtttattcagaataaaatgaaatagttaaaatgttttagtgccttttattttcaaattacatagtcagtatcttctctcatactgattcttgtttgtatctttacccaaaataggagtacacctttgtcatttaattaattgtttgatataatcttccaaaatatggtatctggcagaggggggtgggagagaggaagaatagcacaaggctttgttgggtgcctgctgctggttgtatttgagatccaaatcaactattttgtatgaaatcgtagctattttttcctgtagcttttttttttttggtctctgtgccattggttgcttggatcaggaaatgccctatatttttgtctatattgtcatttaattccttttttcattgcctccttgactagatggtgagatacttgacatggggacctttacctcatcaggttttcattagtaaaaaaaaaaaaaaaaaatagggccgggcatggtggctcacgcttgtaatcccagcactttgggaggccgaggcgggtggatcacraggtcaggagattgagaccatcctggctaacacggtgaaaccccatctctactaaaaatacaaaaaaaatcagccarctgtggtgggacatgcctctattcccagctagtcgggaggctgaggcaggagaattgcttgaacccaggaggcggaggttgcagtgagttgagaccacaccactgcattccagcctggataacagagcaagactccatctcaaaaaaaaaaaaaaaagaaagaaagaaaaagaaaaaaatgactttcctttgttcgaatggctcttgctttccatgcaagcctccctgatcccacttccagcttactgctcccatcctgctaggccatagtatactcattttaccatatcatgtacttcagtgcaaacattctcaaagtcagacttaccagctagctggttggtgagattttatactattgtatttcatttgacattaattttgtttatatagtagctgctgtacttgcattttattttcattgtaatttaaaatatacgatcaagggtatggaggagttacgtatttaaatgtatttttgcttcttgaaaaacaagaatctttattcttattttgaaagtgcgactatcttaaagatacagattgcactgttgaatttctaaagatctgtacaatcattataaatgtaaatgtagtttatgtttaatttctgagtgtataattactgtatrtaaacagatagtgttgggcaatcttcygaagggtaccaactagctgtataaccaggtgcatgctaactagtggaattaaaatttttcagtggcagagaatgttggccaatttatttggcatcttaagagagcatatgttggatttcattctacaggaaggaactctaaaaatgcgtctcagataattctggtagaattgttttttttttttttttgagacagagtctcactgtgtcgcccaggctggagtgcaatggcgtgaactcagctcactgcaacctctgcctcctgggttcaaggaattctcctgcctcagcctcctgagtagctgggattacaggtgtgtgccaccactcctggctaatttttgtatttttagtagagacggggtttcaccgtgttggccaggctggtttcgaactcatgacctcgtgatccgcctgcctcggcctcccaaagtgctgggattacaggcatgagccatcgtgcccggctctggtagaattgttaaatcttaaaaagactgtaggtttttatctgtgctatcttggtaattaaaaaaacccaaaattaacatggttttattagctgtttctgggctaagtttggtgaaagtatttaaagaagttatcaaaacttttttttaaaattattattatactttaaattctagggtacatgtgcacaatgtgcaggttcgttacataggtatacatgtgccatgttggtttgctgtacccatcaactcatcatttacattaggtatttctcctaacgctatccctccctcagccccccaccctccaacaggccccggtgtgtgatgttcccctccctgtgtccatgtgttctcattgttcagctcccacttatgagtgagaacatgtggtgtttggttttctgtccttgtgattgtttgctgaaaatgctggtttccagcttcatccatgtccctgtaaaggacatgaactcatcctttttttatggctgcattatattccatgatgtatatgtgccacattttctttatccagtctattattgttggtttaaagtctgttttatcagagaccaggattgcaacccctgctttttttgctttccatttgcttggtagatcttcctccatccctttattttgagcctatgtttgtctttgcacatgagatgggtctcctgaatacagcacaccgatgggtcttgactctgtccaatttgccaggctgtgtcttttagtcttttaattggggcatttagcccacttacatttaaggttaattttgttgtgtgtgaattttttttttttttgagacggagtctcactctattgcccaggctggagtgcagtgatgcgatcggttcactgcaacttccgccttccaggttcaagcgattctcctgcctcagcctcctgagtagctgggattacaggcacctgccaccatacccagctaatttttgtatttttagtagagacagggtttcaccgtgttggccaggctggtctcaaactcctgacctcaaatgatccacctgcctcaacctcccgaagtgctggaattacaggcatgaaccactacacccagtctgttacatgtgaatttgattctgtcattatgatgctaactggtaattttgcccgttcgttaatgcagtttcttcatagtgtcgatggtgtttcaccatttggcctgtttttgcagtggctggtactggttgttcctttccatgtttagtgcttccttcaggagctcttgtaaggcaggcctggtggtgacagaatctctcagcattttcttgtctttaaatgattttatttctccttcacttatgaagcttagtttggctggatatgaaattctgggttgaaaattctttaagaatgttgaatattggcccccactctcttctggcttgtagggtttctgccgagagatctgctgttagtctgatagccttccctttgtgggtaacccaacctttctctctggctgcccttaacattttttccttaatttcaaccttggtgaatctgacagttatatgtcttggggtcgctcttcttgaggagtatatttgtggtggtctgtgtatttcctgaatttgaatgttggcctgccctgctaggttgggtaagttctcctggataatatcctgaagagtgtttcctaacttggttccattctccctgtcactttcaggtacaccaatcaaacgtagatttggtcttttcacatagtctcatatttcttggaggctttgttcgtttcttttcactcttttttgctctaatcttgtcttctcactttatttcattaatttgatcttccatcactgatatccttttttccgcttgatcgaatcggctattgaagcttgtgtatgcttcacgcagttctcatactgtggttttcagctccatcaggtcatttaagctcttctctacattgattagttagccacttgtctaacttttttcaaggtttttagcttccttgcaatgagttagaacatgctcctttagctaggagaagtttgttattaccgatcttctgaatcctrcttctgtcaacttgttgaactcattctctgtccagttttattcccttgctggcaaggagttgcgttcctttggaggagaagagacgttctggtttttggaattttcagcctttctgctctggtttctccccatctttgtggttttatctacctttggtctttgatgttggtgacatttggatggggtttctgtgtggatatcctttttgttgatgttgatgctattcctttctgtttgttagttttctttctaacgggcccctcagctgcaggtctgttggagtttgctggaggtccactccagaccctgtttgtctgggtatcaccagcagaggctgcagaacagcaaatattgctgcctgatccttcctctggaagcttygttccagcggggcacctgtctgcatgaggtgtctgtcggcccctactgggaggtgtctcccagtgaggctatacgggggtcagggacccacttgaggaggcagtttgtctgttatcggatcttgaaygccatgctgggagaaccacctgctctcttcagagctgtcaggcagggacgtttaagtctgtagaagccttttgttcagatatgccctgcccccagaggtggaatctagagaggcagcaggccttgctgagctgtggtgggcttcacccagtttgagcttccctgccactttgtttacactgtgagcatagaactgcctactcaagcctcagcaatggcctactcaagcctcagcaatggcggacgcccctcccctagccaagcttcagtgtcctaggtcgatctcagactgctgygctggcagcgagcaaggctccatgggtgtgggactcaccgagccaggcacgggagggaatctcctggtctgccagttgcaaagactgtgggtaaagcgtagtatttgggcagaagtgtaccattccttcaggtacaatcactcatggcttcccttggctaggaaagggaaatcctccaaccccttgcgcttcctgggtgaggtgacgccctgccctactttggctcgccctccatgggctgcacccactgtccaaccagtcccaataagatgaacccggtatctcagttggaaatggagaagtcactcatcttctgcattgatctcgctgggagctgcagactagagctgttcctatttggccatcttggaagcgatctcagcctaaactatcaaaactgttaatttaaatttctgttttgaaatttatatttggctgtttgacaaagattctgattttgaaatactatttttttttttttaatatcacacatcacagagtagaaggaagcckcttttggaggtttagccaaatgttcctgaatagcaggtttaagtgttctctccttagtcttgcagctcagtgccatcattggtaagtggccatccccattcttggcttaggtatagtgaccacctttgtttaatattckgtcaaaatttatcaaacactaaatgccgcacagtagtctaggcactgaggatacagaacattaagggtcacagacaacaaatagtagacatatatgttatcaaggtaattttaggtagtaataagttctgcaaaagaaagaaataggctatgaaaatgggaactgggataggtgggatactttatttagattgggctggaagggtgtatctaaggaagagagatctttcttttttttttaagagataaggtctcgctctgtcacccaggccagggtgcagtggygtgatcatagctcactgcagccccaaacttccgagctcaagcattcttcccaccttggcctcccaaagtgctgggattacaggtgtgagctactgtgccagcagggccatttgaaaaayggaaaggagccagccattgggagagctaggaagagcttttaaccaaagtgcagagtgtcaaagcaaaaggctagtggggctggagggtggtgagagtgtgatgtgaggttggagtggcaggcaggggtcagtgaccttgtggggaacgataacattcaggtcttattccaagtgcaatagcaatgacacagttccattcctgtcataagtcagttactctggctggagaatggtttgaagcgggaagggtgcagaatagaagcaggtaccccagttaggaggctcctaggccaggtgagagatgaaatgatgtcatggtctgagtgggattatattttggaagggagcccagaacacctgttgatggagtaggtgtgagagtgagagaaatggattaatcaaggttgtctcctttttgattttaggaactggatggattttgtgagatagagatgccttgtgggaggagcaggtttagtgagaggtgtttgatagagctctgagtgcaggtgttgagtgtatagtctggaggtgaggggagaggcctgggctgggaagaagttgggagttgtratagcagcgtcatttagagccataggatcggatgagcccactccaggagaatgagtgtggataggcatagaagaggactcagaaccaaggctggcacatgccggtgttcaggggctgccagagatgacagaaacggacactgagtttgagcatttagggagggcagaggaaacatggagagccaagtggaaggtgttgcaggaaggtggttgtggtcactgttactgaaggatactgaagggtsagtggaatgaggacagggcagcagccatgaagtggaacatggtgtagggaggcgcttggctccagagacacactgtctgcctacatcactcaacaggtttgtaattgtcctagtccatttgtgctactataacagaataccttagactgagtaatttttaagcaacagatttattgctcacagttctagaggctgggaaatccaagatcaaagcaccagcagattcagtgtctggcaagggcttgctctctgttcccaagatggcaccttgttgccgtgtcctcacttggcagcaggagaagaagggcaaaaacagactagccagcctcaaacccttttataatggcactgttcccatccatgagrgcatagccgtcttggcctaatcacctcccaaaggcccctcttaattgctatcacctttgatgttaatttccagcatatgaatttaggagggacatatacattcaaatcatggcagtgatctaggccaagttatggaacctctttaagttccagtttcttctgtaaaatggatgttaaagacggtgcctgttgttgtaaggattaagtgagtctatacgtgtgaggattaagtgagtctatacgtgtgaggattaagtgagtctatacgtgaagcacacttagaatagtatctggcccagaataaattgtagctattcgccgttactgtcacagtggcatccgatgacccctgctcaataaaagtagaatagagagaggattccccatctctggatttacctgatgcctcccttgcgctttctttccttctccatagacacatagcaggtgggactggtcccaaggtttggattcttggtataggaagcaagtggttcccacttgaggcattttgcctggattctgttttggaaatgttcatgtttggttggtcctgaagtcttgtataaatcctactttgacatgtaatctttatttttgattgtagtagtagaaaaaattaaccatagtatagtgaaaaaagcacaggttttatagtcaaacaaactttgattgtttctcagctctgccatttattagccatgtatctttgggcaagttacccaagttatctcctgtgttagttagggttctctagagaaacagaactaactaataggataggtacagatagatgagaggggatttaggaggctgagaagtctcaccatctgccctccacrtgctggagaactagggaagctggtggcatagctcagtccaagtytgaaggcctgagaacctgggggccgctggtgcaagtcctgcagtctaacggctggagaatctagagctgtgatgtccaaagacaggagaagatggatatctcggctccaggagggagggatggggcaggaggggtgggggatgggggtgtgcggaggagagggagggagagagagaaagagggagaaagacaggatttgcttttttgcttttcctctgcatttttttttcctagttcttttcaggccttcaacctattggatggtggccgccgcccccccysccccccccccccgcccatattgggtgagaatggatcttccttactcagtctactgattcaaatgccagtctcttcccaaaacaccctcacagccatgcccaggagtaatgttttaacagctgtctgggtatctcttaacccagtcaagttgaaaccttaaaccaaccattgcacctcctctttaactacttactaagttgaaatgataacatgctaaaatttcgcacctttcaaaattgtctgtaggctaggctgttttatgttaaggccttctcatggtttatggcacagggtaggtcgcccatgaatgatagctatttctgataatctttgagctcttctgaatgcagatcctttaaaaatatttatatatttattttctattttcattgttaaaactgttacattaaatccaacaaaaatatttctaacgaattttagtgctgcaagggttttaggacttcagatgcccttgatgttctggagaactcttttgccttaaatgatgttcctgttcctttcttcttaagatttgtctgttaccattgtctcttgttatgaggatcccttcctctgggagctgattgagtggaggcagttgtggtagttctcagccttcagcaggaattgtaagaggtcatttgcttcccagaagaattgttactccactggaaatcagcaggaatataagaatgtaagaagaaatcagatttttttttttttttgagacggagttttgcttagtcgcccatgctggagtgcaatagtgcratcttggctcactgcaacctctgcctcccgggttcaagcgattctcccgcctcagcatcccgagtagccgggattacaggcacccgccatcatgcctggctaagaaatcagattttaaaagaagataggaatttgtttttatgagtcagggtgctacctgttttgttctggtttaagatcacattaccttatttctacttagtattgccttttttttggatttgtattacttgttggttagaattcagtagtactgaaggaagggcccttttgtgatccttgctgaatgcccagtgcgtagtgggcactccatagatgttagttgaaagacagaaaataatgagctggaggatggtagtgtaggcatgccctagtcattaacttttctggtcatctttgatctgagtgtgctgttgtgtatgtgaaagaaaataacacaaacgtctttaaaacttttgagagtctgttctaaatagctgtctcgaatgccttatctttttgttcttttttcagattattagactattgttgattttatagaattttcatataagtacattttaaaaatggaaataattaaaaatattgttgcaaaagtgttttctaaaaaaataagaattaaggtagtaaaagagcacccaagaatgtaggagatagaagataaaagccaaatacataggactctgcttcccactttctctgcaagctttatttgggtagatataacctgattgggtaaggctctaaataaaaatagtatttcaagcccagtggaaatcttttactcttggaaaaatacagtgtatatattttaaaaactttttaacaatataatttatcaataaattttatttcctacaggtataatgtgaatacagatttttattggtttcaaaagtttatattaaattgacagtcctatgagggaaggatatagcttggtatttctcaaagtgtatcatttataaagacctacgtaaatagcttacagtaattgtgccctaattatttagaaattgtgttactaaatgtgttttaaattcatgcatcagatatcacatcctgtcttgttcaggggccttaaggaaattatcaaacacaatgcagtcatcttatttaaaaggtatttacattgtaaatagaccggaagcaagtaacctagcaagatatctgcctagtgtccagcagccttgcaggagttaaaagcaaaatttatcagacatcaatagtttattgaagaaatagtcctttttgcttcataatttgcagaaggctgcaactgtcagtcatgatgtactgcctcttgaaattagtcaatagagcaaacagcaagaattgctgtgggcagaaaataagcactgtaatcatgacataactggggtcagtgatttatggatttcaatatagtagtagctgcatatgattgaaaatttactaggtcactagtgcaccaaaaattttattcacagcctccaggcatcttttgaaatgtgcaacaaaataaaaacctctgaacctgttttgacactgcaaactcagtggatgacatgccagcccagtgagtctcatttaaatgtaaatgtgtcataaacttttgtaccatgctctttaaaaaatgccagctacttgaagggataatgcatgtgaaactgatttacatattaaagtastgaaaaaggaccttgtaataatcaagcttgaattcttttattttaaagttggaagctgaaggtgttcctgaagtatctgaaaaatatgaaattagctctgttcccacttttctgtttttcaaggtaaggataaaggtggtacaagagattatccatttgtagggtgccatggggctacctattttgtttctttaccctctctctaatccccraatattaggtgtttggctgtttctggccctccacctttcttctgatagtctcatttttgcaccgatgctgagaaagaagaccatgccagctgcttgccagcatcttagaaaagtagcatggactgtgtagggccagcagccagaatcagagcttcttgatcaaaattcagatatgtggctgtggaaccccagtgttccctgagttggttaaattggttgtttagagcatgtgcctggacataatggaatctctggctggttctggtttgatgaatgacttttaggaagcaggtgcacacctgtgcttccaggcacccatgggtgtcatcgtagttccccaaatacctcatttatacttagtaatagattcattccagccamtgtgggggcagtcttttttgtattatgttagactgacctgatttgactttgagatgttgcagtgttttctcagtgtgtttctgagaaaagaaaaaaattatgtatttctaaaattgagatgcagtgcaggcaattggcaatgagggtttcttttttkacatctccggtaatactgttgtccyctttaaaaatctgctataacaatgtcattattatggaatgctgcatgtattctaaataactttttaaactttagaattctcagaaaatcgaccgattagatggtgcacatgccccagagttgaccaaaaaagttcagcgacatgcatctagtggctccttcctayccagcgctaatgaacatcttaaagaagatctcaaccttcgcttgaagaaattgactcatgctgccccctgcatgctgtttatgaaaggaactcctcaagaaccacgctgtggtaagaagctgcctttaacataatataaacaaaatgggtgctttcccagaatggggtatggttgagatgggcatcctgtttccaaggatgctataccatacatcttatacttgtgttcacatacttttagaaaatcaaaaaggttataattcccaatgacactatataagaattagtttgcattatggactcagcatgttggaaccaaaaggggtctcagaactcatctaattcagatttttgttttatactgaagtcctcagactcaaagatagaggtgacttgcccaaggtcacctggtaagcagagttaggattaggttccaactaccatattgctgtctcttttgcctgtttatctacttttgctgttaacagttattttttctttcttggcagcctcctgtttttcacctagttcagattcagcaattaaaaaatttgcggaatttttcagtgtttttgtgtccagcctgtgtgcttttgcctcccctgtgtcatcactgtctaatgattctcttcctgcattgctgtcatttccagtttatagctgctggtaatggaaagattccgaattcttggcttgtagtcactcttattttctgtacacatggatgcttataattttgtccttaagtaagttttagagttatttgacccctctggtagtgggtttatgttattttctttttactgtgcctagtacaacattagtatgctgcataattgagcatttaatgccatttgatgatgctgttgagactctaagagtatttgtatcaactacacaggagggactttattaagataggggcagtaacattgagtatgctcttgatatgattacagcatgtccagagtgactttataaagatagccaagcttctagtgtgaatttgattctaaattcttccctgtagggttattaaattacatattagcttatgataatgtctagttttaaaaataaagtttcatgatgaattcttattttttcgagatggaatttcgctcttgttgcccaggttggagtgcaatggcacgatctcagtgcgacggaacctctgtctactaggggtcaagcgattctcctgtctcagcctcccgagtagctgggattacaggtgtccaccaccatgcccggctaatttttttgtatttttagtagagatagggtttgtccatgttggtcaggctggtgtcaaactcctgacctcaggtgatccgcctgccttggcctcccaaagtgctgctgggattataggcgtgagccaccatgaattctgtcttaaaagtatctcttagttctgcctaaaaaatttccctgccagtatttatgtgtcagataatgcctgctatttgtgtattgcaaagctaacttagtctgtactaaactaaaggtagcaacagatagtctctgttgcgtttgttattttgtttttaacgggggttgcaaatggttcacattcaccttcttccatgaaacatgaaaattatttcttgtactttgtgcggtggccactaaatgggaacttaccacttcagttgaatggattgtattcagcaccttcattcagatctcaggtacagtagaactggctgtgaaatgtgggtgaagcacacctacagtgaaatctctacagtattctctcctttggggttgaacagcagcagtctcagtcttttctgaatgataaacctaatgaaaaggcaggtggcaacactgaagcttggggaaggagtgctcagaggagaaggatgtcctgggaagtgtgctgcactgggtgtcatgccaggcgagcctcaggcccacccctgcggccttagcaactttggggacaagtcaggtaccctccttgtgcctttaattccttctagtgctgttgggaacaagattggctgttggagccaatcttggagggccttttcagtgtagatattgtatgattattcaagtaaattagagagaaacttagacattttaatttttctgcttaccttttactttattaaactgaatttaaaatatactgctagcatttttatatttatattaarcttatttaaattatgtttattataatggagtgagatttggaagactgtacaaataacagaataaaaaagaagctttgaaatatttcagggctgggcgtggtggctcatgcctgtaatcccagcacattgggaggctgaggtgggcggatcgcttgagrtcaggagttcgagaccagcctggccaacatggcgaaaccccgtctctactaaaaatacaaaaattagctgggcatggtggagtcctgtaattccagccacttgggaggctgaggcaggagaattgcttgaacctgggaggcagaggttgcagtgagccgagatcgagccactgcactccagtatgggtgacagagtgaaactctgtctcaaaacaaaacaaaacacatttcagagccatctgaaaacrtagtattatagttatttaattaataaaagacaataaatattttgagatacatatggttgaatggttacagtttcttcttttaaagtacttctatataatttttataactacattttcagtgggtttttctgtttcctgatattttctgtttcatgtctttctgtcayatatagtaaatagatcatttaagaatgttgctgttctttaataaaatacttaggattaattggaaaatatttttaaactgttttcttatgggaacataagtcacctcgaccctctgctgttcctttctgagcctggttagtggagcattgtttttgctcttcttctggcattttagagaagggcgtaggcaaagctccctttataaaagcactggccatctcatcttgtgaacacgcacgtggctgctctttccttattttgcaccaaattagctttgaaagtgctatctctgctaacaccactgaactcccactgcggagtattttgatgtttgttttttgattagtttgtccccaccttgctttctgctaatcagaaaaacatgaatgaataacatttaaattttatatctagaaaaccttgaaagccatttttagggtctctcctggagccccactggactcagcctaacccctgcacaggtcatgtctccatcttcttatccttcatgtgggctctacctgcagaattgtatggtgtgttatgagcctgacgtgtagatagggtctcagttgaaaagaattggattgtccttactctgtgctcctcatgaagatgggaaaatgcttgttttaggaagagtttccagaagcactgaggtatatgtcatcttaaacagaatcttaaatccttgagcaggttaattatttgggaattcttataactatttcagttaacaaagcttttagcaaagcaaaaggtatttgaggcatagtcagatattccttctgcagtgagagtcatccagccgggctcttacttttgaatcagccacagaatcaggtttcagagatgttttttagggtttattgttaggtagtgatgagatgcggtgttaggcacctattcatgtcatgagtagaaatgactgggggtggaaatggggattctgtggcagttaaacattacttttctacatttaaatatttttattgcatgcatgcatttttcttaaaaaaaggtgtgtaaatattttgttactagaataaagccttcttgccatcttatccttaagcgtaacatttctagtctgccactttaactcttaaaaatgaaacactaccaatcaatctttctagtctgcatgtaattgcctaaagctaaaataaagcttyttctcagccagttacagtaaaaatgagttaatatattggcaacagaataaccatcagcaatcagccgttagctgtttactaatgaactcccagatgaataaaaaaatttcagaatcagtgttttacttcaggctgtacatgaacttaacacttcagatgtaggaaaagcaacttatatgctatacaaataaatactagtgcttcatctcaataaactgcagatttggaaaatgtttagagctcacttgtagatccatgttttaatagtaaatatgattttgggtgacatcagtaaagcccattcttgcaattaatcttatattgaattttatggtttgattttatttaaaaacaattgctgacactgctaagtcttatagaaattttgaatctgaagaataggttcttttccagtgaattacaactgtgtttgagaagaagaatgaggcgtgaaagagtagggccctacatagtattgggaacaatggagaagaattagcttatggaaagaaaaatactttttttttcagactaggctaataggtttataaaagactgatattcacactcttattcttcagttataatgtcataataagatgatgtcaaaaaagtacagaataaaaatgtgtcacaaaagtataataaaatcatggaacataaaattgtcgctatagtgtagtaaaaaaattacattacatactttagggaatgtaaatagttttaaaaaagaaactgtcaagttatgacatgagatgagaaagaataccgtcaatctattgatggttcatatataacaacagagaagatagctttaaaattcaatgtactgtgtgtattttagactacaggagaacacatgccttcttgatttctaatttatcctacttagagatagtgaagattgagaactactgaagtgagaactcaggaagtagtaaaatggcagtagaaatgcaacagcattgggttttaagtatagtcaagtagtagttaaaaataacaattgtagaattttttcatctgcccagaattgattctcatagattcataacagaaaggctgggagggactgtcagagcatcaggtcagtctcctgattagtaggaaagtgctgagcrgaggccacccatggcctcatcatgtgtcaccttggtgggtggagggagcaggtgtcagattcagatttctggttttgtttaaagacaaggtcttgctttatcactcaaactggaggctggagtgcagtgacaatctcataggtcgctccagcctcagacttctgggctcaagtgagcctgttgcctcagtttccccagtctctgggattacaggtgtgcaccatcacccccaggtctctgctttttggctagtgctatttctcctgtgacaaaaaatgtccatgatattgaagaataactttaataaatacacacaccactttttttttttttttcagtagtcacagttgtgtcaaaaagttaagtcatatctgagtgtgtgatatggttcaaggtcaaataaggggatccaggaatttattttctctttgtatattattcagccatgctaattaaatcaccagcaaaataaggcaggcgtctatgtcttttagatgatatgtacgctgaactaatgtattatcatgtgtatgtgttttgggagagagaagttaagtgctttatttctttttttgtgtacaggtttcagcaagcaratggtggaaattcttcacaaacataatattcagtttagcagttttgatatcttctcagatgaagaggttcgacagggactcaaagcctattccagttggcctacctatcctcagctctatgtttctggagagctcataggaggacttgatataattaaggttagaattgagaagtctgtgctttgtaaagaaattcsatttagagcatactttttaaaatgttgtgataaatctaagatacraatttcttatgaatctatatttactaataagaacctgcaatgaatacacagtatttctgattagttgattgatcaataatctgtgttatggtatgatcaaggagatttatgttataataatttttttcataaaactggtatgtgtgcttattttaggagctagaagcatctgaagaactagatacaatttgtcccaaagctcccaaattagaggaaaggtaagtgttttagaaggtttcaaatagcctatcatttaatatattaaaaatattttaaagtcctcaggttttgcattgctctttctgtgtagaaatcaaggatttggtatgccagacgtcataattgtttagtcacattagccattcaaactttggcaaatctaatttgtattggagaaattttagcaccaacttagtgatcatgtggaggatctgctttgcttttatagaaatgtcattgtttctgtggaacaaccaagttttgcttacctctctgcatttcagagccagggtccagttgttttgtcactgctccttggcgtaacctcagcacactcgtgttttactgggtgcagccttggtgactgctgcgggtgctgccccaacgccagagcactgagtgacaagtggtgagtgtgaaaaactcatcacctcgcaacaagctttgagcacttctcatggcctttctagaccacgagaacttacatgaacagattttggaggtgtgaaacatgtatttgttttatcaaggatctcacttggcttttagagacgttctcttacagaaatgttggactttggtgtgtaaggcaacttaatgggatttttattgcagtaaaattaatatagaactttaaaaaggaatttattatatcagcaatcagccattcatagttggggctggagattgtaagataaaccttcctttggtaatttttttttgccatgtaacatcttgagaatttctaaaagtgtttaataataataaatacctcatttgtctgtcgttaattaataatttctataaacagcgtccaatccacgtatgtcaggctgatctttgagtgccgcattctgtcctgtggttggtaccatttcctgtgttcttcatgagaaaatgatactcctcatcccttttttgactctgggcgtcttcatgtgtggttcttgcctgtagcctggtgatgcccttggcccatggaggctgtgtggtctccaaagacagctgtgttttttatatgcttgtatttgctcttcagttgattttccttctctgctgagtgcacttgccgctgttaatggccttgtctccatcagacctccgtttcctaatgtgctgcttctaaatctgtgcttgcagacaccaaagggtaacgggctagaattatgtcggaaggaaaattcagcatatttggagtaataatttaaagggctccgagtgagcagagtgtaggaagtggagttcatggacttgtgacatgtattttggcagtactttgtgagctgtggttccctgtatccaggtgactgggttagttagttgggttgtcagggtcagcattgtattcctatatctgttcatatttttctgaacttgagctaatcccactyggttggcartgtaagtgatacagctttgtgcgtgattgatgcatttcatttgggatgagtttataaggatatttattattattwttttttgagacggactctggctctgtagcccaggctggagtgcagtggtgctatcttggctcactgcaagctccgcctcccgggttcacaccattctcctgcctcagcctcccgggtagccgtgaccacaggcgtccgccaccacgtccggctaattcttttgtactttttagtggagacggggtttcaccgtgttttgccaggatggtcttgatctcctgacctcgtgatccacctgcctcagcctcccaaagtgctgggattacaggcgtgagccaccgcgcccaacctctaaggagatttttgagctgtgaattgggagaacatggtggcgtgaccccatggggcttaggttctttagtgacccgttgtcccagcactgacttttcttgagatttgtgactaaacttgtggctgtatacagataattaaaattcctgacagcatgttagattatgatgtttgaaagactatataaaatataaaacatgttaagatgagagaatttgattttagtatctggcattagttgatgttctgaggtttaacgctgtcaccctgcagtccgaccttgtgagctttacacgtgtacagtggtatgcagcatcatgatggaagatggtgcacacaagatctagttctggaagttttggatgggcttaatatataggccccttattgaacaattccttactgaattggttattattattatttttttattactgtgagttgatgggcttaaattgcaacttgaaggaacattcgttgccttaaaagccatattgtgttttacagtggcttagggagagaatgaaatcaaggaaaatgtcaacgcatttgcttgtttaataccactcaaagctgtgaactgtcatcctgccatccctcaaatatgcatgttactcacgaagcggagraaaagtggtgttgcataattgagctgagccgttttatatcaattttctctctwtaggctcaaagtgctgacaaataaagcttctgtgatgctctttatgaaaggaaacaaacaggtaaagaactcaaaaatggttttatttgtaatttcttttgatgttaacatctgcaacaaggggacagttaaatctttttcctagctttagctaatgaagctgtagcgatatcaggaagttatccacgccttaattggtgcttacggagatcaaacaaagtaatctacattttgcttgactttatcatcaacatctcagtggggtgcatttctttctgctgccaaactttgtcagctaatgtggtcaacactgttaacactttactggttgtatgagttgttatgtcattatcctttgtttgagtttgtggactgctgaagtgtgcagctgagtcagtggacttcctgaatgcagggaacctggtcgtgcttgggtttgcacccctagatcgtccttttgtgacagtggaggagcaaaccctggctgtagcaggtgtgctctgtgtgtttgatgaatgagtgaaatggtcagcaattctcatttttaatgggatggttcttacagctttttgatgtaagtacatattgattatgcgtcattttgaatatcaagtttgatagattacttccaccgatagtttgagcagaactaattttctttcagattgagatcagagtggtaatttccagaaaccagccatacacatttatatcatattttgtaattttcatagcaattgaacctctacttaattctcaatcagttgttgaagtaggcagggttggacagactttggcctgttttagagataaagaaacyaaagttttgaaaggtgaggctgttggaataaagaaactgcctcacttgttagcaagatgcaccgggcaagtgacatggagaaccactttgctcattgggaaagggacacaatacttcacagggcagactctggttgccataactagtgtataagttaacataactagtataatgaagctaattagttaacataactggttaatataattaggtaataatgaaagtaacagtaacaaagaaaatgttaatataaatttcagcatgttggaaacattaggttagggcctaaattctttgattttggttcagtgtattgaaacaatagaggaagttaataattcctagtaatgataaagtgacattttttcttattctcggtaatggtttaagtggatatttattctcaaaactatttttttctggaaacctagaaagtattaatacattttggaaacaatgttattggggctattaaaatgttgacatggtaccatatcttttccacaagattgctggaatttggagtcctgtggcatgaaaaaagcttaagattttcataaactcaaaaaagtgttagtattctgtaatgtaaaaataaatgaggctggatgcggtagctcatgcctgtaatcccagcactttgggaggccaaggcaggtccgaggtcaagagatcgagaccatcctggctaacatggtgaaaccccatctttactaaaaatacaaaaagtttgctgggcgtggtggcgcatgcctatagtcccagctactcgggaggctgaggcaggagaatcgcttgaacctgggaggtggacattgcagtgagccgagatcacactccagcctggggacagagtgagactctgtctcaaaaaataaataaataaataaataaataaataaaataaaaagaaaaatgggagtcagaatccagttggaaatgggaaaataattgtcataatcattgcaaaaaggctaagtgagttaagatcattttgcatgagtgaattaaacaatgaactcaaatctctgtagaaaatctcggtttcacttagaggaactttttgaccacagagaatataaactgttggaacacatgtcatctcaagtggttacaaaccaaaggaaaaggaagtctgtgggtcacgtgtgcctgggttgatgtgtagatgggttcgtacttgaagaggggatgagcagaagctctgggagctgagtgaaagtagtggcagctatgctggacaagtgctgtgctggttgacaagagtattaggtacaaccatgctgcttgggtcatacaaaaattgtaatctttgcaaattttttttcatttaggaagcaaaatgtggattcagcaaacaaattctggaaatactaaatagtactgggtatgtaaatgttgttttcaaatggtgtattaaaaaaattccaacctggccaggcgtagtggctcacgtctataatcctagcactttgggaggctaagacaggaatattgcttgagcccaggtgttcgagaccagcctggacaacatagtgagaccccatcgccacaaaaaataaaaaaattagccaggcatggtcacatacatctatggtcctagctacttgagagactgaggtgggaggatcactggagtcttggaaggtgaggctgtagtgagccgtgattgcaccactgcactcagcctgggtgacagagcaagaccctgtctcaaaaaaaagaaaaaaatatttcaacttttcagttctgccactgatacttttcagttgtaatgtctatatccatacatatctgtatctttctttattttttgctgtattgttttgtgaatgccttaacttagatcaaaatagtattttctggccagtgtcaacctattagtaacataaaggaggtctttaggccacctttggaataactatttgtctactttcccagaggaaaatgtataactgagtcctcaccatgcataaagatatttcaggggaatatattataggtagtttttaatttttctcaaatatcctagttgctaaacagtacagaaagctgaggggcacatattaaggtccattacctggatctgagaggtagcacaagttaaattgcagtgctcctagttttgatgtgctcagtggtgaagctgtcasgtaagaacattgccattgatttttgtggttaaaaacaaaagcacttatttggagatatacagcacatgttctatagggtttgtcagatatttttgtttatttctcatttcatgattgwatctttwaaaaatcatgtattctaactgtagcttcaaataaattactttcaagtaatctttgatatacttcaaagatctattgaaaatagttraatagtacaggttgaatacaatttcagggrcataaaaagaatatagggccaggcacagtggctcacacctgtaatcccagcactttgggaggctgaggtgagtggatcacttgaggtcaggagttcgagaccagcttggcgaacatggtgaaaccccgcctctactaaaaatacaaaaattagccgggtgcggtggcgcacgcctataatcccagccactcaggaggctgaggcctggagaatcacttgagcccaggaggtggaggtttcagtgagctgaaaccacgccactgcactccaacctgggtgacagtgagactctgtctcaaaaaaaagatgtggttgtcgtctttagattactatgacattttatagaagcaagtatagtcagtttattgtaattgtaacttcaagcctgttcctttcttcacccctgccctgggccatacagtgggggctkgcttgtttttggtcatttttgattttcccctttctttgtcgaccctctgctgcgggtccacagtgagacacacacagtccatccctctctagcagtaccaggttcctcaggtgtcttctgagccgacacactgggcctgactcagctcgtgtctttggtggaacatcttggtaacttggctttctgtcccatatctgtctaatctccattgtattgaaagcaccctgttgtcgcagagagcaggaggatgctttgggagagcatgacctcccagctctggacttgctaagcgtgattggccctaggatgagtgaggccatccaggacctcagcttckcttaacacgagcagaccatgctcttgctgggcgccaaatgtatgtggagaaaactcctttttactttttctcatttcttatcttttcctttagtagccaaaatacacatgcatgagtggttgagaaccaagtgtatattgaggtttgaaaggtaccctttatgaataacttttaggaagtatactggctgttaggactccacatacatacacttgggcccagtgcttcctggatcctttatgaatagttgtataactcattgtttttatcacagtattaagagatctgccacctttagttcaacttgaacaaagacttacattggggtttttaaaaagcattaggtttacattggggtctttttttgttcttctttcaaacattccttttttggtaattgcttctgatttatcccgtcatttagtttttttgactgttccctgtaccatagacagtttccttgggaacttgtttactaaataaacaagatttccctatgatggtttcagttttatggaaagtccagttttttttacatgtagcattttctttggccacctttgggaattgcacctgtaccctcaggcaccctgcaaggatttaggcatacatgcttgctaatacctgaccacctaacggtgaaatcgctctgagtggatacagttggatattcatgcagtgatttttcattttttgtacaagtaatgttcattgtatggtataaagccacaaagctttcattggccttttgtacattaaaaacagcaccctctctgaaataagtttaagtgtggaaagcatgtctcttgctaaggtggagggagctggcagcgtggttgttatccggctgctgagccctccagcctccgtccacgagcactactacatcctgctgcacgggcagcttccaggaggttaagaagcagcagcctggggtgggttagacattagaagtgggtaagagtgttcagttaatgaaggctcgtgcagatgggggtgtgggtctgatccaggggttggcaagttgcagctggctgcccatttttgtaaataaagttatattggcacatagccacatcccttcatttatacattgtctgtggctkcttttatgctgacagttgcagcagagagcagaactgagcagttgcagcagagactgtctggcctgtaaagcctgaagtgtttagtgtctgactctttaagaagaagtttgcccacccctggtctaacccaatattgtccggagaaaaatccagataaagtcatatgytggaatgactaattctgtgtagtaccagacagattaagaagtaaaatcatttccattggtctgtagtacattttgttagcagtgaaacggttttcttgattattytaaaaacatcaaatgcatagaggttttacactttgatttaactgtatttccagttaaaatgtcttctcttttttgcagtgttgaatatgaaacattcgatatattggaggatgaagaagtaagttctgtgtttgatgtttcacccttgtcttakctttaatcttaagggcctgataggatggttkcaggattcctgttgtttctttaggttcggcaaggattaaaagcttactcaaattggccaacataccctcagctgtatgtgaaaggggagctggtgggaggattggatattgtgaaggtaaggccagttcttctgctgttctaaagaacggaaaagattttggtatgtttaaaaatgatttcatattgaatggaaacttgagagttgtttttgactcctgttkccagcctgactctcagacatttctagaccagtatcaccgtttctgtgtgcatgactaccctgccattctcactgtccccacgtggcagcctgttyytactttcacacctgagctaaccattgcatctcctttctgtggggtgatcttccctgtcactcagggtccttgttagwtcctgcttcagctcccagacaacaaattgttttttcttgccttactcatctgcccttgggtgcatggagtgacagcagtgtgaggcctgtggcccggtgctgcccatccttgccacagaggctgaggatcactgcccctggtcccccgaaagaaaaaatgtaggtcctttttggttttgagatgcttggaaatctgttatctgttagattgtgttttagataagacaccatttcttatgtatcttgagtccttcctgatgctttgtgtattttaggagttcagtaaatggttgttggatggataagtgactttacttcttgattgagttttaaatggacgttactttgcatgtatttaatgtctagaattcagggcaggcccaccaactaacacctgtgtgctcwgtagctctttgattagcccaaaacartaaacagaagctgtagctttaatatctacacacagaccccactgcaccccaggcccactgtgggcatggtggcatcgaggagggtggtagctggttgggtatagagaggagctagacaggaatgctgggcaggaatgccagggtctgctcaggggcatgaacaaaactgccccgaaaagtgggttgctgactgccctcaggccttcctcttgcctcaatccatgagagaattttctgaggtcagatcttcgactttttatgtggaaaacaaatagcaagtagtactacttctagttatgttgtaaaataaaagttttttttttttttttacatttttttttgagagagtttcgctcttgttccccactggagtgcaatggtgcaatctcggctcactgcagcctctgcctcccaggttcatgtgattctcctgcctcagcctcctgagtagctgggattacaggcacccgccaccacgccccactaatttttgtatttttagtagagatggggtttcaccatgttggccaggctggtcttgaactgctgaccccaggtgatccgcccaccttggcctcccaaagtgctgggattacaggcatgagtcaccgcgcctggccaaaataaaagtttttaacacgtgcttttgtaaagtgaagcactagcctaccactgaaatgacatcagcactttggaccaatatgttttataaaaacaaagcttgagttccattgatgcagaggctctttttgtcctttggtggcctctgtgtaggttttgtttcctgtggagttccaggtttgatatcatacttcttaaacaagccagtgagacatttttcctggggaatggtctcactcctggaggaaaaaatttttaagactatagctcttgaatagccctgaagcagcagaaacagatctgcatttgtttcttccctccctccctccttccctccctccctccctccctctttctctctctctctctctctcymtatatatatatagtcttatttttgtaagacacaaacaatactcaaaccccaaatactcttgagcctgttcttgtctgaatgttttatagcctgtaccttagccattggtaactcttgggaagatacaatcaataaatctcatttaattctaaagctaagctgcgtgggtaacttctttttagttatataacagagtgttatatgattttttatgttcacctgctaagaacatatacgtttgaaatgtgtgatattgttaacgtttttccttgagaagatatatggaatagatcttacgatcccattttgatctgtttcttgcagaatgcagttcttcatgttcagttcaattaaaagatgtttgaaatggtctaatctggctggcctctttggagcaatgagcgtttgttttgttgaatgagggactgaatgatgatttagttactcagctaatctagtgtcctgagaaaattgtgagttgttattgcctctgaagagtaaacggttcactactgctgttccagaatgtttggacttaagacagtttgttgagagagatagaagatttggttaggtttagactttccacctgccggctcgcattaacagcagtgagggtggcgaggactgccttatttggcgcgctcccaatgttccaggcacactgctttggtgctttaagaggctgcttcacgtaatctcccaagcagcctcagagagcagaattcttcttagtcagtagatgaggaaacagagacatagagaggtcaggtgaattgtccaccatcccataactagtaagccattgagtccagattccacctgagggccacctgcccttgcccactcagctgcgtggtcctctccgtgccttcttgagtgtgtgctcagaaaagtcctgctgggtcccttggaggggcagggtgtctgcttgttgagtaggtagaagaagatccctagacatgactgaaagccgtctgggttttgtgtgacagcatcattcctatttgaatttcatccagaggaggtcatacggattttaatggttttattgattgatgtttatgctgttcagtgataacctgaaatgttatatcatactaaatgtttctttaaaccagaaaatcttatttatcatgtctgtcctttcaagcttggtgtctataatccagattttaaatctgaaaaacaggcacaaggagcatggcgcctgtactgcagttccagtcaacctggtggtagctcttttgatgccatgtctgtttctgaattgttaggtctttttaatggtttctgcctttccctcttactggtactctagcttttcctgaggcagagatgtgttgccaggttgggtttcaatagcaaagcctgattcctctctgtgagtggaagaacgggaggggaacaagcatcatatttgagtagacttttaacgtcacactgctttttttttcttcctttttttcgagacagagtctcactctgtcacccaggctggagtgcagtggtgcaatcttggctcttgggtcactgcaccctccaccttctgggttcaagcaattttcatgcctcagcctcctaagtagctagaattacaggcacatgccaccatgcccacctggctaattttttttttaatagagatgggttttgtcatgttggccaggctgggcttgaactcctgacttcaagtgatctgcccccttggcctcttaaagtgctgggattataggtgtgagccactgcgcccagccacattacttcattcttcaaccttgaaagtcacttgatttattttccttatttattgctacagtttaaataggggcttcattggctccagttgctgcgtttcctaatactaaacaatctgttggttttaggataccttaacttcatttatttatttatgaatgaatgaatgagatggagtctcgctctagcccaggctggagtgcaatggcacgatcttggctcactacaatctccacctcccgggttcaggagattctccctgtctcagcctcctgagtagctgggattacaggtgcccgccaccatgcccaactgatttttgtatttttagtagagacggggtttcaccatgttggccaggctgttctgcaactcctgacctcaggtgatctgccctcctcggcctcccaacgtgctgggattacaggcatgagccactgcacccagccttatttatttattttttaagagacagatttcaccatgttggtcaggctggtcttgaactcctggcctcaagtgatctgcccacctcggcctcccaaagtgctgggattacatttgtgagccaccacacctggccaagaataccttgttaaattttttaacctgatagtgtattcagggtttatggctcatttagtttgagagtgttaagagactggagttttaatccaataggtgtttcttttggttctcagatatacatacaagctgtgattgtttagatgtttccatctttttatatatgcatatacatattattattgttgttttttatttttaggaactgaaagaaaatggtgaattgctgcctatactgagaggagaaaattaataaatcttaaacttggtgcccaactattgtaagaaatatttaattacattgggagcagttcatgatttagtcctcagaaatggactaggaatagaaaattcctgctttctcagttacatgttttgtgtatttcacaatgtcgtgctaaataaatgtatgttacatttttttcccaccaaaaatagaatgcaataaacatcttcaaattattaacaataattgtatgaaaaaagtgtatctttacagcagtattaaacatacagctactataattaacccaccttaaatctctttttcttagtacatgagtatcttctagcagttaagaaaggcagtcttcagaaaatggagaactgtggcggaatgcagtacacaacagtatttaggacaactcctttgccaacacaatggctcccctcgctggtgaaagatctctttacagcttaggaaaaacaacggaaattagtttctgatgtcattgctgagctcggcactggttacattgcagaggcagtgtaggatgtctgcaggtttagagactcatttcacaaggcaccagtagtgaattatcaagaaacatttaagaggaaaatgatttctcattgaatatggtacaacaagcacttttttcataaggtctagaagaatgggtagtcatgacaaagaatggaaaagtattgtcatttgttgtaagcatcactrctttttttttttttttcagacggggtctggctctgtcacccaggctggagtgcagtggcacgattatggctcattgcagcctcgacttctcggggccaagcgatcctcctgcctcagccttytgagtagctgggaccacaggcgtgcaccaccatgcccacctaattttttatttcttgtagagatgaggtctcctgcctcagcctcccaaagtgctggaatttacaggtaggaccaccacacttggtccacttacttayaataaacattgatttggtcgttcaggttcctttggtcctcctattgagaacagtttgaagtccatgaaaattttaacaatatttttgatcctgaatctaacatatttgaaaaatagttgctccactaggcttccacagtgcaggcttcaaatgggatggctaaattcacctcatggttcttagttttttttgtacttgtggcacattctcttcatatattaccccaccctgtttgtttgggcagttaagatgctggtactgtctggtggcgataaggaaagggaaacagaagtcagtaattcagacaagaataaacaggatgaaatgcatctattcctaggtaagattagcccaccacctccacactgctgctgtctcttcagctcaggctgtttttctctgttttgattgtgtaaagagtagagtgctgatttgtgtgttacagagggtggtctgtacaagtcataaagctcgacatggccttgcttcctgctaggtgttaggacacccatgatggtggagtctcttggcattctgtgtaattagataaggctgtttatagcattggtccatgagaacttccttgtttctatttaaaatgaaaatcattgtataagtaaaacttcttaaatgtagatagaaatagaattttaactgaaattttatgaagccattggccgcagggatgtgtgtcatggaggagggctccatacttttttggtatacttatctcaaacttaattcatttgcatactgctttttctctaagtgccaactgtcctagtatattttctaagtcaacttttactttcactttatcctaagcargaatatctttggcatcacagactcagtaagcccgtttttttctaatgcacatacaaataaataaaatgcacaacttttaacataaatggctgcctccaatttgggaaatactgttctggccagaggccgttgctctgataatgtcatgtggttagtgcattttaggaagacctcctttccctttggttgactcctgcaggacataagatatcagtgacgttatcctttgttgagccatcctggtttgagtcaggatgagtgttgagagtttttggggagttgcccctgtgtcctatattattttatcctcttaaaktctgatggtctttggctccactgactccaggtaagttggggtgacagtgcagcatatttctattttctagttgtttctggccagacatggggaaggtcaagacatcttgttcatgcaaacggattgatggccattcctaatctgattttattagygtattttaggaagtamagtaagattcttgagcccagctgaacttcccctattgaattttctaacaaaaagagagtttgcgtatgggtttataattgagcctgctcttgtagaaatgttttatcagaattgaaatcctctctgatccccaaattctagagacaaagttgttttctgaatttgagaaatctgttcagttcacaaggaaaggtgacaatgtgtcatttggatgttgtcccacacgtgaggcctcgttgggtgcttgtggtgggagggaccctccaggcaggctttgtatggagggttttcatgtctggacacatttctgttccgagaagcactgctgcgtttttgggagcgtggaccctggccagagcctgtggccagctctgcctgccctccctttcttggcctgctcttttgagtatgtagtggggctttgtgtggcatcctgccaggttaaagctgcatggtgcttaggatagagctggtgctgtggggaggctcttgatgatgggggctgccatctatttgcctgttaactcttagaaaccaaacctcaaatgtcagaatttcctttctagaagaggctggttgaataggaaccagaaaggccctcatacaggcagggctgttcactcctcttgacttgcgtgtttgtgccttccttgtaggaaggcttcttagggaattgttatctgtttaggggaaataagcctgcaggaatgaacttttttttaaaataaaaactcttgatcaaaaatggaaagaaaaaaaccagtgaaacaggctaggtagtttgtggaattctcctttgcaggtgaggggagaaagcagctatctcaagggcacagctacagattgggagctggggcttccatccagggtctgggacacccaaaccttaggcttgcccctcccgggaggcctccccctcagagctatgtgggatgcagttgcctttttacctgtgatgagaaactggtgaattgccaggattctggctctggcttcagtctgcccctttccggggattagagggcattaaccctacttcctacagccaagcagctcttcctcatgactctactttctaactcsgggggttgactgattgatttgaagaccgccttgttgatgaatgtgttgaaacttgctatcataatgtaaatgctccttaataaaataacaggacctggtgggttcagttgccttgcccacgtgtgacttacatgtttttgcctttttttgttgaacactgagccttgcagaaccatcaggaagtccaccttggtcccactggattgatcattaagaaggaaggaaaaaagttatttgccatttccgttctttacaaaaatgtcttaagtctgctgaggagtagactaaaaaatagcatgtttttataattagaaagcctcattttaataacttaaaaatgtttaatctctgaaacaactgtaatacattttaagcgcttggtaatcattatctgccttattggaaagaattatacaaataagacctatcttgacagtcaaaagttacaagcttaagattgcaatatgaaacatgatttctggtttagtttttaaagtaaaatcagctttcttttcctttgttttttgagacagggtctcctctgtcacccaggctggagtgcagtggtgcagtcatggctcacggcatccttgacctcccaggctcaagatcctcccccgtcagcctcctcagtagctgagatgacaggcatgtgccaccatgcccggctgtgttttgattttttttttttgtagagatgaagtctcactatgttgcccaggctggtctcaatctcctgggctcaagtgatcctcccacctcagcctcccaaagtgttgggattacaggccctagccaccatgcctgacctaagatcagttttcttaaatttgacagttgctgcttttcaaaattcaaacctttctaaataaaagtaagttgattatttgcagatgaattcttgttttatacacatttcagatgttgagtttgaggacctagacccttccctttttgtctagtcacatttcctcacggccgtccactgatcgttgaatcagcgtaaatatggacagtttctcttgagtctttgggtcttcatttctgaaggctcctgtgtcacgtaagacttaaataaatcttacgcttttctcttgttaatctcttttgttataggagtgtcggctgtgccccttgtgatggatgaggaaaggtatccacctttctgaatcagacacaagctgcagtagcttcctgatgcctcattcaccaggatgggtaactttaaagacaagttttataactggcatcccatctggtttcagagtcttgggggcttttttcatacagctttgtctgatatttagagacattcagattcagaagccatgagttcagttagctcatgggccgggcacgtgcactgactcactggctgcagcagaacacrttgagggagtcttggtgcacttaggtcactgtaaggttctagggctgggagctgggatttgaaccaggatctgtcagcgcagccccagtgctgtgcttgaagcctcgtgccacactggctttgaggtagcacgctgcaagttagtgagtggagttgcccaagtctggggcttctgaaatgacctggtatttttatgttcctgttagaaatggtgtggctttcacaaattaagtgccaggctgggcacaatggctcgtgcttgtaatcccagcactttgggaggcggaggcaggcgggttgcttgagctccggagcttgagaccagcctgagcaacatggcgaaacctcatatctacaaaaaataaaaaattaactggtcatggtggtgtgcacctgtagtcccagctacttggggagctgagatgggaggattgcttgagcccaggaggtcaaggctgcagtgatcgtgccattgcaccccagcttgggtgacaaaataagagcctgtctcagaaaaaaaaaacaaaacaaaaaaacctaattgccaggacccgcaaattctgactgaaaaagaccttcttgttctccccacggtcattcatctaaatggttgtcagtggtacagtgttcatcttttctcaaaaagtcaagttttatttgaggaagttacagatttccatatgaactcctagagagagagcctgcccttgttcagggttgcccgggggatgcctgccatgtggtaaggtaagggtttctctgcccctcatctcccagcctgctgtccccaggagcgagttccttaacccctagccctgtcgttgagcccaagcttgtaacctggatatgggagctgtctatttaggaagaaggcatgtgtggtaatttctaaaagaattaaaatagatttttatgctcttgtactatgttttgtgcttaaaaggaagagccccgatataatggagaaaagccagaaggagcttggatgccctcagagagccctgtcacctgtctgtaggggcagaaaggaggatgcctttcctcacccatcacaaggggcacagccaacacctagaatagattaccaaggaaaagtataaaatgtatgtaaagacttaggtgacacaggagccttcagaaataaaaacccaagagaaactgcatgttcacactcagattcaacgaagagtgggtggctgtgcagaaatgtgattggacagaagggaaggatctaatcgtagactggatggggaagccttgccccgtgtgtagctttcttccttccaggtacagggcagggcccttctggaatgaaggtctgggatccattttcagataaagtagtgttgaggatgtctttgtggccggctcctgtagtggacctcagatcygggtgctcgccagttacagagtccagttgacaagagcaaggtctggtagaaagaaagtgactattaaccagaactagtcatggggatatggctggattcccacccaaagtaactactttgaattctggagagaaggcaagggtttaagaagtggggagtaggagcttgagctgggaggcgcgcagggatcgtgctgagtacaatgtgtgtcttgttccggcggctgtcctgggcctccgtccacctggagtgcgggctggtgtcatctcaacaagtggccagatttgactgctcaccttgaggtaagctctgggattttgcagctgggtttccacgcttggtctgtctcaagattagtccctagaacttcgaagtaagcacgtaattagagactagctcacagacacatgtgaagagagtatacggtgagaaaggggaggggtatggagtctattttaagattaagggaaaaggcttctgcagtttgctctaaggttgcatctcaggactaaagagaaaggaaaaaaaagtctaaaaatgcattttgaagttaagctgctcagttacactcctacacaaaggccagggaaagttagagtcatatttctagttttttttttttttttttttgagacagagttttgctcttgtcccccaggctggagtgcagtggcgcgatctcggctcactgcaacctctgcctcctgggttcaagcgattctcctgcctcagcctccacagtagctgggattacaggcatgtgccaccatgcccggctagtttttgtatttttagtagagacggggtttcggcatgttggccaggtgggtctcaaactcctgacctcaagtgatccgcctgcctcagcctcccaagtgctgggattacaggcgtgagccacagagcctggccgtatttctaggttttatggctggcctcgcaggagaggggttctggtttctatgacctgcactggggaagaggcattctactttccgtggcctaccttgaggggtggtggggtgcgggcaagggaaggggccagagggtcagagagcccttgcctctgaggcccttccggtgtcctgcagttcctcagtgtgccaaaaccacaggccttggggtatcattttctgagccccagcatatccctctattttgcccttaggtctggaggaaggttccagggcatttgcccttggtgggtgcaggtagggaggatctgcgggtcttcctcatgccaggagtcttatcccagaatcaaaggctcctggtgggtaggagcgtgtcccatgtgcagcacgcttggctgtccgaagttgctgatgagaagcagcataggatctggcagggacggtcctgagtggagaggctgagatgggaggtggtggcccacggttagcgggctggattttctgggccagcctccatgccagcattttgtcttcatcccggaaccctgtgcactgaggtgcaggaagcgtgtgtagtttcacacacttaagtgtaagaaagcatgttcctgttgaaaataacaccccgctgggcatgctgtggggtgacggcaggtttttgccctcctcctgcagctaagccctggagccctgggttcccatcggggctgtggcactgtgctgtttcccrggccactgccagggaaggagcctcctatattgctgggcagggcctgcgtgcaggtccaggtttataaattttagagcttgttcagaaagcaggcaaaaagtgctgttggaggtgctaagatataaaggtttttccccgggtgtgtattatttgctacttaatattctaaagaaaaattagaacattaagttattaacatgaatgtttctgcttttctttgcactgtgtagtggcaatttcaaatgcaaatataagagcatttaacttgtgtgtgggatacttgagctggcccatctatgtctatctcagcttctgccaggatgctggaggcactgcacaaaaggaaatgctcttgatccatgcacattccctcagcgaatgctgccttaaggctaaggttaccatgagagagaaggagctgtgggttgccctctcattgcctgccttctgtgtcatcttcagtgtgagtagttggctagtacaggcaagagacaaggcagagaggatatgatggcttcctccgtcatccgtgtttcttagaatgcaattgctctctttctgggctggaagcaagttctcatgtgattggaaagcgtggtgccagggctgtcagctccagctgtcctgtcgtagctggttacatgctgatgttgccctcgccttgagtcttgtcacctccgatgctgaggcccactggaacgctgcttctggcgcatcgcgaaccctgcatgttagccgggtggcaaggagtagccagttctctgctcacccacatgctctgtggtgcccctgcactaacagcacgagttcagataaaattattaagaatttcgagatgacgaaagcagaacgtgaaactgagtgtggtccttctgagtgcagggccccatgggaccgcacaggtggcaggcctggaaggccagccctgcttcaaggagtgtggctgaaggaggtcggggaactcaggccctgaccccagggttctcctttcccggagattctgttaaagggccactcaccttagccatgatcttctttgaacttgctccgaactgctcgctagagaaacacacacccggtcacctgtgaccccttgttctaggtgcattcctgcagggacatactctccacctgatgctgaaaccaccacagcaaacaggtgctgtcatgaatagttgacatgtattaagtcatttaattctcaccacaaccctatgaggtaggcatcttcagccccatttgacagatggggaaactgaggcatgggtgaagcacactgctcctggtcatagtacctgttggacctgggatttgactctgggcctcctggctgcagtttgccctcttaacccctatgaggtgtgaggagtcagtgaattggctcctgtggcttgggagggagacatgttcctctgggtgtccagggacagcactgggtgcagggtggagtgctgggctgtggatgggcccatattggtcctaatggtaggcagagagggtgaggaggtgcccaggaccggctttgccagaaggagagagaacgctggcaccacaggagcagcccaccgtgaaggccatgccctgcccgaagcgcggtgcctatttagaacccgagggccccccagcacgatggcgttttgggggttatttttgttggtggggaaacaagctcaggaatttgccaaagctcttatccaaggggcgagtggctcagccagggttcattaccaggctccggatcctgcttctcccggatcacagcaagcactgtgcttaggcctggggtgggggacggattctccctgaaggcaggtctgacgcgggcgggagcacccaccccgctgggttcttacggcggatccgttacctgggtctccagagggtgaggtcgccgtgggcaccctgggagcagcagttcagatagaaatcctcccatgccgtgtgcaaacactaagttttttgttttgttttgttttgttttgttttttttgagacagagtctcgctctgtcgcccaggctggagtgcagtggcgcgatctcggctcaccgcaagctccgcctcccgggttcacgccattctcctgcctcagcctcccgagtagctgagactacaggcgcccgccaccacgcccggctaattttttgtattttcagtagagaccgggtttcaccctgttagccaggatggtctcgattttctgacctcgagatctgcccgcctcggcctcccaaagtgctgggattacaggcgtgagccaccgcgtccggccgcaaatactggaagttttaagtcaagcgaacaaacattaaactgttctgtcctcttaccttgacaaatacacctaccagtgaccgggaaggctgccttgtgaatttagaaagtcctgggtcttggcagcttcaggggacagatcgccccgctcacgtttgcccctcttgcttcccaccctgtttctgtcccttccccggggccctggggcacacaggggtgggatcgggggtccaggccgggaagggctgctcaggctccgggcacgcactcctgggggcggcctgtgcacatcccttttggaggggtctgccccacgcatccggggaggtacgcagcccctggtgccagggtccaggtggtgctactggggagggcgcgtgcaggaaccagcagccctggaaccagacgccagggtaggagctggtcacgagccctgcctggctgggtcgggtccctgtcctgggtcccagagtgccctggacgttggggctgcagggacaccccggggccagcgacggcaggtgatgtccagggccccgcgccaactgggagctttgctgccgctgcggccttgtgtgaatttggagggacaaggccggggcrcgaactgaatctactgtcatatgcggagtcaatgcaccatctccaggacctcgaaagcctcagtttccacgtatgcaaaacggtccatggtgccctcgtaccctggtcgctgctgcaccatcgaggtcagcgcgcggcaagtcccaggtaggccacgtcggctgcagacctcggcggcgggcggtggcggcgcgtgtccacgcgagggcgctgcgcaccgcgcttcagcccgacctcgccttctgcaggggcggtctcctggcgccagggggcgtgcgaggaccgaggagagcgcaagagtaagcccgcgggtgccggagcgcgcgccccgccgtgtgctgggtccagggcgcgcggccggcctgtccgggcctccttcgcagacgaagcggctggaacgtctcgggggcgcgccaagccgggggcgcatgcctgcacacgtgtgcggggctcacctggtgctgcggccgg

SEQ ID NO: 94693 - DNA, 15673 bp, Homo sapiens
gatcctgttccaaacttccactaacttctccctcttataagtgctattttcttgaatctatcacttctggttgcctcctcacccaaacacattctaacccttctatcttcaactctcccgttgcacctgctgtcttcaattacaccagtctcactgaggatgaggccccatttttttgggagtgcatattcactgttgatttctcagatcttccacttctaaaactttttggtacatcctgttcttaaacacacctgcaatgctcttgtggctttttataccaaaactgctaaattcagatgtcaaaaacagttattgcctggaatacacaaaggaagggaggttcagaagagagaaaccattagtcataaaacacaaacaataaaacatatactttctacatgtgagcaattcctcttgagggcaaaatccataccctttgtccaacaaagagggcccatgaacaggactggatgtgacagaaggcccctctggaaccagttaagtacataaatgcaaagagacaaggctcataaagaatcatgaagataaaattgaagaaggccagttgattttctgactgtggaaaataaagcattaggaaaataaaaatctctcagcatagattgttatcctggcccctacaggaaattcttacaaatagatgatccagaaatctctaactcaaacaacaatgacaggaggaggaagaagaagaagaggaaaagaaggagaagagaagaaaaggaggagaagaagaaggaggaagaaaaggatgaggaggaggaaaagaagagaagaggaggagtagaaggaagaggaggaggagaaataacatgacacctatataggtagtattaaagaaaaagggagacgaattaagctcaatttattaacatataaggaatactttaacatggaacagatgaaaaccataaacaaatattttatctttagccattttgtgagtgtgtagtatatcccattgtagtttaatttccatttccctatgactgtgaaaagaaaatgtttaaaactgttagaaaattatataagcaagccaggcatgttggctcacacctgtaatctcaggcctttgggaggtcaaggcaggtagaccgcttgagttcaggagtccaagaccagcctgggcaacatggtgaaacccggtttctacaaaaaatgcaaaaattatctaggtatggcggcaggcacctgtagtcccagctactagggaggctgaggtgggaagattgcttgagcctaggaggtcaaggttgcagtaagccatgagcatgccagcctgggtgacagagtgagaccctatttaaaaaaaaagaaaaaaaaaagaagagaaaaaaaagaaagagaaagaaagaaagaaggaaggagagagagcgagagagaaagaaagaaagaaagaaagaaagaaagaaagaaagaaagaaagaaagaaggaaggagagagagtgagagagaaagaaagaaagaaagaaagagaaagaaaagagaaaggaaggaaggaaggaaggaaggaaggaaggaagaaaggaagaaagaaagaaagaaaaagaaggaaagaaagattatgtagacaaatatgctgtggtcctctatgggaacagaactgagtctgattatgaagaaaataatctcactgcaatctcttggaagggcaacacgaaacacttgaagaccctccagcacactgcttgttatcaaaagattactgggccacagcttggaggtttgcttgtgtttgcagatagttttattaccattatcattgtgttcattttaatactaagagaaataagagcaattatgtctttgcaaataatttatctgtgcctctggttaacttccagcaatatgatgttaccagtagaaagtaatttctttaaaacattgcagagagacagcttcttacacatcagaaacaaaattgttagattttgtacctcttcagtcatactaaatcagttcaattaaacaagttattgagcaccccctattcattatgggattctattcatctagaagatgggaatacaaagttaaaataggccttgacatcaagacatacataatataatagagaacacatatatatatttgcaaagaactagaattctgtttggtaaatgcaatagtaaaagcctatgtgaggcagagaggaacatagagcagcatgaccaattgtgcctggctagcgacgggtgcgcagcataaaaaagctcctgagtaggattaaatgaataacccagaggtcagttggatgggattgagggatcaagcatttcaggcttagccaatggcattgagtcagatcaggaagtgcctgtcatgccgtcttaacatgcttgagtttcattctttaagaaatgagaaggctgggtgccgtggctcacacctgtaatcccagcactttgggaggctgagccatgggatcacttgagcccagagttcgagaccagcctaggcaacatagcaaaatccagtctctactaaaagtagaaaaattagctgggtgtggtggtgtgcacctgtagtcccagctacttgggaggatcacctgagcccaggaggcagaggttgcagtgagccaagatcgtgccactacactccagcctgggtgacagagaaagaccctgtctcaaaaaaaagagagacagcaatgcaaggagttttaaacatagacatgatttgatcagatttgccacttattagatgacacaatctgtcgtagcactgtagctgatggattggatttggaggtcaagcatagacactagaggctgggctcagtggctcacacttgtaatcccagcattttggtaggcctaggagggaggagcacttgagcccaggagtttggaggttgcagtgagccaggattgtgccactgtactccaacctgcacaacagaacaagaccccacctccagaaaaaaaaagagagtgactagggttcaactgcagtggttcagtgggaaaatagtgctggcagtggagaggtaggaaaagacagattcaaaatatataatctaggcctcgtcagtaggatcttgtgatttattaaaagtcaaggatccttgagtataagatcattttgttttctttcttaaagactttttcagtcctatggttttagtttgtgttcagtctttttttttttaatagtttgttttcctctggtagaaaaatcaagacaacttacattcaaatgtggaggaaatggactgcttcatgcagtaccttacaggaggcagtgcttcaccattttcacatactgtgcaccacacaatcactcagttctatcagttcacaaagaggtaatcagaatccagcagactgacttgtcaagctggtcaaatgcaagagacttataaattggaattccattgtgttcatttacaataaatacctaagcccaattacagaatttacccaatatcgtcacatgattctccctttttcctattaaaaaagtaataaactagcattcagaagattgtatgtttagcagacactgagaataatgtttccaaatgtctgaaaagtgttaatcttctggatgcaagaataagacattgggccgggcatggtggctcatgcctgtaatcccaacacttttggaggccaaggcaggaggatcacctgaggtcaggagttcaagacctgcctggccaacatggtaaaaccctgtctctactaaaattacaaaaattagctgggtgtggtggtgggtgcctgtaatcccagctactcgggaggctgaggcaggagaatcgcttgaacctgggaggtggaagttgcagtgagccgagaaggccacactgcactacagcctaggtgacagagtaagaccctgtctaaaaaaaaaaagaagaagaagacattggtactcaagatttcttgaaacttctcaaaacaacaaattatttgtaaaatgcttccaacattcttcatactcttttcttcctattatgaatagccaaaagttgtttaataaataaaaagttatatattttaaagcactcacaaataagtaaatcctatagcaaatattcgaactctggtaaacaccaatgaacattaatgatttatatgtaagcaacatgacactcaaatcttgtagcaagattaatagcactacacagaatcacacggaaaatgccaatctaaggacttactttcttgctacacttgttatttcttggaacaccactggtaggatttatagaaagtatactgcatatttgaagttattaatttttttatttttaggcatggctcactgttagtagcagacagggccacaaatttatgcttacaccatggcaacagctacaaataaaacggcctgattagctccacccagcccttgtctcatttccagatacgtcagtcttaacttctgactccatgaataaatatttcctgcgtctgctcttacatgaccacaacagatgcccttctctatgttgatagttaagctttaattatactattttatgaaaaacactgatcagagtggaaaatgcatttcttagggcccactactctgtttgaaaattataatgcaagtgtttatcaatgtgagttagactcaaataccacttacttaccaactactaagcaatggacataatgatcaatgccaatggttcagttgtcacttcttagatcagagaaaatgaaatcaaaacccactctcttttcattcctagtaatatacttcaaatttaaaaataattttataaacttgaatttccattgtcatgtttgtttaattttcccacatgatttgaataaattttggtcaatagtggttctctctcacactctctcacattgctttctctcatccatttcttctcaaattctgatggataggactttgttaaatgtgatgtaggttgatagtattcaaacttttgctcacaaatttactaaaactattttgtaaaaatatgtgactccatcacacatttcaaagttaatgtctcaattttttatcataactttatagttgtaaaggacataattttcagtagaatgtaaaaatttacattttaaaataaaactgtcaaatcattgttttaaatatattcaattagatttatttatttatttatttatttatttattttttcggacagagtctcgttctgctgcccaggctggagtgcaatggagtgatctcggctcactgcaacctcctccccctgggtccaagcgattctcctgtctcagcctccctagtagctgggattacaggcgcccgccacctcatccggctaatttttgtgttttcagtagagacagggtttggccatgttgaccaggcttgtctcaaactcctgacctcaggtgatccgcctgccttggcgtcccaaagtgctgggattacaggcgtgagccaccgcacccggtctatttatttatttttgagacagggtcttactctgtcacccaggatggaagtgcaatggtgcaattacggttcagcgcagcctcaaactccggggctcaagtaatcctcccacctccgcctctgagtagctgggactatagacatgcacctctacacctggctaatttttgtagagatggggtttcgctatgttgccgaggctggtcttgaactactgggctcaagcaatcctcccacctcagccacctaaagtgctggtattataggtgtgaaccatcgcgtctagcttccgatgaaatttaaatacataatgatttgatataaattttcatttgtataaaaatatacaaactagtcttccatattgcccagagcagaacttgtttctgtaacaatttataggaaaacatcatgaatcccaaagcccttgatattctgcaggtaaaagaggaattgtgcctattccttccggcaggagctcatttaagtacagatggaataatgtgacatacaagtggaccacaaacacagtatcactaatcatcagaaaaatgcaaatcagggccggggtgggggtcgggggagagtcaggtgtcggcgagctggagctcggtgtgccggcacccagtgactgctggcggcctgggctgctggggccgacgcctgggtggctgccgccgccgcacctgctgcgagatagtgatcttcgtcgcggaagggtgagggcgcccactgcaggaggaggtgcaggtgccgcggccgcctggctgccgggagccgaaagcttcgcgcctgggttgtgagctccttgaaacagggaatcgtgtcttactcatctttgtatctccagtgtctagcagttcctgatacatagttttagctgaattttggaacatggccactgcctcaccaaagtcagatactactaataaccacagtggaaggttgcagttacaggtaactgtttctagtgccaaacttaagagaagaaagaactggttcggaacagcaatatatacagaagtagttgtagatgaggaaattaggaaaacagcaaaatccagtagttcttctaatcyaaaatgggatgaacagctaactgtaaatgttacgccacagactacattggaatttcgagtttggagtcatcacactttaaaagcagatgcttaattaggaaatgcaacgacagatctgaaacaagctctgttgatacacaatagaaaactggaaagagtgaaagaacaattaaaactttccttagaaaacaagaatggcatagcacaaactggtgaattgacagttgtgcttgatggattggtgattgagcaagaaaatataacaaactgcagctcaactccagccatagaaatacagcaaaatggtgatgccttacatgaaaatggagagccttcagcaaggacaactgccaggttggctattgaaggcacgaatggaatagataatcatgtacctacaagcactctagtccaaaactcatgctgctcgtatgtagttaatggagacaacataccttcatctccatctcaggttgctgccagacccaaaaatacaccagccccaaaactactcacatctgagcctgccgatgacactgttaatggagaatcatcctcatttgcaccaactgataatgcttctgtcatgggtattccagtagtgtctgaagaaaatgccttgtctccaaattgcactagtactactgttgaagatcctccagttcaagaaatactgacttcctcagaaaacaatgaatgcattccttctaccagtgcagaattgggatctgaatctagaagtatattagaccctgacacctctaattctggaagtagttctgcttttgaaacagccaaatcaagacagccagatgggtgtatggatccagtatagcaggagtctgggaatgccaacacagaaaccttgccatcagggtgggaacaaagaaaatatcctcatggtagaacctattatgtggatcataatactcaaastaccacacgggagagaccacaasctttaccttcaggttgggaaagaagagttgatgatcgtggaagagcttattatgtggatcataacaccagaasaacaacatggcagcggcctaccatggaatgggtcagaaattttgaacagtggcaatctcagcagaaccaacctcagggagctatgcaacagtttaaccaatgatacctctattcagcttcaatgttagccgcagaaaatgaccctcatggacctttgccaccaggccgggaaaaaagagtggattcaacagacagggtttactttgtgaatcgtaatacaaaaacaacccagtgggaagatccaagaactcaaggcttacagaatgaagaacctctgccagaaggctgggaaataagatatactcgtgaaggtgtaaggtactttgttaatcacaatgcaagaacaacaacattcaaagatccttgcaatgggaagtcatccataactaaaggtggtccacaaattgattatgaacacagctttaggcggaaacttgctcacttccgttatttgtgccagtctaatgcactacccagtcatgtaaagatcaatgtgtcccggcagacattgtttgaagattccttccaacagattatggcattaaaaccttatgacttgaggaggtgcttatatgtaatatttagaggagaagaaggacttgattatggtggcctagcaagagaatggcttttcttgctttcacatgaagttttgaacccaatgtaatgcttatttgagtatgtggggaagaacaactattctctgcagataaatccagcatcaaccattaatccagaccatctttcatactactgtttcattggtcgttttattgccatggcactatttcatggaaagcttatagatactggtttctctttaccattctacaagcatatgttaagtaaaaaacttactattaaggatttggaatctattgatactgaattttataactcccttatctggataagagataacaacattgaagaatgtggcttagaactgtacttttctgttgacatggagagttggggaaaagttacttcacatgacctgaagttgggagtttccaatattctggtgactgaggagaacaaagatgaatatattggtttaatgacagaatggcatttttctcgaggagtacaagaacagaccaaagctttccttgatggttttaatggagttgttcctcatcagtggctacagtacttcaatgaaaaagaattagaggttacgttgtgtggcacacagcaggttgacttggcagattggcagagaaatactgtttatcaacattatacaagaaacagcaagcaaatcattcggttctggcagtttgtgaaagagacagacaatgaagtaagaatgctactattgcagttcgtcactgkaacctgccgtttatctctaggaggatttgctgagctcatgggaagtaatgggcctcaaaagttttgcattgaaaaagttggcaaagatacttggttaccaagaagccatacatgttttaatctcttggatctaccaccatataagagttatgaacaactaaaggaaaaacttctttttgcaatagaagagacagagggatgtggacaagaatgaatgtggcttcttattttggaggatctcttgcattcaaataccccagccaagaaaaattgcacatagtgtatataagctgttcattctgtacagtgaattttctgaacctctcaaagtatgttttccattcttccacagcaatatgcaaaacatatttcatccttttctactttatttgttgtcctttgaaatgattgaccaggaaaaagatcatccttaaattttgaagcaagtgagagactttattaaaaatacatatgtatctatataagcatatgtgatagtggctctagttttatagagttgcaagtgtattaaacatgacagctgttcattcataaagatctggatttgctttaccttgttaatattatctaggcgaaaaagtgcaaattgctccatgttcttctctcccttgtgtaacatctcctgagggtgtttatttgtatgtctgttcaggaaggtattaagggcttaggccaaatcttactttgagtatgttaaaaaaaaaatgctgctggcttttctgaagacaggtgcttgaacctgtcagttggttttaaataaatagttgaaaatttttctttctctgttacatcagtaatattgtcaaagtaatggataaaaccataacttacacatgaaagtcatataccagatctgatactatttagtttattatcaaaattggaaggattcattgagcagcaaagaagtttgtttacatgatactttgagatgctagatatttgtggaattaaaaagaatcaggcactgctgtactttgtttttaaatctgtgattttttcaaatttaattcataataaattgatgcaatttcatacctaggaacatataaaaggtaatgtgaactctgccacttgttttgtgttcaaagtttcggttttatgaagccagatggattgaagagttacataagcatttgagtgctctaatatgaggctaacgattttctgttagtgtttgaatatcttcattcctctcaaattcataacagttctatttatctgaattaaataagcatattaaaaaaaagaagtgacatttatcagcctctggaattcaatgctgttcttttcttatgtttatatctttgcaagacatagatgagctgaagcctccattttgtaggtattccataaaatcttatggtgctttgtggcttgcagggaagattaaccaccaacaaacaacataggtagatatcacaaaatagtaaaaagggtaaaaacaatacatttggtagcatcaaagtacttatggatagatagaatattgaccaaatgggaagaactgaaaggtggaataaattataatgtcttctgttccaaaaatgaggaagattatgccttcctttctttttcttaatatttcagatggatacttcacataacagcataactcatcaattccatattgccataaaattagtccatacctaaattttcatttcgcttttggatcagaacaacaacaacaaactatgatagctaaatatttcaaataatactaccaaagcaagggaaattacattgatacagacacatgtatatcatgctggcagtgttttaaatacattccatattttttggaaataacttttttatcacatatttgtgtagtattttcaattatttttcttggctttagaagtcacattttgttgaaattaataaggcatttattagtggggctagtttttgttcaaagattctgagatggtatcagctactgataggtaatctatctcatcattttatagaaacagagcaatttcaatggaaaactattaggagatctaaacctgatagtttttgtagtaaattttgtttgtgaaattttaaacttctacttctctaacttattttaaaatttacaaaatggtttcaagaaaaaagaccaaatcttaatacatctctatagtacttaactgaattagaaacccagcaaaaataaagtacaagatttcatgatattattatatggctatgttctttcaaattagtcctgaaacaaaaggaaagaattttcctccactgtatcattagctgccctgtctgcctacctgtgacctttgctggtgacctgcagttctggctggaaaggggagaaaaagaagtagaaattttcagttcagggctggtccttataaaatttgtctttctgtgcctctcagcagctagcttgcttgctctctctctctttcctctttctctttctttctttcttttttccttccttccatccctccttccttccttcctcctttccttttgttttctttctttctctctctttcgttcttttctctctgtttctctctccttccttctttcattccttcctccttccttccttcctttctctctctctcactttcattcattcgttcattccttcattcgttcttcactgtcacccaggctgaagtgcagtggaacaatcatagctcactgcatcttcgacctcccaggctcaagtgatcctcctgcctcagcctctcaagtggcagggactacaggcatgcactatcacacccagctaattttcttttttttctttttttgtggagatagggtctcactatgttgcccaggctggtcttgaactcctggcctcaagcaattctcctgcctcgtcctccccaagtgctgggattacaggcatgagccagtgtgcttggccagcatattttattttcttaaaagaggctcatatccttaattcccacatgaacttgaactcattgttaacgatatcctaggttgggtcaggcaaaaaacttcatactacagcagatgacatggaatgaaagtcctgatgagaagctcagttccaacaatgacttttggcaagtcctgttacctttctaggatcagagttctcacctctaagatggggaggagggtggctggctcatcaattctaaacctcatttctcctgtaacacacataacagatgatcatgtctatgaacaaaaaacactcactgaggaaacccaaaacatttcccaagatataaagcaaagagcaaggagaatttttttatgttctttacagttttgttttaacataatatgaggggttatataatacttcactgagagccaaataaaagaacagcaaatgaattttatttccttctagtaaagtagtataatggtttatgtagaccagtttggtttgacatggcattccaaaaagcacttatgagcttataagtaaataaaattgctatttatttcacaaggaaaaaaatgggcctaactaaattcttatttttttcttaatttttaaaatttttgtgggtacatagttggtatatgtatttatggggtacaagagatgttttgatacaggcattcagtgtgacataagcacatcatgaaaaatagggtgtttatcccctcaagcatttatcctttgagttacaaacaattcaactgtactctttaagttattttaaataaattcttaaatgtttaaaaaatgaattttgatattttattatcctctaccccaagataaactaaattgagcagatctatgtgttggcatatttaatattctgatatgtgtgactttcttttcttttcttttttctttgagagggagtcttgctctgtcgcccagattggagtgcagtggcgcgatctcggctcactgcaacctctggttcaagcgattctcctgtctcagcctgggattacaggctcctgccaccatacctggctaatttgggtatttttagtagaggtggggtttcaccatgttggtcaggctggtctcaaactgctgacctcaagtgatccacctgccttcgcctctcaaagtgctgggattactggcctgagccaccaagccaggccgtgactttttttgtttttttgtttttttgttttgttttgttttttggtttttttttgagacggagtgtcgctctttcgcccccgccggagtctcgctcttttgcccaggccggagtgcagtggcgctgtctcggctcactgcaagctccgcctcccaggttcacgccattctcctgcctcagcctcccaagtagctggaactacagtcgtccgccaccacgcctggctaattttttttgtatttttagtagagatggggtttcaccgtgttagccaggatggtctcgatctcctgacctcgtgatctgcctgcctcggcctcccaaaatgctgggattacaggcgtgagccaccgtgcccggccgtgactttctaataggataatggagcacacagcaggtactccctggatcagcgtcctgagacaacagtttgggaaaagcttgtcaagtgctaagaacctaagatttggagctagagacctgtggcttggtcctaattcttccactcactgtgtgatcttccacaaatcacttgacttctgaggtttcagctttatcatatgtaatcacggataattacactgtacctctagagattgtagtgaaacaaaagaagctagtaatttcttaatgactaacatattgttgttggatgataaatgctgtcattagaaccttttctttctagttttcactagaaagacagactcttatttctactataaacagacccagcctgataccacatctgaaatatcctcctactgatctggaatcatgaaaatattcccagtactaaatttttaattccatttaatgagcacatattaaccacttcctttatactatgaaagtacatgatataagaataagacatcattttagcctttgaatttcttacaatccagttgccacagtttactctgcagtcttaatttaaactcctcaatgctaatgcaaaagttatattaatttcaccccacttttttttttagcaaattcttatttaaatatatagaatgaagatatggccaaataataaatatagatgggcatttgcaccaacattctacacaatttgtaactacatttaggaaatgagataagccatgcttttaaagttttcagtattgtcttaattacctggggaagttataatcagctttaaaacaacaaggaaagaagaaattgtactgcaaacaggaaaaaaataaatgtaagaaagaaaagtaagggaagcagctcattgtttttatttagaaaagttgtaaaagcatgtttcattttggtttaactgagagttagcagtatttcatctttttaatatattttgacaaacaaaagttgtgtatgtttattatgtacaacatgatgttttgatatatgtatacattgtggaatggccaattcaagctaattaacatacacattattttactttttttgtggtgaaaacacttaaaacctaccctcttaacaatttcaagtatacaatacattgttaactatagccatcatgttttacaacaaactttgggtctaaccgaaattttacgcctttgaccatctctacaacctcctccgaagtgccttgaaaccaccattctagcctctgtctagtctctggtctatgaggctgacaattctacatataagggagatcatgtggtatttgtctttctgtgtctgacgtttcccttaacataatattctctagatttatccttgttgttgcaaatgacaggattttattatttttgaaagctaaataatatcccattgtgtatatataccacattttctttgtccattcgtccactgatagatatattataatacttaagttgatcccttagcttggctatggtgaatgatgccacagtgaacgtgggagtgcagaaactaatttcatttagtggaattgctggattatatggtagctctagttttaattttttgagcaaccttcatattgtttttcataatggctgtactaattaacatttccaccaacagtgtagaagggttcccttttctccacatcctcaccaacatttgttatcattttttttttgataatagacattctaacaggtatgagatgatatctcattgcagttttagtttgcatttccctgatgattagtgatgttgagcattttgtcatatacctgtttgttgtttgtatgtattcttttgagaaatgtgtattcaaatcttttccccattttttaatcaggttatttgtttttttattattgagttgtttgagttccttatatattctctttcaatctctcaaaatatattattgaactgtactcgcctatttttggactgtgattgactacaggtaactaaaccatggaaagcaaaactgcagcagataaggagggactactgtactcaatagtgaagaactgaaagcttttcctctaagatcaggaacaagcaaggatgtccactcctgccacttttattcaacataatactggaaatcctaggcagaacaattaagtaagaaaaagaaataaaagtcatccaggccaggcatggtggaagccaggcgaggtagttcacacatataatcccagcactttggggggccaaggcaggtgggtcatttgaggtcaagagtttgagaccagggtggccaacatggcgaaacctcatctctac

SEQ ID NO: 94694 - DNA, 110711 bp, Homo sapiens
  misc_feature (1)...(110711): n = A,T,C or G
tttatcttagaaataaaaaaaatgaataatctctgatttttggcttctctggaccatgaggaattctatcaaactcagtatattgtgcacttatttatggtgtcttctctctgatcttatactgagctgaacaattgaaaacaactgaaactgtaattgggatatgacaccatgaggtgaatataggtcttacaggtgtgtatgtgttaattctttttactccaagattccgtttagtgacaataattgtttttttacttttacaaaacctcagctcttttataacaaatgtgaacatgaatacttaatacaaggagtaagaaagattaaatataagctataatacagtatttttttcatgttgcatatggattaatccttaattgcaactcatataaagctgattcttttctctggactttgatttgctcagtttgagtcctatcttggagtcacagccaacctaggctagtgaatatctactctactcagcaaagcaatgaaaaagtaacagcttaaaagtaacccaccgccacaccagccacttctacctttctgtggctacttgtagttttcattactcacactgttttccagggaaggatttctgggtgtgagagaaggagctgggtgggagaatcccagtagcattctcttttagctttctgcccctgcttttcagcacttttcttctactgtgttttaattttcattctctttttatgagtttaagtacactttgagatatttaaggagatctgtatttatttttctgtgaactttttttttccttcaaggatgctggcctttttctatgaatttctagttcttcatgtgtaaaggagggaattatttttccagttcataactaaatcatccattatgcaattcttgacagggattgaaaacatcaggaaatgatgttttccattagaagagaaagcagtacagatattttcaaacttttaaaatggaacctggttgtcccatcataggcagtattgagtgcagaagacattactcagacctttcttaagaaagggctaatataaaaaatacatttattacatgaattgattcaaggcctgaaaatgatgattaggataaacatgacttttgtcactccactttgaagaaaactctccagatttctcctacaatataaaatggaaaccacagctttaaatggactctctgaggctgggaacagtggctgacacttgtaatcccagcattttgggaggctgaggcaggaggatcacttcagcccaggagttcatgaccagtccgggctacatagcaagacccccatctctatgttaaaaaaaaaaaaactttaaaaaaaattactacagctttatatataagatatatgktggcacctgctgtagtcccaggtacatgagaggctgaggtgggaggatcacatgagcctgggaagtagaggctgcagtgagccatgatcacaccactgcactcaagcctggccagcagagtgagaccatttctctaaaaattgtttaaaaatgaattccctgtttttctattcatattgcttctgtttcttggtccccatatccataaatacagccctctttagcagattctccaagcctagacacctttcatttctccctctccctcaccacccctttgctcatatccaaacaattgccagtccctccacctaaacatttctcaaatccatacaattctaagaactttgagaaacaatctcctcaccttctccaatcaccctcacatatctcacccagaaaggcatctaactatctcctagcctccaggaagggtaagtgctccacctgctccataatccactctcatcattgtgtagcaatgtttctaaaacacctgccaaaacatgttacttccagtggcttcccaatgccccttagaatataattcaggtttcttaacttggcctacaatctgccttcctctccagattcaattctcaccatcttcttcccaaatctttaagctcagtgattctcaaagcatggtccctgggccagcagcatcagcatcacctgcaaacttgttagagatgcaaattctcaagccccaccccaaatctaacaaatctcaaactctgggtctaggactcagcaatctctcttttaaggagccctccaggtgattcttaggcctgctgaagtttgagaaccactgctgtatccatactggactatttctgttccaattcccctacttgcggataccccgacctctttctgtgaacctcaccaccctttctccacttaattaactccttctccttgtcatacaatctgacaagttcatgtaatatgttgaatctaccttgagatgtgttccaaactagagtcgctgaggggctaccagatattgatgaaaaatcccctgaagacagttaaagtggaagataaatctggaaagaaccttcctggcaaagtgtggcccctcaaggatccccccattcacttggtgcttacatagtgaaatgtgagcctgctggaaccctggtgctcatcctgctaaatacactcagcgcagatgattcctagcacaccacaggttgcacctgaagtcctgagtgggggaaccttccccatggtgagttgcaggaagtcaccaaacaaggtatcagactttcactacctgacttcattattaagtgcatcttcagaatgaaattgagaattttatttaaattcagatatacctaaatatttaatacttaaataagtataaatttaaaataataaattttctaaataatagaagtcatttcttaaaataatacaaatatctggtcctctagcatttctctcttctgagcagcactagactcattaatgccatgtagtcgtacccaggttttaaacagtggtttctatggcttaggacaatgtttcctaatgttctaaaatccatatcctctttttaaaaaacagctttattgcaatataatcataatctcttttgatttgttgctctttttctctatcgccacctctttttcttggcaagattcactgatagaaacaatctttttaaattaaaaatgtagcgattgtaaacatgatcaagatataaagtttgaaaattttaaacattacagagggtcgtacagtaaaagcaaagtctccttccatactcactgacctccccactctccacgaccccaatcttctgctctcaaagtaactactcttcagtttatgtctagattgtttatatatatacacacacacacacacacacacacacacatatgtggataatatgtaattcccctaattttataccttagaattataccacatgtatattctgcatcccccttaatggcattttgattatcaatggtgtgggactccctagatctatatatagtattgtgttacttactgtttaaacgtatagcattgaatttggtctacattagctctttgaaagccccactatacatataaggaaagaagggtccagaggtggtgataagtgatttcaaaagattaaagggccaactacaaatggaattggatcttgaatttaggccttttgaatttatctgtcctgctctttcaaagtcaacaaaccccttttacaatactgatgtacctgtggcctcttgaccaagtcaatttggcctattgccaagagcagatttagatggtgacactcgatacagtggcctccaaagtttggaattctttaatgctaatttaccatgctggggatttgaattactgattatggtattcgaataaaaactaaccacttctagggtttaaagttaatgtatacacacacacacacacacacacacacacatgcacacacacacacagagactcctctgcctaaagtgaagaatttttaaacaaattatagctaacacagaacttcaatcaattgcccaagaatacgcttctttctttacccccttcttcatgctatgctgcaaacacagtgataaggaacatgagctctagagtcacctgatctgagtccagatggaggcactgacacttagttatgtaaccttaagtgaattattactttacctctctaagcctcaaagcctcactttccttctttttagtcccatcaaacttgcagcaagcaattcactttacttctttgtaggtaaggttaataagaagtaatgtgacaaggcatgcaaacgctgagtgaaataataatatgactattattatttcattattcattccatttattttttattcttctaatttttctttctcccaagtccatattttacatccatccatctaatcatatttattgagtcattattaagcacaaagttctatggatggcacgggaaaacccagtgatcaatgcgatggagtccttcccacaggagcctacaatctcaagcaaagttcagaattaattagtggttaatctttactgacttcataaaacgtatcaagcacagtgcagagcacttgacactcattatcacatttaattttaagctacctatgaggtggacgttcttttacagaagaggaatctgtagctcaataaagctgagtactttatctaggctggatccaaacccaggcagcctgactcccaaaccctgcatgcatgtctacatcacaccccaggcccctcagctctgtgagccctcctgacttcgattcctcctctgcttgcactcttttaacattagtcatcttaacaagaactctaatctatacaattcaagacgttacactgtccttttaatacaacccttcttccatagattttctagaggcagcatggtagaggcagctcagttaagggcccagattttggagtctgctgcttgacagctgcctgacctacagcaagccacataagcaatctgtgctgcaggtctcacctgtaaaattggggtaaggctacccacactccagagattgtgttgataattaaatgcgttaacataggtgtcagcacaggcaaagcacacagtcagtactgcataagcggtgggcttcattattcatcctgtaattacgtattcatactagaatcatgtatcccataggtcagggaccaccttttctttccttaatacccccaggattggcaaatcttgctctctcaacaaatagtttactcggtggaacctaacagaactaatatttctttctgtccgtaaataaaaatagatcatgcttgaatgtgctactttgcccgaactccccaagtcttcccgcatcttcagttcctccccctccaacctggtgttcatcaggagaggggaaagagcatttcttgcctggcaggaactcaagacctagaagaaagagggcctaccctgccaaggaaatgaccttccccttcctcgcctctgctcctcttcccgtttcctgtcttttccttcttttctcctggtgtttccttctcccgttaactatggggacagacgcagctattcacaagtccgtctgggcagcacactccgaggtaaggcacgaaggtcaggagacaggttcccgtgccccaaatcctggagaagatgagttaaagctcttcgcttcgattgccttcgcccttcccgcgtctcgggagcaattcagtgtcgcctcacgtctggccttgcagaagtccggagttccggctctgaactggagctccccgccattcccgggccctccggtttctccctcaggccatctgaggaattgaggtaggatttcgcgggtgttaggagcaaactcccaccacaactcggtcccgggctccctctccgttgagccttgacctctgcccaaaaaacaaggaatcgtgggcgtgaaggcggccttgaacccgggcggcggggctcggcgggactcgtcagcgccctgctgcggcacccgggccgctcaggtaagtaggaggcgtgtgcgggcggggccgagcgggccccaatccgtacgcgaggcaggaaccgcccgccgcgcccccgagagctctcggcgccgcgcagtcgccgctgggcaccccgagaccatggggaagctcgtggcgctggtcctgctgggggtcggcctgtccttagtcggggagatgttyctggcgtttaggtgagtggcatcttgacagggcgtcttcgactctcyttctctcctcttccaagtgaggtcaggggctgcctggcgcccccttcctagcgggtaggaaagagcagctttggaacctcactcctccatctcacccagyaaaccgccccttgagactcgcttatggggaaagtgagctacttgcgtttccaaagactgccgagccgaattagtcccatttattttttgaaggttatgatcccccactttgctttctgaaggtcatgacccccttttactttctgaacgtgatgacccctttcccagctcgccctcaacattctgcttgggaaaaaaggacgtccattggaaacgccggacttgggagagaggatcaggctaccagttggatgtttacggctgactgagacattgcccaggtctggctaaccatgcagaagtactgggttatggaacctatcctagatttaaagagctggccagacagcagggcaaaccagctgaaacctgcaggcggtaactggcattttgtaggcatttgaccttttgaagtggaagatacaatggtgatagccagcctagaaatgtctcaggaaaagtcaatactgggctagaaagaagaacctttaagtgataatacacattcatgagtggatcgaaagcctctgcttgctttcagttgtctttgagtgtttatgtatttctcttagttgaagctggtcttcttagaggatcacgtctagaatctgttgaggtgcctggtgcctattagtaatacttccagtttgagagttttattgttacatttgctcccagtgcaaccacatggagaatcataaaataatagtaataataataaagtagatctaagggtatttttttaaataaatgactgtaagataagtattgagtctttctgaatatactttaataaaaattttaaattatccctgatattagaagaatgtggaaacattccttttcactctggaaacaagaaaattgtgttgaaaaataaatcggccaattgtttaaattgtggttggtttaatgaatttacatacttgcggagtaagtcagcataaaatttaaaaattaaagcaaaagtgatagagtttgactattaggagaccctgttgaattttgggaaagcagtttggaaggaaaagttcaaagggcaagactgtaggggattaagtgcagatttataacagacgatactttagaaaattagggctatttcgtgcatttaaattaataatattgttcaattactcatactattaaatagtgtcttttatttgggcagcagaattttccatgttgaatcatattatacagtttttcagcaataactgggtaaggttagctgatataggtaaaatacccacataatgtctacattatgtaaataaacatgaaaggaagtacctacttacttgttatgtcattcataaattatgataaagatagttaaccaacacgaagatgattgaagtccacatttaaacatacatkttgaatgctgtgccttgacttccagggytgggttttatcttctacagagaaagggtgaatgcctctcgagaagtggagccagtagaacctgaaaactgccaccttattgaggaacttggtatgtatgtgacagtaccaagaggagccagcacagcttcttggtcgtcatccacctgactgagccctaccagctcatttaattacctgtcactacttaagccctcccagtgggacatctgccccgtccactctgccccatgcaaggtcttsaggggtgtactaaatgacattctttgtgggtttttctcagcacatttccttactgacatctctccacattacctaaagaatgtcattgaccactccctggttttcccctcactgaatgcttctcctttcccatctgtggtatttcactctcctccttgtcctctgttacctttcctttttttgcttcctttcttctttccttcctccctccctttccttattgtcattcctggcttcaagtgttattttttttcaaataatatgactcagcccctcccctcaagaacctcacagcaggctgggcgcagtggctcacacctgtaatcccagcacttgggaggccgaggggggcggatcatgaggtcaggagatcgagaccatcctggccaacatggtgaaaccccatctctactaaaaatataacaattagccgggcatgktggcggcgtgtgcctgtaatcccagctactcggaaggctgaggcaggagaatcacttgaaccagggagtcatcggaggttgcagtgagctgagatcgcgccactgtactccagcctggcgacagagcgagactttgtcttaaaaaaaataataaacgaaggaacctcacagcctacctaccttcttttaaaaaaattcataaaaaatccatggcccagtccctaacctttcaaactgcagcccttcttttttagtcagttaaagggcagctccagctcaaactctccctaagctgaaatctattttacatttctgtcgttttctccctcatcctcccacccacaaccagctctgcttctagacttttcctatgtatggtacccccattctcaaaagattcagttcaaaatccaggaaccattgttccccgcttgtccctcatgcttctacgtgagacatgggctaatctcacctactagttaatgccacacctgcttatttgggctccacagctccaattcttcctgacattgctaacagaaaaataaaataaaatcaggctarattgtgttccctgttctgggaatatgttctttcaccttctcacctttgcttatgaaattccctccaaacttactgattcctctgtctctgcttactaaaatcagctgcaaaattcatctccttcctctgaactctcacagcactctgaagctccgattcacttatgacacctgccacatgccttgtattatagctagcagtgttctctctttcactatcagattgtaaactccctagggccaagaactgtgacttatttattagaatgtgatgagatagcttattttgggatatgattttctattttattgctatatttaaaaatacagaaaaagtacccttttgatttgagttttctgccttttcttgcctctcaatttctaaaaaataaagtaatctgaaccttgcactccctagtcttagaggtggtttgtgctagcagctgkaaagcagaagaaaccaaagaaaacgcctttcctgaattgtttttaaaaacctgagccccttcaagggattctgttggagaagggatatgaatatgtggatatctttgaataatggggatccttaccccactggctgacagcattctgggagaggagcaggacctcagaaggaatggttgcaaggtatctttagggacgctggaccctgtgttccagctaaggtaaagaccttgtgtcaatgcattacatggaagtagcagaattgtctaaattaaagggaccagtaactttggcaatgaataattcgatgatacgtagtgtagaatgaatgccagatggcctttccaaaacattctgcttaggtttagaacccaccacttaaaatgatttcataaccctaacagacaaacccagtaatgactcagattggattttccatcaacttagtggaataggrtatcagagtgatttaatttgattttaaaaataaggaaatgtgacatttactcatttgtttactgttttgtggtgtagtagtattcatattcactmtacaaataactgtcaaaatatataagcctgcaaataatcaagaggtataattagactagatgattggtagggtctagtctgactcgaattgtatcactcaactagatttgagaaggtaaaattacagttaatattgtgagtcttaggtcaatgttctgatttgccaaatattttgaagaaaatggcttaaatagttggaagcaggctgggagcagaagaaagaaatgccatgttacttctcatgtctattggcatatgtttggtgaactaaacaagttagaatgatgatgggtcatgtgtcagtaggacaatactgatatatatgttttgaaaaagctgctttatcaaaggcctggtgactatgagcagcctgttgagtcctttacaaacatctacatcatcctcataaccaatttgtaaagtggatgctgctatctatgctttgcagattaggaaattgacatacagaagaattaagttgcttgcccaatggtccggaactagggggtgatgggcttagcttatgagccaagatcgtttccttctatgcctttttactctctgttgtgtaacactaactttctgatctactgacaacacattttttattttggaagcttcaggaaagtattgcaacagtggaaaacagaaaatctgagatgcaaacagctgaaatattactagatacaggttaatcaaaacaaggcagtctagatatttaaattaagataatggataagataatactcacaaatcacaactggttgaggagtagaggctttacaaagccctgaaaagctgctgaaggattttaggtagggtatagtaggctgtaacagagctggagaaaaattcttatttgtgttttcaagacccagacttttgaggtttattttattggtagaagaaactcttattttgttttccttctccagcatttttttctgggaagaaaagttgaaaggtgaaatatatctttctctggaaatcatatctcatagatctttttgtattacgttcatctttttatccaaggcttttgagggtcaaggattgttttaaccaggacgttatctggctgcccttgacatctaatcaaagctgcacttgaaatatgaatacttcagtaggactttcactaggcaggattatcgagtaggtggcctctgtatttaatacctacgtatcttctcttccactsctttccattctatagcttcccatgtctccaatatatgcttctactccataataggttccatgtgttttcttagctggctatcagaaacttctctccaagatgtgaagtgacgataataaaattaactgatagtaatgctttgatgtgatcctttatcagagtgcctgtaggggatgactggagaaatgaagaaaagagtaaagaaatgaagttatgccaagtagcagtagggttgacaggctaagaagcagtaggcacctattcataagactgattttagacttagcagtgggattytaatgatagttgtgcataggctaataagtgtgtgggaaagtctcagaggaaggtatcctgggggcttttgctcccacaggtgccattgttgctgagatgcatggggcctgtcgtgcaggcgtagtgtaggtgacagctcctttttcaacttgttctcagtcaaaacttacttattatatgtctctttccatagaaaaaaatgctgaaaactagctcttactgagaaaaaagatctaactaaactttcatattaatattcagtaatctttcatattcatttatactcattagtttattactcaataatttcccaatatgattgtataatgtagcgttttaggctttacgttggaagagaaggaatgcttggcagagaggcctgtaataaaagaccttcacgattatgactttccagattttatcactgagtctatagagcagccttctatgggggataaagctgaatctctcaggatatgccctggaaattgttacttaaagagtaaatctaggatatgagtttattttctaggtatttgcctttttctcctgaaaatggggttctaaaaaaggatttagtatttgaggagtctgactcaagctttactatagagtagcatgcctgtgagattctccaaagttaatatggtttcccaagtaaatggttgaacaagtcaacaatttccmaaagaagtttccaaaagatatttgtagtttggactgtgagacgtattttttaagccttcatatatgcatttttctgattctacccttcttttgcagaaagtggctctgaagatattgatatacttcctagtgggctggcttttatctccagtgtgagtattttccatgctgctctcatgctcacatcaatagctgtatagacagtgcattaatgttgtcctctggagctgccagatggatccctatgctctcatcccacctccgggtaaaccagtcaactaaaaaagccaaaacagaattttggagggctaattagaacaccacaggaatgcccagctttgactgcctcatggtgggcaactccctgggggtagtggcatactcagtagggtcttgataaatgtgtattgatttccactcgattcctaggctagtctccagttctgtcctattgctatccattctcatcattgccctatttgactgggcttccgcttctggtagtcatcttcccactaactggtattcctctcaccatgtctgcctttatttggagctctgcaaatgtttgtggatcgaatattaaccacgttactygatttaaaactctaaacacgttccatcttgggttccctgccattcttaacaagtctttcaaagagaaatagagaacagactgcattttaattcccagtactgtcttcacaggaataatcaagaagttacaccagggacagcatttcggtaaacaaacaaaaaaatgtgtatttatgagatgttgaaatttttcatatattaatatttgttaaatcaattgcattttgraatggggatatgattttgaaaaagtatatttaccacattttcaatgtgaattctgattgctggaattggatgtctaatattccatttggggcaataaaataccaccaaagaacatggattttgaatttaaatatttttggccaaaaaaggggtacttataataaccgtggcctgaatttataaattcataagtacacacagtagaatagagtgaggctctcatttggaccttaaactgctgctggtgtcactgctggaactggtgctagtctgtgtgggcaatattttatttctttatttttccatcaaaatcaaggataaaacaaaatggtctagaaaagttttttccttgttgacctaaattttctattgtcagtttagatttttttttattatacttttaagttctagggtacatgtgcacaacgtgcaggtttgttacataggtatacatgtgccatgctggtttcctatacctattaacttgtcatttacattaggtatttctcctaatgctatccctcccccagccccccacaccctgacaggccccagtgtgtgctgttccctgccctgtgtttatgtgttctcattgttcaactcccacttatgagtgaaaacatgcagtgtctggttttctgtccttgtgatagtttgctgagaattatagttttcagtttcatccatgtccctgcaaaggacatgaactcatcctcttttatggctgcatagtattccatggtgtatatgtgccacattttcttaatccagtctatcactgatggacatttgggttggttccaagtcattactattgtgaacagtgctgcaataaacatacatgtgcatgtgtctttatagtagcatgatttataatcctttgggtatatacccagtaatgggattgctggatcaagtggtatttctagtgctagacccttgaggaactgccacacggtcttccacaatggttgaactaatttacactcccaccaacagtgtaaaagtgttcctatttctccacatcttctccaccatctgttgtttcctgactttttaatgattgccattctaactggcatgagatggtatctcattgtggttttcatttacatttctctgatgaccagtgatgatgagcatttattcatgtctgttgactgcataaatgtcttcttttgagaagtgtctcttcatattctttgcccactttttgacggggttctttgtttttttcttgtaaatttgtttaagttccttgtagattctggatgttagccctttgtcagatgggtagattgcaaaaattttctcccattccataggctacctcttcactctgatgatagtttcttttgctgtgcagaagctctttagtttaattagatcccatttgtgaagtctttgcccatgcctatgtcctgagtgttattgcctaggttttcttctagggtttttatggttttaggtcttacatttaagtctttaatccatcttgaattaacttttgtataaggtgtgaggaagggatccagttttggctttctacgtatggctagccagttttcccagcaccatttattacatagggaatcattttcccattgcttgtttttgtcaggtttgtcaaagatcagatggttgtagatgtgtggtgttatttctgaggcttctgttctgttccataggtctatatatctgttttggtaccagtaccatgctgttttggttactgtagccttgtagtatagtttgaagtcaggtagcaatgatgcctccagctttgttctttttcctkagaattgtcttggctatgygggcccttatttgattccctatgaactttaaagtagttttttccaattctgtgaagaaaatcattggtagcttgatggggatgacactgaatctataaattaccgtgggcagtatggccattttcatgttattgattcttcctatccatgagcatggaatgttcttccatttgtttgtgtcatcttttattttgttgagcagtggtttgtagttcttcttgaagaggtcgttcacatcccttgtaagttggattcccaggtattttattctctttatagtaattgtgaatgggagttcactcatgattggctctctgtctgttattggtgtataggaatgcttgtgatttttgcacattgattttgtatcctgaaactttgctgaagttgcttatcagctgaaggagatttgaggctcagatgatgggattttctaaatatacaatcatgtcatctgcagacagagacaatttgccatcctcttttcctaactgaataccctttatttctttctcttgtccaattgccctggccagaatttccaatactatgttgaataggagtggtgagagagggcatcsttgtcttgtgcaggttttcaaatggaatgcttccagtttttgcctattcagtatgatattggctgtggatttgtcataaatagctcttattattttgagatacgttctatcaatacctagtttattgagagtttttagcatgaagggctgttgaattttgtcgaaggccttttctgcatctattgagataatcatgtggtttttgtcattggttctgtttatgtgatggattacatttattgatttgtgtatgttgaaccagccttgcatctctgggatgaagctgacttgatcatggtggataagctttttgatgtgttgctggattcggtttgccagtatttttttgagggaggattttcgcatcaatgttcatcagggttattggcctaaaattatctatttttgttgtgtctctgccaggctttggtatcaggaagatgctagcctcataaaatgagttatggaggattccttcttttctattgattggaatagtttcagaaggaatcgtcccagctcctctttgtacctctggtagaatttgtctgtgaatccrtctggtcctggactttcattggttggtaggctattaattattgcctcaatttcagagcctgttattggtctattcagagattcaactttttcctggtttaatcttgggaggatgtatgtgtcgaggaatttatccatttcttctagattttctagtttatttgtgtagaggtgtttttagtattctctgatggtagtttgtatttctgtgggatcagtggtgatatcccctttatcattttttattgcayctatttgattcgtctctcatttcttctttattaatcttgctagtggtctatctattttgttgattttttcaaaagagcagctcctgcattcattgattttttgaagggtttttcatgtatctatctccttcagttctgctctgatcttagttttttattgccttctggtagcttttgaatttgtttgctcttgcttctgtagttcttttaatcgtgaataaccagatagcatcatggtgatggatcaaattcacacataagaatgctaaccttaaatgtaaatgggctaggtgtcgattttagatctttcctgcttcctcttgtgggcatttagtgctataaattcccctctacacactgctttaaatgtgttccagagattctggtacattgtgtctttgatgtcattgatgtcaaagaaaatctttatttctgccttcatttcattatttacccagtgtcattcaggaacaggttgttcagtttccatgtagttgtgtagttttgagtgagtttcttaatctggtgttctaatttgattgcactgtggtctgagagacagtttgtgatttctgttcttttgcatttgctaaggaatgttttacttccaattatgtggtcaattttagaataagtgcgatgtggtgctgagaagaacatatattgtgttgttttggggtgaagagttctgtgtatgtctatgaggtctgcttggtccagagctgagttcaagtcctggatatccttattaaccttctgtctcgttcatctgtctaatattgacagtggggtgttaaagtctcccagtagtattgtgtgggagtctaagtctcttggcaggtctctaaggacttgctttatgaatctgggtgctcctgtattggatgcatgtatatatactttttaaaatatatattttttattatactttaagttctagggtacatgtgcacaatgtgcaggtttgttacatatgtatacatgtgccatgttggtgtgctgcaccaattaactcatcatttacattaggtatatcttctaatgctatccctccctcttccccctaccccacaacaggccccagtgtgtgatgttccccttcccgtgtccaagtgttctcatcgttcaattcccacctatgagtgagaacatgcagtgtttggttttttgtccttgcgatagtttgctcagaatggtggtttccagtttcatccatgttcctacaaaggacatgaactcatcattttttatgtctgcatagtattccatggtgtatatgtgccacattttcttaatccagtctatcattgttggacatttgggttggttccaagtctttgctattgtgagtagtgccgcaataaacatacgtgtgcatgtgtctttatagcagcrggatttatattcctttgggtatatacccagtaatgggatggctgggtcaaatggtatttctagttctagttctagatccctgaggaatcgccacactgtcttccacaaggttgaactagtttacagtcccaccagcagtgtaaaagtgttcctatttctccatatcctctctagccctgttgtttcctgacttttaatgatcgtcattctaactggtgtgagatggtatcccactgtggttttgatttgcatttctctgatggccagtgatgatgagcattttttcatgggtctgttggctgcataaatgtcttcttttgagaagtgtctgttcatatccgttgcccactttttggtggggtgtttttttcttgtaaatttgtttgagttatttgtagattctggatattagccctttgtcagatgagtagactgaaaaaattttcttgcattctgtaggttgcctgttcattctgatggtagtttcttttgctatgcagaagctctttagtttaatgagatcccatttgtgaattttggcttttgttgccattgcttttggtgttttagtcatgaagtctttgcccatgcctatgtcctgagtgttattgcctaggttttcttctagggtttttatggttttaggtcttacatttaagtctttaatccatcttgaattaatttttgtataargtgtgaggaagggatccagttttggctttctacatatggctagccagttttcccagcaccatttattaaatagggaatcctttccccatttcttgtttttatcaggtttgtcaaagatcagatagttgtagatgtgtggtattatctctgaggcctctgttctgttccataggtctatatatctgttttggtaccagtaccatgctgttttggttactgtagccttgtagtatagtttgaagtcaggtagcgtgatgcctccagctttgttctcttagcttagggttgacttggcaatgcgggctcatttttggttccacatgaactttaaagtagttttttccaattctgtgaagaaagtcattgatagcttgatggggatggcattgaatctataaattaccttgggcagtatggccattttcacgatattgattcttcctattcatgagcatggaatgttcttccatttgtttgtgttctcttttattttgttgagcagtggtttgtagttctccttgaagaggtccttcacatcccttgtaagttggattcctgggtattttattctctttgaagcaattgtgaatgggagttcactcatgatttggctctctgtttgtctgttattggtgtataagaatgcttgtgatttttgcacattgattttgtatcctgagactttgctgaatttgcttatgagtttaaggagattttgggctgagacaatggggttttctagatatacaatcatgtcatctgcaaacagggacaatttgacttcctcttttcctaattgaatatcctttatttctttctcctgcctgattgccttggcgagaacttccaacactatgtagaataggagtggtgagagagggcatccctgtcttgtgctggttttcaaagggaatgcttccagtttttgcccattcagtatgatattggctgtgggtttgtcatagatagctcttattattttgagataygtcccatcaatacctaatttattgagagtttttagcatgaagggctgttgaattttgtcgaaggccttttctgcatctagtgagataatcatgtggtttttatcttcagttctgtttatatgccgaattacatttattgatttgtgtatgttggaccagccttgcatcccagggatgaagcccacttgatcttggtgcataagctttttgatgtgctgctggatttggtttgctagtattttattgaggattttcacatcaatgttcatcaggaatattggcctaaaattctctttttttgttgtgtctctgccaggccttggtatcaggatgatgctggcctcataaaatgagttagggaggattccctctttttctattgattgggatagtttaggaagaatggtacyagctcctccttgtacctctggtagaattcggctgtgaatccatctgatcctggactttttttggttggtaagctattaattattgtctcaatttcagagcctgttattggtctattcagagattcaagttcttcctggtttagtcttgggagggtgtatgtgttgaggaatttatccatttcttctagattttctagtttatttgcatagatgtgtttatagtatcctgtgatggtagtttgtatttctgtgggatcagtggtgatatcccctttatcattttttattgcatctatttgattcttctctcttttcttctttattagtcttgctagtggtctatcaattttgttgatcttttcaaaataccagctcctggattcattgattttttgaagggttttttgtgtctctatctccttcagttctgctctgatcttagttatttcttgtcttctgctagcttttgaatgtgtttgctctggattctgtagttcttttaattgtgatgttaggttgtcgattttagatctttcctgctttctcttgtgggcatttagtgctataaatttccctctacacactgctttaaatgtgtcccagggattctgatatgttgtatctttgttctcgtcggtttcaaagaacatctttatttctgccttcatttcattatgtacccagtagtcattcaggagcaggttgttcagtttccatgtagctcagtggttttgagtgagtttcttaatcctgagtgctagtttgattgcactgtggtctgagagacagtttgttataatttctgttcttttacatttgctgagtagtcctttacttccaactatgtggtcaattttgaaataagtgcaatgtggtgctgagaagaatgtatagtgtgttaatttgggtggagagttctgtagatgtctattaggtctgcttggtgcagagctgaattcaattcctggatatcctttttaactttctgtctcgttgatctgtctaatattgacagtggggtattaaagtctcccattattgttgtgtgggagtctaagtctctttgtaggtctctaaggacttgctttatgaatctgggtgctcctgtattgggtgcatatatatttaggatagttagctcttctcgttgaattgatccctctaccattgtttaatggccttctttgtctgttttgatctttgttggtttaaagtctattttatcagagactaggattgcaacccctgcctttttttgttttccatttctttagtagatcttcctctgtccctttattttgagcctatgtgtgtctctgcacatgagatgggtttcttgaatacagcatactgatgggtcttgactctttatccaatttgccagtctgtgtcttttaattggagcatttagcccatttacatttaaggttaatatcgttatgtgtgaatttgatcctgtcattatgatgttagctggttattttgctcattagttgatgcagtttcttcctagcctcgatggtctttacaatttggcatgtttttgcagtggctggtactggttgttcctttccatgtttagtgcttccttcaggagctcttgtagggcaggcctggtggtgaccaaatttctctgcatttgcttgtctgtaaaggattttatttctccttcacttgtgaagcttagtttggctggatatgaaattctgggttgaaaattcttttctttaagatcgttgaatattggcccccaccctcttctggcttgtagagtttctgccaagagatcagctgttagtctgatgggcttccctttgtcggtaactggacctttctctctggctgcccttaacattttttccttcatttcaaccttggtgaatctgacaattatgtgtcttggagttgctgttctcgaggaatatctttgtggcattctctgtatttcctgaatttgaatgttggcctaccttgctaggttggggaagttctcctggataatatcctgcagagtgttttccaacttggttccattctccccgtcactttcaggtacaccaatcagacgcagatttggtcttttcacatagtcccatatttcttggaggctttgttcatttctttttattctttttgctctaaacttctcttgttgtttcattttattcatttgatcttcaatcattgttaccctttcttccacttgatcgaattggctactgaagcttgtgcattcatcacgtagttctcatgccatggttttcagctccatcaggtcctttaaggacttctctgcattggttactctagttagccattcatctaatcttttttcaaggtttttaacttctttgtcatgagtttgaacttcctcctttagctcagagaagtttggttgtctgaaaccttcttctctcaactcatcaaagtccttttccatccagctttgttccattgctggtgaggagctgcattcgtttggaggaggagaggtgctctgatttttagaattttcaatttttctgttctgttttttccccatctttgtggttttatctacctttggtctttgatgatgctgacgtacagatggggttttggtgtggatgtcctttctgtttgttagttttccttctaagagtgaggaccgtcagctgcaggtctgttggagtttgctggaggtccactccgaccctgtttgcctgggtatcagcagcggaggctgcagaacagcgaatattgctgaacagcaaatgttactgtttgattgttcctctggaggtttcgtctcagaggggtacctggccatgtgaggtgtcagtctgcccgtactggggtgtgcctcccagttaggctactcaggggtcagggacccacttgaggaggcagtctttctgttctcagatctcaagctgcgtgctgggagaaccactactctcttcaaagctgtcagatagggacatttaagtctgcagaggtttctgctgccttttgttcggctatgccctgcccccagaggtggagtctacagaggcaggcaggcatccttgagctgcggtgggctccacccagttcgagcttcctgaccactttgtttacctactcaagcctcagcaatggcgggcgcccctcccccagcctcgctgctcccttgcagttcgatctcaaactgctgtgctagcaatgagcaaggctccatgggtgtggaaccctccgagccaggcacggaatataatctcctggtgtgctgtttgctaagaccattggaaaagtgcagtattagggtgggagtgacctgattttccaggtgccgtctgtcacagctttgctttgctatgaaagggaattccctgaccctttgcacttcccggctgaggtgatgcctcaccctgcttcggctcacactcggtgcgctgcacccactgtcctgcacccactgtctgacaagccccagtgagatgaacccggtacctcagttggaaatgcagaaatcaccagtcttctgtgtcgctcatgctgggtgctgtagattggggctgttcctatttggccatcttggacagatgcatgtatatttaggatagttaactcttgttgaattgttccctttaccattatgtaatggccttctttgtctcttttgatatttgttagtttaaaatctgttttatcagagactaggattgcaactcctgctttttttttttttgctttttatttgcttggtagatcttcctccatccctttattttgagcctatgtgtgtctttgcacatgagatgggtctcctgaatacagcacacagatgggtcttgactctatccaatttgccagtctgtgtcttttaatcggggcatttagcccatttacatttaaggttaatattgttatgtttgaatttggccctgtcattatgatgttagctggttattttgcccgttaattgatgcagtttcttcatgtcatcaatggtctttacaatttggcatgtttttgcagtggctggtactggttgttcctttccatgtttagtgcttccttcaggagctcttgtaaggcaggcctggcagtgacagaatctctcagcatttgttgtctgtaaaggattttatttctccttcacttatgaagcttagtttggctggatatgaaattctgggttgaaaattcttttctttaagaatgttgaatattggcccccactctcttctggcttgtagggtttgtgccgagagatcagctgttagtctaatgggcttccttttgtgggtaacccagcctttctctctggctgcctttaacattttgtccttcatttcaaccttggtaaatctgacaattgtgtgtcttggagttgctcttctcaaggagtatctttgtggtgttctctttatttcctgaatttgaatgttggcctgccttgctaggttggggaagttctcctggataatatcctgaagagtgttttctaagttggatccattcttcctgtcactttctggtacaccaatcaaacgtagatttggtcttttcacagagtcccatatttcttggaggctttgttcgtttcttttcactcttctctcatcttgtcatctcactttatttcattactttggtcttcaatcactgatatcctttcttccacttgatcaaatcggctattgaagcttgtgcatgcatgaggaagttctcatgccttggttttcagctccatctggtcatttaaggtcttctctacactgcttattctagttatccatttgtatcacttttttcaaggtttttagcttccttgtgatgggttagaacatgctcctttagctcggagaagtttgttattactgaccctctgaagcctacttctgtcaacttgtcaaactcattcttcatccagttttgtttctttgctggcaaggagctgtgattctttggataagaggcactctggtttttggaattttcagcttctctgctctgctttctccccatctttgtggtttttgtttggtgacctacagatggggttttggtgtagatgtgctctttgttgatgttgatgctattcctttctgtttgttagttttccttctaacagtcgcgcctctcagctgcaggtctgttggagtttgctggaagtccactccagaccctgtttgcctgggtatcaccagtggaggctgcagaacggcaaatattgctgcctgatttttcttctggaagcttcatcccagaggggcatccgcctgtatgaggtatctgtcagcccctactgggaggtgtctcccagtcaggctacatgggtgtcagagacccacttgaggagacagtctatctgttctcagagctcgaatgccatgctgggagaactactgctgtcttcagagctgtcagacagggacgtttaggtctgctgaagctgtctgccgccttttgttctgatttgccctgcccacagaggtggaatctacagcaaggcagtaggccttgctgagctgtggtgggctctgccctgttcaagcttcccggcctctttgtttacactgtgagcacaaaaccgcctactcaagcctcagcaatggtggatgcccctccccctgccaagctgcagcatcgcaggttgatctcagactgctgtgctagccgtgagcaaggctctgtgggcgtagaacccgccgagccagacacgggagggaatttcctggtctgctggttgcaaagactgtgggaaaagcacagtatttgggcaggagcgtaccgttcctccaggtacagactgtcacrgcttcccttggctaggaaagggaaatcccctgaccccttgcacttcctgggtgaggtgacgccctgccccactttggcttgccctccatgggctgcacccactgtccaaccagtcccaatgagatggaccaggtacctcagtcggaaatgcagaaatcacctgtcttctgtgttgatctcactgggagccgcaggccggagctgttcctattccgccatcttggaagcttcctttcagtttaaattttcaatgttatgccaaatataccactaaaagtgatgattctataactaggaaatttctttactgttgtgaaataatgtttgtccttcctactgtatgttttcttttttttttttaattttcactggaactaaaagttctgaatcattgctatacaggaagtatatattttcatcacaaataattttatgagaaatgttaacatgaagttttaaataatggatctccttttgtaaatgaacaaacaacttataggataaggattctgttgttttgcttgtttctaatccttctgcactgtaataaattcaggaccttgttcttttggtttctccttttaccctttcttgccatcctagaagatgtttggaagttgctgatttggagaataattctgtgcaatagatatttctagtctatttagggatgacaaacaggatattttcttccctgccttgggacttgacatgcttctctttgactccaagattactcccttcttcacactttgccagctaactcccacttctttgtgagggttcattgtggtggcactttacttcctcaggagagtcttccctggcactctcttgtggggtgaggtgcctcttcaatgttccctcttgaatattccctcacatcccctgagtttaggctgttatagaccacaccatacttaagtgcttgctctaggtttcaagatccttgaactcaagactttggaacatgtattgacatgcccaacaccgaacatactaccaggcatttgcaagtcctcgaatatttactgagttcatgtggtgatggatgagtatagtggaagagttcattgattgtccacatttacctgtagtttgttgggaaaaataagattcctgcatgtctagatgatgattttcatcactttcaccagtgaatggtatgaaaagaattgcttacagtcattaacacacagttggtttgctgccacaaattcctacctaactgctttacacagaaaactaggtgaatgtgaagccatttatcagaagtgtttctttgatcatcacacttaatctagaccaagcttgtttgcagtgccctgcccttatctatctatcagattattttatttctgtaacatccagtcttttcactagctggctatgctccaccttcccccaagctaccaaggtacttgccattgtgttctgtcttgagctgccttcctgagcaatactgtttacttccaaacctttctgtatgtgtggcagagagagtctgaacaataaatgatctgagtgatttaggcaaatcactcttctaggcctcatttccctcatgtgaaagggaagatgtgagataagatgcccctaatatatttatatgtatataattattatatattttttatttttaacatatgtgagtgtgtatatatatacatacatatatacacacacatacatatatatgtatacatatacatatatacgtacatatatacacacatacatatatatatgtatacatatacatatatacattaaattttttcttcagtactactattatctgagccattgagcttggtgacaaattggttatggggaaaagagtagactgaaaattgaattttatgttctgatgttggggagcatagtgatgtccttaactgagaagaatagatataaatgagaggatggattcgaggggagagtgttgattttggttttgactagttgattttgagctgccctttgggaggaggttgggaaggcaagctagagttacagagttacaaataaatgtgcagacttgaaagtccttgatataaaggaaatacctgaatctttatgtataagatctgcaaggaaagagtatagagtgagaagggaggagggatcgataaaaacagaaggaggyataaatccaagagtcaggaagaggagcaggatttctatctgggaactcaacttttgacgttttgataagaaagaagaaggtatactgtagtgtcaaatgccacagagaagcagatcagaagtagaaaagttatcaaaataaagtaatttggagaccatttatatgatctttataagggtatttctacaaactggtgggagtggaatactaacttcagggaattgagagttggagcagttcacattaggcaataagatcaggtgatgtttctaagaaatttgatggtgaggggaagagagataaatgcatatatgaagaggcagtaaagttaagaaaatatttatttcaaggaaggaaaccttgtaattttttaggccaaagaagaagctgttagtgaaaaatgagtggtaaagcaagagagagagggtgtaatctctagagacagaccctagagaacagggaaccaagaaagcaggtaaaggatttaatctaagaacagaggagggacatttcttacttgagaaaagagggagaaagaaagagaatgaataaaactgaagaagaattactgggacagaaaggaaagaattataggaaattcatgttaaatgacatgacattttcagagaagtagtaagtaaagtcatccactcataataaagaggaagaaagtatgggctctagaacagtggtcccagcattttgggcaccagggaccagtttcgtggaagacaattttttccacagatcatggagggggagtggggaatggtcaagataaaactgttctacctcagatcatcaggcattagattctcataaggagcatccaacctagatcccttgcaggctcagttcacaatagggtttgcactcctatgagaatttaatgccactgctgatcttacagaaggtggagctcaggcggtaatgctcactcacctgcagctcacctcctgttgttccttgtaaggcccagctccttacaggctacggacaggtaccagtctgtggcacaggggttggggacccctactctagaagataatgaaataaatttagaagtgagacatgaggaaatccaatagattgcctatcataatgagccaaaaaaatcaataaacagtactaaatgtctggctgaagttgggatagtgactttgtagtggagtttttcaatctgattttagacttgccctatataagagctagaccaaggcaaagggagttcgcacagaatgtgataaggaagcaaagggtgtagctattgatgacgacaggattatggtctggaagcagaagtttgtggctagggacatgccaatcccttctccagatgtgctgacttaaggagaataaagagggaacagtgcctcctctgatgagcttcagtagtgccggtgttgtctgggaaaagccaggtttccctcagacaacattgggacatacgaattgggcatagaaggactgttctaaaaaaagtttgaagatatagctggggttgttcagaaaagattgactacctcaagagggagcagtggaagagccagtaatagtatcataagtgtatgtgtacgtgtgtgtagaaaggacagggagagggaaagaggcagaaagacaaggtgaaataggaaagagagaattgcaatagactgtaaaagaagataaaggtagcagagaagatataaagttattgatattgatatatatccagtgatagataggggacatggagaggaagtggactgttttgtaactggtgtagaataaaccaaccccaaggtttgtcacagtggactcagatgcagcaaaggcttcatgcattcaggatgcctattgttgattaatagctacctgatcctaatagtagaaaggaccactgtccaagttactggaataaactttttgtgatgtttgagtaaagcattcatgtcagaattttcagacatacctatakgaacaaaataggtcaaaaatagtcaactatataagactggtatccttatgttaattcttagccagctatactgtttgccactacatgatataatcratgtaggaatgggaacaatacaattaaactatacaccccttctctctgctttgaggaaggttagttatagaataccaggaccggaaataatcttataatcatgtatttgaacttcttcattttatagatgaggaatgtgaggtacgggcatgtgaagggattcacacaaagtaacagcctagtctcttctgttatatttttttggcttaactccttttctctaaattaaaaactcttccttatcttgaatatggttctttctgtgttcatagccaatgtttagatgacatcagtaacaccccagatcagatcatggaaacagctgacagagtgaaaaagcccagtaatctaaatgaaatttagaactttgaacatttttatttggctttgagattttaaattccttatgaaaatattgttttgatatgtatatgtgtgcacacttgttctttatttttaaaagggattaaaatatccaggcatgccaaactttgcgccagatgaaccaggaaaaatcttcttgatggatctgaatgaacaaaacccaagggcacaagcrctagaaatcagtggtggatttracaaagaattatttaatccacatgggatcagtattttcatcgacaaaggtaaaacctgtatgtttaggrataagggggaaatgagggaaatagaaaccatttatctccagcccctcaatatttatgtaacaggaagagagaagatgctattttaccatacagatgtgtttttttwaaatgataaataggtataaaaccttgtaaacattgcattaaagaaggaacactagtatttttggccctatgtggcctcctcctcttccttctatccacttgtcttcttgtttgactgtcacaacctgtttgaatactgttctcagaaatctaacatgtaaactaaaggccctttagtttagttgtcactaaagacaactgtgagacgttaaaaaacataacataagggggaaaaaaacaaattagactcatcaaagttaaaagcttttgtgcttcaaaagacaccatcaagaaagtgaaaaacaacccaaagaatgagagatagtatttgtaaatcatatattagatgagagacttgtattcagacaatataaataattcttacaacttaacaaaacacaaataatgtaatttaaaaatggacaaagtatctacctagatagacatttctcctaagatacacaaaggcctgtaagcacatgaaagatgtttatcatccttagacattaggaaactacaaatcaaaaccagaatgagataccatttcacacccactaggatggtgataattaaaaagacagacaataacaaatgttggcaaggatgtagaaaaattggaaccctcatactttgccagtgggattgtgaaataatgtaaccactttgggaaggagttttgcatttcctcaacatgttaaacatagagttaccacacaatccagcaactctgcaccttggtgtatgctcaagagaattgaaaacctatcyatgcaaaaacccatatacaaatgttcatagcagcattactcctaatacaaaaggtggaaataacccaaatgtctatcaactgatgcattcataaacaaaatgtgataggtatttatacaatagaacactatttggcaataaaaagaaatgaactactcatgcatgctataatatggatgaagcttgtaaatattatgccaactgaaggaatttagtcactaaaagccacacattatgtgattccatttatatgaagtgtccagaataggtgaattcacagacagaaaaattgttggcaggagccaggggagtggggaaggaggaatgacagctaatgagtaggtgatttctttttgggtgatgaaaatgttctggaactaaatagtggttatggttgcacaattctgtgaatatactaaaacccactgaagtttacattttaaaagtctgaattcagtggtgtgtgaattatatctcaaaaatatattataaaaacataagttatcaatataccatatatgctttaaaaacaatagtttccaatattatttttgacttgttcacagttcataatttcaaacatttaattttaaaatatttttgggtctatacagcatgaagaaaattaagaacagggaaacttcactaacagtaaccacatgaaaggaggaccaaattgaagtgctagaattccatgaaatcttatatacacttttatttgcttagcaagctctgctttaaaagataattgaatctaacaatttttcattggtttatagtatacaaactattttcatatataatggtgtctttacttctcgaaataaaatcctgggcccaaccttgacacttcctctccctggcccttttgatcaactcattataatgttttgtttaatgtatctctccaatatctctccagtctgaaatatctgtccatctctccccatcctcactgctaccagcagttcaaggccccagcatgccttccctgattctgcatgggcccccaactgtaccttccttctcataccacctcaattcattgtcatagtaaggatttctttttatgcaaatctgattatgtccctcttttcatcaaatttttcatattgttctgtcactctgaggataaaccccaaatctccagaacggcctgggttcctgggtgcttcccctgtaccttctggcacctgtatgctctccagtttcactggaaaccattctcctccagactctctggaccagccatactggatttcttttcattcagtgaagtgtctcatgcctcaggatctttacatctgctgttccctctgcctggaatgtccgtctgccacttctggctcactctttgtcatcattgaagactcagcttaaatatcatcttctcagggaagcctgcccaccatcttgttccaatttgtgtacctttctatatttcttctcaatgtacctcttttttaaaatcattcattacggtggtaactaattttttttttatgagatgaagttttgctcgtctcccaagctggagtgcagtggcacaatctaagctcactgcaacccctgcctcccgggttcaagcaattctcatgcctcagcctcccaagtagctgggattacaggcatgcgccaccatgcccggctaattttttgtatttttagtagagacagggtttcascatgttggccaggctggtctcgaacttctgacctcaggtgatccacctgccttggcctcccaaagtgttaggattacaggtgtaagccaccactcccagcctacagtagtaacttttttttttaaatgttaaaggataggaattttctttccctctcctgctcttgctctatagcaagttcctaaacttaactgttactcttcaaatgaatgacactctatgaagaacgtgtctccccactctagtattctttgttttaatttatttaataatttttcctccttgttttcctctctcaaatataatcaccataaaagcatattgatttgtccattgctggattctgagagtctagaacagtatctgatgcacagtaggtactctatgaacacatatcaaatgaataaataaacgaaccctataggacaggcagagcacatagtaatattcaactttatagatggatacaatgaagtttagaggaatgcagtgaagtgtgacttcacttctgcaattagtaaatggctgatccasaactcagacagaggaggtctcacttctaatcctgtgtcttttactaaaatgagattaggactctatttaaataattttaaaactgcaactgttttgcctcacactgtacaagacataagattctgcattggagatggtataataagtgattagatttacctgaaactatttcattgcatgggatcatattagaggtagaggtggaggtgggtttggggctttttttctttctttttttttttttttgtttgtttttgtttttgtttttgagatgggacatgtttatacaataacagtcatataatcaggcttccataagttgagtatattatgattcacagcttatcttatttgtttgtcatctcccttaattatgtatttaattcataaggccaaaatattacatatagaaatagagayggaatgaggagatggagaagaaaagtactctcactaagtatatcttatttggaaagagggattcagtagatgcactagaagaaatgaaatcaggctagcacaagtgattgttcactattgtgtctagcaaaagactgaaggtccgtgttggggctgaaatccaacccatgttctgtttgccacgccctgagccttgraacagagctggatcagaccagaaggaagatttcctctgtgagcaagcacctttccttaatttgcatcaaagtgcccagtgtgtttcagaggtcctggttatgaattttgcatctcagggtttgggcttgttccatcacgtgcttaaaaactacatttgggaaaggaatagggaagatgaatacagatcaagtcctacagtgggaggatgggaccagaccctttaaaactccagagctcatcaaacctagaactcctgataagtcagaagacagcattctcagaggccaaattactaccctcaatcttgttcacagcagttcacattccaattgaaatgggtaggtgacatttctgaggtgggtactacctagaattagttagtttgttttatctcgcattcatatttacatgccatgtccattgagctcactaaatattgttatgttggcttgtgtcagaaattcattgtctagctgggaaatgttgcttattttaaggtgtttacactgccctgacattcactgagcttctgttgcaatgtagataattattgtacacacacaacatctcagcaaagttttgtttgcttgcactcacttctcttgctgaagggccatctggggaaaccacatccctgtttatgcatcattatagttctgtaggctcctgttagacaggttatgcatataagggtgaagtgactatggcaaaacatcttggctctgccactttgtggtgatgaaattgctgatggatcattcgcctcctgagcttcaatttcctcaactaaatctggattctggcatttgtctgacttacctatcatgtagactgtgagggtmaaatgcaagatgtaagaagaaaacttttggaagtgaccaagttttaaaacaagtctaatattagttgtgataggggtaactttcttggaaattatcccttttttccatgtagacaatactgtrtatctttatgttgtgaatcatccccacatgaagtccactgtggagatatttaaatttgaggaacaacaacgttctctggtatacctgaaaactataaaacatgaacttctcaaaaggtatggaatgaaagtattgtgcggttctatttactttgcacctctgctgtgtgctttgtattttttggttcagcaggctttcttaaacttttgttttgaaattgttttgatttttttctaaagctttctaatgattcccatggtgactcttcccagcgcctcactagaaattgccatgttaggtattgaatatgcctatattttcgagcattttgaaagcattttaatcctataaaggtgctcaattaaattcccagctctaattccattctctttaccacggcaactcaatacctactatcggtctctgtttaaacacctacacccttttttggttgtcctagtaggttgtgttctgtgagcctcacccactgggtgttataaccaacctccagatgagccacttctttgtttaattacagctttaaagtagaattttttaaaagyccttgggcacttataaaaattacatttgttaagcattgactatgtgccaggcactatgccagaatacttaatttaacttaattctcacaaagcctttaataataggcatgggtaaactaagacttagagaaggtttgggttagataacttgcccaagttacacaatttgtaagtggcagaaacagggtataaacccagatccatctgaattcaaagctgagctctcaattgcaatgaacatctttcttactgcattcattaaaataacaggcttttcagtggagaggctgcctgtttaaaggctgtagcaaacaataaagaattcatcttttatcaaatgggcttaacattaaaaaactggctccaaaacagtaaattgtttcatgggatagaagaataggaaaagaaaagaaagttcatcttctttcctttgctctctttctcaacatcatgtattaatttctccccacagaatatgggggaaacgagtgcagagcatagaagtaagagaagttgaagttattgaactctgctcctaatgcaccgtatggggttctgaggccatagcggagaacaggacttccacagggttgctgggaaactgtggacaagtcacttaattggtgcctcaatttcttgagcataatggggattctcatttgcctgacttacctaactagtggattgcgaggatcaactgctttagcataggatctcacaggaagagtctcccagaaagtgcagcctgagggcacacctgatatttggccacttcattagggagtacaatcccaggaagcagacttgagaaaccagtgtgaggcaaggaagggagaaggttatgggttgaattttgtgtccccctgccctccccaccccactccccctgccaaaaaatatgttaaaatcccaaccaccacttcctcagaaggcgacactttggaaattgagtcattgcagatgtaattagtaaagataaaatcatgctgaaatagagtacccttaatgcagtagaactggtgtccttgcaagaagacaggcagatatacagggagaatgctatgtgaagatgaatactgacattggagtgatatatctacaagccaaggaatgcctgggactactggaatgccttgctggaagaggcaaggaaggatccttccctagaaccttcagagataacatggccctaccaataacacggttttggattcctagcctccaaaactgcgaggcaatacatttctggtgtttaagccactgagtttgtggttctttgctgtgccagccctaggaaacacatgcagtgagggaggtacagcaaaggcgtcattaagccaaccgctgctaactgactgcttgaaatcatggacttatcctccagtaatcagcgtaagctgcatctcaggacaatctggtcaaggagaaaaagggagaagggtttatccaccagccccatctcctattagtcaaaggtttgcctcaagaggccttcattttcccacattcttggttgttgtgcatgtgcaagtctagttttgtggtatcctatgactcaatgtcaacatgaaatctggaagtgggaggcaagaggcccacagtaggcatgagctgagacactgctaggctgcccctctgggaagtacatcagacctgtgcagaactggttgaartagcagcagctggaacaaggtaggtgaggctatgaggatctaaagaggagcctgagggtacactggcacaggcattgataagcacttacaagggggcataacagagagctacagaaacaaattgtgaggcagtttaacctaatttatgatgtcaggcaatactttttggagtaaagaatgcttaagctgagatacaaaaggtgagtagccgagtgaccttgggaaagtcattatatgtcaaaacttcaaagtatttcctgattcacccaaattttcctccctaaaatttaatctaaaaatgtttaagcattattttttcaagtcactttttttttcttttcaaaaataaaaatgactttatttttcttacggattgtaagaataagacttgctctattttaaaatgtcaatgatattgaagaacgtaagaaagaatatcacccataattccatctactcagagaaaatataaaggtccagatgaactgggttatgctatgataacaggacagcaaaaccctaacatcttggtggctcaaaactgccaaggtttgttatgttttttcatgcatgctatgtatccagtgtaggtgatttagggactcagtttcatattatcctcattaagggccctaggaggaccacagtctctatcatcataaaagttgctcattactgtggaaacatgagggaaacatggtgaagcaagcagtggttcttaaaatcttccatccacaagccactcacctcatttcatttcatttcattggccaaagcaagtcacatggctgtgcctaactgcaaggggatggggaagtgtaattcctgaaggaggataaccatagctatcagtgaactgcactacaactgtcacagataaccatgatcaacatttacaagtcaacagattttggggtttgagatttatttgtgaatttatttcttttcactgatttctgtgaaagagaagagtaagaaaataacaaatggctaaagaaaacccatcagggcaatgcagaatcatgattttctgtggaattccttaatccatactagttcatgtatcctttttcaaattgatgaacgtattagtctatgtagagatgagtgattttgacaaggataaaggatatttaaatacctcatgggtctctttttccacctccctttcactttagtgtgaatgacattgtggttcttggaccagaacagttctatgmcaccagagaccactattttaccaactccctcctgtcattttttgagatgatcttggatcttcgctggacttatgttcttttctacagcccaagggaggttaaagtggtggccaaaggattttgtagtgccaatgggatcacagtctcagcagaccagaagtaagctcttttgtgtatttttctatcctttgcccttgacattttcgtggactcctttccttacgaggaagttacttccttacttaggcttacgtagtgaatatatgtgtggagggatcagttgtggccagggttcacactaaatctgtcatcctaagcaatccatttgtttccttggactttaggttcttcccagttaaaggagggatgtggacttaaggatataaggacctcattccaaatttttacataactcttgaaacacaytttcctaacacactacaaaggaagataaatgagcaatacccctgccccttatgaaagtacaaagtatttgaccacttatgctaagttcagttacacaaaagctcttaggagagagggaaggctaccttagattgggcatagggattgtataagtttcagacctactgacttacaacagcagaccattcaatgagaaaaccctattttaaacagcatgaaattttatgagaaaacacttttaaaaagtgtttaaaaattggaggtttttttataaacagaagtaccttgaatattaacatgtatatttgagataatgagcaaagatgatccctgtagaaaacacctctcagtgtccttcctcttttaaaatattgtgattgagctttatggtcatttgatactttttttcaagcactagtttttagaagtatatacacttytggccttgtaagagatccacttaccttcattcaatttaaggaaaaagttgtgacttcgaagtaataagattgagcctatatatgtcatctagaaacaccagtttcattatagtcataactcatattcaaagcctgtttaaagcacttcaagaatattaaaaatactaccccattatcttcttttactgtggtttagaaaaggattgcagtggtactttcaaggrgtgtgcatttttatacctcttctccaaaataaaagtgagtgttgtctctcattaccacttgcttaagtgtaaatgtcatttacttcaaaggtatgtctatgtagctgatgtagcagctaagaacattcacataatggaaaaacatgataactgggatttaactcaactgaaggtaagagtaccctgtctggcccacacaatctgacttcttaccttagtcccatacttgacccaggaatgtgccccttgaatgaggaaaacatggctatttgagagcaatgccagtgagattatgcatgcgtttctaaaatacagaagcaaagccccctaaaaacaccaactttaggtgccagaagaagctgtaggggttgtggggatgaatagggaagaaagcgaggaatcattgagacaatgtcttcactactccctctttgttgtaaggtgatacagttgggcaccttagtggataacctgactgtcgatcctgccacaggagacattttggcaggatgccatcctaatcctatgaagctactgaactataaccctgaggaccctccaggatcagaagtaagttcctatacctctctgagctcacaggcaaagctgcargaacaaatttgttggggtgacttggaagaatttaagccagtcacatttggtgttatagaactaaagaaattttacgtatgagaaaagtaaagtttttgacaggtagggagataaggttcgttaactcttttaggccaccattaacttttcaataactcttgctgttgggaataatggaaaaacataagctcgattattcatattgacccagattgccatatcgtatttccaatcaggagatagtctctgagcaggtaggtcttgcagttagacaaagagagagttgtatatggtaccatcttctttcacactgtccaacatgaagctaagattaaaggatttaaataactgtcgcctcaaaataaaatgagtttttgcctgtaagttctaacatatacgatggtgttgaaaattgtcttattttcaagatatcatttgtgttattttaaaatatctcttctaaaacaatagcataatccattgaattttctacattaaaaacaacattataagacaactgcattttctatggcattaaggttaacaatttaaaaatctttagtgaatttatatatagctataaattctaggcacacatactcagagatttattcacaaaaatttattgagtacctgtaatgtgtcagacattgtacttatgtttaggatatatcagaaaaaatatacagagatccctgatcttaagaaagggggacaaacaatgaacaataagcataagaaataagtaaattacatagtaactttgaagatggcaaattttatgggaaaaaaggctcagcagagtaaaggggatcaggattactatatgcagcaggatgagcaggtcctactactaaagtcagagatsagagtaggcctcattgagaaagtacaatttgaaaaaaattaaaatgtgtgaatccacatttggtgatttgagaaactgaaattcaaattcaaacccagtaattggcctagtgggtaaattaggacatacagttatttctacttccagtattgctgtctttcagttaaaaatatgattatttctttttttattaatgtattagtcacagcttcttaaaaagaacacaagaaatgtaaaaagaaacaaaagtccaacctaagcctagaaccagaattgttaccctaaactaggaagcaatccttgcctcagatatgtacccctaagagtgatagacaaaactttcctttaaaagcccaaccacaatgtctgtcttaaggaaatgaaatatgatacataggattattggagaattgtttaggatctttttcgtatctctattttcaagttgaattatttttaaaattttagataagactttttgtcacaattactgacaccctttaattttggttgaatctcatgttttgtacatgaaatcaaagcttaagtatttttgtctaacaaacctgagatgaaggatctcccttaagataaaaaaaagaacaaactctgttctaataagagatatcaatatagactcgtaactcataaatttctaattgttttcctttaattccaaaataaaaattttattttattttgtttgagtgaacttcatccagcctatttggaagcctgagtgcttaaatatacactgattagcaaagttaagtgtattaatcctgggatcaataacagtactaggcagtgatgtgtcaaatgaaattccaaagtagtatccattatttatgctttctagcaactttgcagatgtgaaggggctccagctgtgatgactgccatcccatcagttaccatgttgggttggctggataactgggtgtttcttcattattttgtcttgtttctctccccatactgtaatctcaaaggcaagattcttcccacagagggaggaccaccatccacttgagaactaaataagagcatcttaactccttctgtaagggatgcctgcactaaaaaaattrtgtaagtcatccctgaggaatttggctaatgtcagaaagccagttcactttggtgcatagatatctatgacattagtactttcatcagaagaagaacaatttattgaagatatacagattttagcttctgatttctgaaaaatagatttatcctagaatgtttgggaaggacatcatgaaacaggtgtttactcacataatatactaataaacgatcttttctcgacaggtacttcgcatccagaatgttttgtctgagaagcccagggtgagcaccgtgtatgccaacaatggctctgtgcttcagggcacctctgtggcttctgtgtaccatgggaaaattctcataggcaccgtatttcacaaaactctgtactgtgagctctagactctagatagtaaaaaaaaaaaaaaaaagtctacatattttgtaaaagtaaactgataattgtatgataagtggcactgtaagtaaatagcaaacaccaaccagtgagtgtggcttttcttatggatagaagtaaaggagcagacagagattccttgatagccatcaaattgcaagtcaggttaatgacagtccaacaagaagccaaactttacggatctttgttagcagccccaatgttctttctacaataaaacatgtggactatgtccagtgaggtctccgactcacctagaggtccttggtaactgggtccaagtttcctcctacagttttgacgttctgggtctcctacagtccagaccaagagaaaagctaatgttcaagtatttacaacccctgttctctccccgcagttgtgctgggcacagacagttaattaagtgtaccagtctgcagataaagaattagcatcatgtgattgcccaaagcccttagaacttgcattctcccagggtaccgacacataggaaattgggttctgagaaatctgacagttgggcctcagaggctaccttagggcagggagtgcttatctctaataggcccttatttgtattgatgcttgtatctgaaatacagttggccctctgtaactgtgagttctacatctatggattcaaccaaccagagattgaaaatatttggaaaaaaatggatggttgcatccgtactgaacatgtacagactttttttggtcattaatccctaaacaacacagtataacacatatttacataatatttagatgatattaggtattataagtgatctagagagtacctacataggggaatgaacataggttatatgcaaatactatgccattttatatcagggacttgagcatccgtggatgttggtatccatcagagtccaggaatcaatcctccatggttattgagggacaactgttttgctaacctactgggctctgaatcttagatgaagccttaaggcagttatctttgactgcctttatcttacccttctggtttattcaataaacagttattaagcaacctccagtaaatttggccctaaggaatctgaaatgagtagaatggttctggcctaatgtcctatcttgaagaccaaccttaaacttaatttgatgagaatgaatagaagtgtccttttttggtcccaaaccagtacaacctttagcaaacaaaccattaattaaagtcagagcacccaagcacctcccttccctttttgtgacttttattcgggagtggttggttgatgctttttctcttttggggagaccattttatatgcaaaagaacattgctcagttttatgtaggtttgctgaaaagttttgcagggtaaaattctccttttttccagtgtaacccattgtgattttgactataagactttgtagttttcattgcttcaaagaggaataaacattcagcagaatgctatagtcagttattagattttaaatttcaaaagcctagctatcaagagaacacagaataaaaaagacattaaagacataatttaagaaaataagtagagtcagttttgaagaatataatagtctttgttttagtccctagccctcatacttactatattataatgtttaccagactaggggagaataaagagagataggaaaagacaaagataatttagatgctggtaagttcctgagaattgatcctgctctgccttctcctcaggccaagttagaaaggctgggggataaaactttcctcaggaaatttgggtgatctgattgctgagggactaatgtgtcctttccctgggagggcctgggaaagtcacaaagccttagggattctctgtgctcagcctgatgaaaaaacagagaagaaatgctagtgtgatttactggggatggcatcacacctacacttgaacttggcacagaagcaaattcccacgtgcccagaggggtatgggggttagcagagaaagaactgatagacttaaaaaggtcttgctgtcaggaaaaagaaaataagtagtcatctgattcaaatgaagaccgaagtttagacggtgacatcaaagaccagctgtctcccatgatgctttagctctccctgctggattttagagaaaactcccaggattgggagggggctttggaattgccttatatattgatttgtgcttccaaacaatgtgtggggagtcaaaaacaaaattacatgaggctgtggaaaaaataagttctgttacacttcatggttttagctttttcagaattggaacaggataragtggaaagaacttagtcttttgctaatggacatgtgattagtatcttttattccttgttctgtggctaagaccaatggactattaagttggttttctcctggaaatgccagtggaagatccagcataatctcttttacacttcacccctgctcttgctccaagtaggtcagtctcaaccttcagctactgggatcccctcactcagtgtgtcctctctttgggagaggccttggcaaagtggttgaagcttggattcctcctggagtaggcaatttacccattctttccaaaggatagggttgttgattgtcccattatcatcctctctttgccttgtcatctcccttcaataagttttttctccccttcatagggaggcacaggtttaccaacaggcctgcagcctagacagttatctcaaccaattttccctttgcataagcacccccaatctttatgtgattatcttgagcctcttcactcacttggcttgggaaggagaagaatcgctcctcacaataaatgctgcattttgataattcattctcttctcttccctagtctttctgcttaattatcagagacatgaattgggaatacaagggtgagggttagaggtagatgaactcttccaggagccacaagcaagctttggttgtgatatttgacttcaagtattttcagcaattttcagaatgtggggtacttggtgctttgttgtttttatctttgagcccttcgatgctgattctataatcacagaaaaattctcattctrtattcctttggcatcaaacaggttttagtttcaggtagcagaaaccactctatctagtttttggggaaagtgatcaaatgcaggaactaatgcttcacaaaatgctggggtatttcctttgcgtttggaaataagacaaagattctctattttaccatgactgttgtttaacataggattggaagtcctgaccaatgctataagataagaaaaagaaataggctgggcacagtggctgacacttgtaatcccagcactttgggaggctaaagagggcagattgcttaagtctaggagttccacaccagtctgggcaacatggcaaaatcccatctctactaaaaatacaaaaaattaaccagcatggtggcacattcttgtagtcccagctacttgggaggctgaggtgtgaggatcacttgatcccagaaggtcaaggctgcagtgagctgtgatcacaccactgcactccagtctgggcaacagagagagaccctcactcaaaaaacaaaagaaaaataaattagaactgtaagaattgtaagggtagaaatagaactattattgtttgtagattacataatcatctacttgaaaataaaacaatagaaccaagagatataccattaggatactcaacagtgttgcctgatacaagctaaataataacatttaatagcaatgacaattatgaatttgaatcatagagaagatagcactcacaatagcaagaaaatctatacagcatctaagaaataaatatgttaactggccgggcacggtggctcacgcctgtaatcccaacactttgggaggccgaggcgggtggatcacgaggtcaggagatcgagaccatcctggctaacacggtgaaaccccgtctctactaaatatacaaaaaattagctgggcgtagtggcaggcgactgtattcccagctactcgggaggctgargcaggagaatggcgggaacccagggggcagagcttgcagtgagccaagatcgcgccattgcactccagccggggtgacagagcgagactccgtctcaaaaaaaaaaaaaagttaaccaagagtacacaagacctctgtggagaaaatgttcaaactctaataaaaggtctagaaaatattttgaatatgtagatacatattctaggctcctggataaggtgaacttataaggatataaattctctccaaattaatcagtaaattcaaagtctagtagaattcttttaaataaatgacataaacttatttatatcttaaagggacaactttgatttctagcaatacaacaggctaaataattcagaacaaaacagcctaatataaacaacaaaagataatagagaaaatatttttgaaagcatcaaatatcacacaagataatatagaatcagcaaatcataatttaaaggaaagcagaaatccagaaaggtaagcaggattgaattcggtcttgtcctgagggcatcctaactgattgatcttgtgctttgggttttaatgtctcagagggcaaggggaacagaagccaaatcacagttcatcctaaaatgaggagtctaataagggaccaacacctataaaaccaaaaccctctgaccccaaagggctaaatattcctctaaggttgaaataaatataaatctgttcaatatttcgactcccagaaacctaaaaagaaaattgtcttgggactgagaaaagtaaaataaatacatttaatattgctgattaatttaatattgatgaaataaattcaagattgttgttgatatccatctgcttatcatcactcagattttgagccaaattcccactgattgaacggaaaaaaaaaaaaaaaactcaagctgtaaatttagtataaagtcataccatatttgtagtatatttactcacctggcagaaacaaacacatatcctctctggattttatcctagatcttaagaaacctaacaaataattatctaagcaatgagcaacaaatcatagtaaataaataaataaataaataaccaaagaaacagagcaggagaaacaaaagccagcagaaacaagtgatggcagaaacagacttgcagagaccccaaatacagaaatgatcaaatagaggctcaataactatacttacagagtttaaagaaataaaagacaattttaaacccagggtacagtaaattgtataaaaaaattgcaacagatttgaaaaatataaaattgaactttcagaaatgaaaatctagtaatagaaatttaaaacttaatgagtagccaggaaacattttattattgaggtatagcagcttaaaaattgttcacatatacatttataaagggtctcacaatctgagggaaacattttccactttttaatttcaaagcacacaaaaagtgttactccattggaaaggctatgaggatgacttctaatcttcgggactcaaatgcctcgggatagtcactcaaagcctttttttttttttttttttttttttttttttgagacaggatttctctctgtcacccaggctggagtgcaatggcatgatcatggctcactgcagctttgacctcctgggcttaagcaatccccctacctgagcagctgggactgcaggcgtgcaccaccacacccagttaattttttttttttaatagatagggtttccccacattgcccaggctagtctcaaacccctgggttcaagcaatctacttgcctcagcctcccaaagtgctgggattacaggcatcagccactgcacctggccccacacaaagcctctaaatacaccctcttaaggtagatgactagtgaggtcatgtaggttgcaaataaagacaggccaaaacatgctcaggctcagataaagttatgggttatgtgatacatgtggctaattattggaaagggggaaagggacctgaattcattcttaagtttttgaggtcagtttttcggaaacagtgtggggttgtgtcaaggacattagggagcaaaaaaaaaaaagaaaagaaaatgagagacagaaacaaaaacctttaatgggtgaatttaacaggaaatgtagcagatctgaagagataattaatgaaatgaaaaatagttcatgggagattatattcagtataacacggaaaaactgagagaggaaactctaaaaaagacatggaggctaaaagtgagaagatctagcataggacaaattggatccccagaaggaaaggaaaaaaagaaaagagttgggtagagaaaatattttaatcatgctgagacttagaaattcatacctagccatatcttggtgaaactgcagagcatcaaacacaaagactttaaaaggagccaagggtgggaagaactatattgttcaatcaaaatagactttaaaagtaaaagtattaccatggatagaagggaccacccagaagatagagtgattttaagtgtacatgttccttctaatacaaccttaaaatatacacagcaaaaatttgctgaactactacaagaaaaatacaaacagtcgtactgtcatcatgattgattttaacttggcattcattgtttattggtagaactagcaaaatttttttaaaaagattagtgagaatagagagtacctaaaacacacaatttgcaaacttaacctaataggattatatagaaccttgtgccaagtaattgcagatacacattatttcaagctcacaaggagcatctacaaaaattgactatatacctggctgtcaagcgagtcttgataatagtatatattgtctgactacaatgcaatcaagcttagactcaattttttaaaaacctagaaaatttgcatgttgaaaaattatgtaacatttctaaataatctgcgagtcaaaaaagaaaaagaagtaaaatggaaataagaaagtgattttaattgaataataaaaattttccaacagataaaatcttataggaaacagctaaaattaaatttaagtaaaatttatactcttaaatgagtacaatagaaaagaggaaaaactgatattaaagaggtaatatcatccttttgttgatagaagaaaacagcaaagtaagaccaaagaaagttcaagaagggaaatagtaaacatcagagcaaaaactaacatagtagatagctctaggattgttagcagtggtggatccatatgggtctgcagcaacttgattcttgcctcctcaaaggaaataatttacctaaggggtataaggtagagtgagagaccaaggcaagtttttgaacaggaatgagagcaggagtgaaaggaagaaagtatacttggaagagggccaagcgggcaacttaagagatccaagtgcctcatccaacccttcacttggggtttttatacattggcctggttctgaggtttgcatctctccttccttgatttttccttaaggtgggatttccacatgtgcagtggcctgccagcacttgggaggggctgcatatgcaatgtgtttattgaagttttgtgtgtgctcacttgaggcatttttcccttaccagttgagcattcctagaggaaggtcatataccagttaaactccaccattttgcctcttagtatgcatgctcgggcccactcacccaactcctgagaccttatcgggaagctgctgatcttgtttcaggtgttttctatctgttgggagcctgcctgtccctggcatcagctgcaaccaattactattttagtgagacagcttaacaatcacctggccatcacctgatcatctgatggttgcctgagattcatggaagcagcggcggggtgggtgcctcttttgccctgttcatgtctgccaaactacctactctaacattcccgacccaattctttgggaaaatggacaaaggtcagtcttctgtaactgcttcctgctgacagaaggacggtgatgattgttctgtgggtcttggcgtcttgctgtcagggcagggtggctttgtgggttggtgaaagtggtatccagcaaggtccaagggagacaggggcaggatttcgcttctttcatgtctcactgatgggcagtctagtggtcctctgtagaagtgtgactcttgaatattgagacgatggtatctctcactgaggatcatctgaagcttgatggcctgaaggtgtgaggagacaaatcgggttgctagatttagaagacatggcccaaaacggagcaaaagtaggagactaacaagtgggcctaaaaggggaataactcaggagaagcattttcagcttccttcccaatctaaccaaccctgagaggcttgttccagtaaactggaggctcaatttaggagttgtctgatattgtacttttcctgattgattgacccataagcaaaatttttcacctaaggctaaacaagtttctctctgtgctgctgttaacttgtctaactcctgataattttggaggactatagctgccaaagagtcaatttgttcttgcacagttgttaaggttttagccgtagcatcaatgttcttggctatttcccttgagggctggctatgggtcaaggaggcttttgtgattctagcaattctggttcccatactggctataataccaagtcctgtgagaaggagaattaattggatagccctcctcatcctggaaaagatggaatgcctgtagattggtgctggaagagagagattgccagggactatgaagatgtctagggatacatagcctatggtacaagttccagtccggttagtggggaggcactggtgaactggctggccacaaatatagaaggctccttgggttttaagataagtagagatgtaaaaatgaaacaagggggtgaggacagctccaagaaatgccaaggctgccaacacacccaggtagctggtggctatagtcatgcctgctaagacttatgtgcatgggctttggttctgtttagttcccttggttttattttcctaaaaaagagaattttgagtctggtccaatagaacccattcttctgtagaaatgagattggcaatttgcaggcattggttgtatcagcaggccggaaccagaaattttgaatactgcaggagcttgggtgtccctggcaaaactgggtggatttatccagcaaagttcccagaggaaaggtaatatttgaaggtttgggaaatcttgtgtgatggtagaattagttgtgggtgtacgtttggcaagttcgttggttaggatctacagtgagagtaacattgctaactgtactggaaagagccccaacatccattccatttttcttattggccgtaatgcaaataggggctagtcccattaaagtggtattagaaaagatggatccaaaattgggaggttctttgcagatatcagggaaatcttgctttacttttgcaagaaggctatttgcaggcccaaacatctcccattagcctcccattgatagaaaatatgcagttctgcctttatacttgtccaatctcttggtgaggctgaataagctctccctgccgttttagcagaagagctggtacataaccagcaattggtggagtaaggggatcctgtgctttggagcagttactgagctttttccaataatgggaaatcaggatggtagtgtcctgctagtaaaggggtgagattgagaaccaactggagcaggcccatagcaacctaaggtgactgtgaagagagaaactggtcacaaagaaagctgccactggaaggcctagtggtgtacaagttagggttaaaatagtgataataatcagagcaattgcaagtaagatttctaatattaagatcatcttactctgaagagaaaggatgttgaggggcattacttatcttttcacttaaagaggaatcacagattttccagtgcctctcaagtgtgttctggagctgagggcattgcttccagatctggtgttttggagcctttccatggcttcactcaggtgtgatgtatccaactgacaatctctgatactttaatggctctaagggtgaagaggccccttcggactggagttagttgggaattcagagttccatctctccaagctttaataagaactagtgagcctggaggatacagaggctggtatttttccccttctgattttggctttctttgtaaccaaaattcctggagagcctgttggaaacctgctaaagaagagacacagtaggtgattttggcagttttttcatctagcattaagtctgaatataggaatggcttaccatataaggcctcaaaggggattaattgcaagggagtctgaggggcaatatggatccaaagtggggctaagagtaagaggtccacccatggctgtgctgttttctgacagagtttattgagtatgtgttcgagggtttctttagttctttccacttttcctgaaggttgtgatcaccaggcaaagtgaaggtacatttatgcttactaacggccctactaacctgttgagttacttaggaaataaaggatggaccattgtcactttgcaatgacctgggtagctcaaaccaggaaatgcrttcctttaggaggaatttagctacctcctgtgccttctcagtctttgtggagcaggcttctacccattttgtgaaggtatctacacagaccaagaggtacttttacctgaagcctgcagggagatgagtgaagtccatttgccagtcctccccagggtatgtacttctcctctggattggacttattaatggagggggcttccctctctgggaattatttatggtacatagggtataggcttgacaaacctgttgaatggttttgtttagtcccttcccactgaacacttatttacaaatttgtcctagactgtcctttgcaaggtggaagaagttgtaaaaactcttaatgactttccattgggaggttccatttttggacccatcttttctaatatcactttaatgggaatagcccctatttgcattatggctgagaagaaaaatggaatagatataggggctcttcccagtacggtttgcagtgtgactctcactgtagaccctaaccaacaaacttaccaaacatacacccacaaccaattctgccatcaaccaagattccccacacttttctccatctacctgccaatttcttcatctctcctccaatttctccatctacctcccaatggaaagcttttccctgggaggctttccattgggaggtagatggaaaaattcttccaatctgtaccatccactggtttcttctttatacccatgttggctggaccaatctatttcttccttagtgtattggagaaagggcagttcactggggagagagaggaacaagtctcccatgaaggtatcatttgacatggctgcctcttcagcatttttgtcagctaacctgtttccccatgtagtttaatagaagcccctgtggtgtccttcacaatgctctactgccacttcctggggcaaatgagcagcctccagtagctctaagacttgagacccatacttaataggagcatcctgagctgttaggtaccttctttccttccagatagccatgtgggcatgaagcaccaagaaggcatatttggaatctgtatagatggttattctttttctttcccctagttttagggctctggttagtgtgatgaattcggctagttgcactgaggtccctggggacagagctttagtctctacaacttggtgatgggactctgtagcataccctgcatatctagttccatccctgacgaagctackgccatctgaaaaccatattttgtctggattatctatgggctgatcctttaagtcttcccagctggcataaattttgttaagaatctcacagcatgaatatgttgagttatcatctcctggtagtggcagtaagagggctgggttaatggtggaacactgctcaactgttacctgtgggttttccaacaacaagacttggtactttatcaatgtgttgtcagtgagccattatggtccttttaaattcaataaagggtctatttggtgggacattaggagccagattgattgtcccattgtgataytgaagtcctcctcgagaataagggctgctgtacccactaccttgaggcaatgtggccaccattgtgctgctgggtctaggttctttgaaaartaacctacagcatgtttgactggcccaaaggtttcagttagaactcctagtgctataccttgccttttcagtgatgaaaaactgaaatggtttggttagtatgggtagctcaagggctggggcttgtgagagggcagtttttaactacctaaaggcttgctcctgattcttttcccagagattgtgtccctattagtcccttcttttaaagcctgatataaggatttaataattccaccacattccagtatccaaagtctgcagtatcttgtgatccccagaaaagctcaaaattgcttttgggtggttggtgtagtattctaaggattgcctgtatctattctgcagaaagcttgtgttctttgaggctcatgattatccccaggtattggattgcttgtcttagtagctgtgtcttggccttggacactttgtaccttctgtctgcaaggaaatttagatgttggattcctaactctcttgttggggagcagattaacaggtcatccatgtactgtaggagatgccctcccatataaagacttaggtcctgcaaatatctagccaaggcttgcccaaacaaatggggactatctctgaaaccttgtggaagcactgtccaggtgagctgttaacttcttcctttttcattctccaactccaatacaaatataaattgggaggatgggtctagggggatacagaagaaatttttgaagtctaagaccgaaaaccactgagcatctggaaatcttctagaattacataaaggttggggaccattgggtgtattcggactactgcctcatttatgactcacagattctggactaacctgtattctccgttagtctttttaacagttaagataggggtgttatagggtgagttacaggatattaatccatgtgttagaaatttttaaatcaggggctgaagtccctctttggcctccaactgaagaggaaactgccctctgcaaggataactagaaggatccttgagctgaattgctataggcatggccattacagcctttcctggtattcctggggcccagacctctggattaattggaaggtctgtgggcagttcatccttgtgtgtggtttccttgaggaataagattgcatttggaaaagggggtgttggccctggaggaaaggttaactgaactcctagtctaaacaaaatgtctctacccaaaagaggcataggacattctggcatcactaaaaatgaatgagaaaataccatttatccccacaggcagcaccaagaaggagcaaacctctatattatgggcaccccatttacccccattgcctggcaggatttgaggataattgcccagaaaaagaggtaagcactgagcaggcagctcctttgtccaaaagaaaccttacagtcatacctgccgtgtccaaagcagcccttagcttcatcccctcaatagtgatgttcaatccaggagctggccagaccatagggccccttcagctcaaggtcatcaggggttgggattctgtcccaggggccctttggccctcagagaagtctcagatccagtggctgagcttgtggcagaggggcaagccatgcggggctttttcccatctgctccactggggctgtttgccttccagtggcctgacttctcacaccaatgtcagttatctgggagggttgtctgagggcaacctggagggggctaatggacccgtagagcagccaatagttggagctccctcttttcctttcacttctccttttcctgaacactttcctcttcctcctggtcctggttgtaaaagactgaggaagctattttgagggtgtcaggcataggggtgttgggacccagtgctagtttctggagtttcttccaaatcatctggggctgcctgagttaggaartggtcctttaggaccagttgcccttctggtgtctctgggtctaggttagtatatctcattagggcctcttgtagcctccctaggaaagcagaggaggtttcaagaaggccttgatctattaaggccaatttattgtagttcacaggctttgttctgctagctttcattccttctaccagatagaggaatatgtggttccttgtccacatgccccactaggtattgtaatcccaaaagaggtccacctgagaaactgttgtgccccctacccgcccccacccccagagtaggcaccagggtcagtcatatgcattgcatttgcaaattattgggccacttccttaatggagtcacgttctcccttagacagagtttgccctagtatgactgagaggtccctccaggtgagtttaaatgttaagcctaccttgtggaaccctttcatgtatttgtcagggtcttccataaacttacctagttccattttaatttggctcaggtattgcatagtgaatggagtttggaccctagtggctctactggggctgctaacctcttgaagcggcataacttaagggggtggtgtccagaggatggccctggttagggaaggaaatgagccagggctgggagacttggatataatagggtagaaggggagtttgagctaagctctgcccttggtttctctggggcttgagccctggataaacacaataatggtctcccaaaccaaccagagggggctgcctgactgtggctgctatcattgctggatccattttacaagcctgacaaaggtcagggttgtttcttaggactatgaaggcctgtacataggagatttttgcccaatttccctgctgccagcaaaacaaatccagtcaatagatcatattaaaatttatgatctcattttctggccaagattcctggtccctgagcttggattcaacccaggctatattacagaaaaatgttagccttttcttttttagagtttgggggtcaaacttttcccagttcttgaggatgcatctaggggtgtgtcctgtcatatggagaggcaattacccatctgtgaagagagaacagaggagaaaaaaagaaaaaaagaatgcattccctcttattcccctatcatcctttcctaaacattgcatcccccaattcgtccttacagttccaaaataaaccagtctcaccaagtacccctaaccttggtcccatctcatcatgattacccacttgagaacaaaggagatactggagtaaacagggggccccttcttcatccttggggtccagaatgaactggtcttattgggaacccctaaccttgctttccttcatccctattctaatggtaatctgtgcctatagcttgggaccagccttcatctctgtcctatgagtacttttgtctgttgtgcctgaagccttgggctggctcatatctgtctctatgaccttatggtgacctcacttggagcattctagcaacaaaatgattatttcttttctgatattcctattttggggggcataaaatttgaataaactttaatgaaaaaggcaaattaaatgtaaaaacattgaaattattcttcaggctttcaaagaagttgttgggttttttaaaattatactttaagttctggggtacatgtacagaatgttcaggtttgttacataggtatacatgtgccatggtggtttggtgcacccatcaacccatcatctacattaggtatttctcctaatgctatccctcccctagtctccaccccctgacaggccccggtgtgtgatgttccccgccctgtgtccatgtgttctcattgttcagctcccacttatgagtgagaatatgcagtgtttgattttctgttcctgtgttagtttgctgagaatgatgtgctttaagtagacgggaagactggttctcagccaacggctgcaaggggttggactttcctcccttcaaatatggccttgaaggtccttatacctattgagaagaatctggaagtgatcagaagaatggggaaaattttgtatttggggttccttatcctcccggggtaacatggagaacaaatgcttcaacaggcaagataatccctctgctacaggaggaaatgggaagaagcaagaagaattcccacggaaagccttcatgtgcttgcaaaaccagcagcccttggattcaaaagggcagcattttttgccttcttaacataaaggaggaatctccagaggacttggggcttggaagaataagggtttgcaaatggcaaaggaagaattttccttcctccctaaggattgcttactcaaaaaaaaaaaaaaaaaaaargtgggggggcagtggtagtaggtggggtccttaaaaagccacagagtgagatcctatgcagtggataaacagcatcaaaagacaccaaaaaacttggccctggagcatagcataaacgaaatgcatatggtaagtcataaggagctggcaragtcagggttctggtaagtgtctgtcctaraaatgagccaacagacatccacaaggaagcccatttctttgctgctatgcaaacagcaagagcttcaggcatataaataacaaactgggagtgtgtgtttaaggcagagtaggaagtcgtgtggcatgcaaagtgaaagcggggaaaaggcagacttgccccctggtgggtacgcaagaccatttcagaattcacagagagaaaacagaataggtggtgttggttttaggaaaaaagccaattttagtaggaaaaagagaggaaaccccagacattgcacagtcttaggctttagccctacccctctcatgagcctcctatccaggagagctgttattgtctcaggtctacttggtgcagtctccaaggttttattcacccctgtgagccaccatcagggccagctgagagatcagctatggggaccagagctactgtgactgagaggaaccattttgggggttagttaataagcaggagaatgaaaggggagaaggaaaccatgtatgggtatgggggttggatgcctccagcctaagaaggcaaggcatagagatgtcttaccagtagagaatatatccaagtcatggtagcaaagtatttttgcactggcaaatctgtacagctctacaacagctcaattcttgcctcctcaaaggaaagaattcatcttacttgtataaggcagagtgagagactgaggcaagttttttagcaggagtgagagtttatttaagttttagagcaggaatgaaaggaagtaaagtacacttggaagagggtcaagtgggtgacttaagagatccaaatgcctcatgtgacctttgacttggggttttaatacattggtatgattctggggtttgcatttcttctcccctgattcttcccttggggtaggctgtccacatgcacagtggcctgccagcacttgggaggggccgcatgtgcagtgtgtttactgaagttgttcacatgctcacttgaggtgtttttcccttaccaatcgagtggcaggttatataccagttaaactctgccattttacctcttagtgcgcatgcttggacccactcacccaagccaagatcctgagatcttatcaggaagctgctgatcaccagcttcaggtagtttctatctattgggagactggctttctctggtgccagctgcatccaattattattttagtgagacagtttaataaccacctgaccatcacctcatggtcacctgacattcctggtggtgggcagtgggagggggaggctctccttccctgcacatgtctgcctaactacctactctaaccccaataccggaatcccaacatgaaccccaacatcctcacttcctggtattcatgcccttgcatatccccctacaacatcaaatagggctgacctgtttaaccaataggatactctagaaatgatgatgtgtgattgtcaaggtcagatcatacaataacgctaccatttccaccttgctcccagaaagaatgtgttatgataaacatttctgattatttttagctgctaagttccaaagtaatttgctacgataaccagtacaattaatgaaatagaaaatgaacatataatggagtgattcaacaaaccttaaaagttcattctttaaaaagattgataaaaactaatacccctgtgatgagacaatgaagaaaaataatggctcaaatatccaattttagaaatgaaaactaaaacatgtagatgctatagacagagagggaaagaggagtcaatgaatcattttatgccaacaaatttgaaaatttaatgaaatggacaaacttctagaaaaaatatatcatactctattaattagggtaagacgaaattactataacacatagaacagaaatatagtagcttaaaaatcatggatgtttatttctctctcatctaacagttcttgtgagagttattagtaggggagtttctcttgagggggtcattcagagaccccactcatcaaatccttcaggaaagagaaggcacactcagaacggctattgagggaagttctttaaggggactattgatgtaaggatgggaaaactaagggaaattaacaagacacaatacaatactccagtgctagcaatgggatagaagaggtggggtgaggggaaggccaggagctcttaccatctctaggtttgaaggaataaggagtggaagcagatactggcacaagaagagggtagacaaagtggagactctcccagtagatgctgtggccattggtagaaggatgaagccaacctgtgacagctcagcacagagggcatggagggaatagatatcctgacttaacttattccaccctttgaactagaagccagaaggcaagggagctattggtggagttcataatgcctccagggacggagcattgagggggctgcatagagagtgaatcttgagcagtgagtggctctttcatattgctaaccattcctaggtgactgcggttatctgcatggttgaatctaggtcactactgtgtctgtgttctgtcaaagtggaagaagaaagactagagggaatgtaaagaagtacccaatgtcttaaggcccaggaccagcaatggtactcagcacttcaaattcccttctaatggtaaaatctagccacctggccatacccaactaattgcaaaaaagaaatgggtaatgtcaaatgactggagagacatgttcaaggaaaaagaaaataaattttagtgagcaattagcaatctgtgcctgccatttggccaccaaatagccatctgcacccttctctcacacattgactccctcatccctcaccaagggataaaaccccaacccccatccaatttctgcacccacttcaaagtacagtatctccaggtgatgttctgacctccacgttaggtccactagggctgcatgaggaaggctagaaaacaaaattattatccaccaacacatctagattacaatctagagtgtgatcagagtaactataataagcagtcttaggaaaagaaaggaagaagggaatacacttaatagtcactgaaaagttgtttcttttcttttcacattgcatagcaatgagattattattccaccagagaggaagtgagatggtcccctgtcctgaccatggtgtacttccccatgttctttatgatttcaaattttgccctttggaaattcttcctagtctgttatgctttaaggccacctctgaagtgggtcttgaaaagaccatgtaattttagtatccatttcctacaggtataggtctgagagtctgaggacattttcaggccatgcttctggttgcttttgaaatatcaataccttagaaacttgataggcttctgggtctgtttggttccatgtgccagcaatgtcacccagatttcatttcagagcatggtgttaaagccaactttacttcctggttaccatgacccatttccctctctcatttaaatgctgtctcttttgaggccatcagaatatatgggcaagaagaagcaacacctttaatataatctcccatgactagttttcctaatttggaggcattgggaagggctgtgagccataacaatcttacctcctggtgttaaggacatagcaccatatttctagacattctctgtagctttttcctttatacctgctagttctctctctctctctctctctctctctctctctctctctctctctctcttttttttttttgagacagagtctcactctgtcaccctaggtggagtgcagtggcgtgatctcagctcactgcagcctccgcctcttgggttcaagcaattcttctgcctcagcctcctgagtagctgggattacaagcacacaccatcacacctggataatttttgtatttttagtagagacaaggtttcaccatgttggccaggctggtctcaaactcctggcatcagatgaccagcccacattggcctcccaaagtactgggattacaggcatgagccaccatgcctattctactagttctcatttgaaaacacaatttttcttttactgacctctgctaaaagcatcaaggaatggccaacacacatcaacattctggttgctctctgggtaaatgatcaatctttcaagttactgccagagagagttttacaaaatattttgtgatgacagtacaagagtccccatttttgcagcctgtgtgtgaaatctgtttcctcagttctgctctaacgacgtatttatctaggttcaagtttctatatttttaaggtcatgctaagctgttgtaatgaagactccaaatatagtggcttacaggacgtagacattgctggaaggtagtgcatcacagtgggtaaaagcacagatttgggagtccaattttctggatttgaatcccagttcagtcacttactaactgtgcaaatctggccttctctgagcctcagtttaaaaaaaaaattaggtaataatagttactactaccttcagctggtaataaatctttaaaattgaggtaataatattacctagcattggtaagaatattaaaagagttaatacatataacatttagagttaatgtatgttatatgacaatgccatagaagtatctgctaatttttttagaacatttatattctctttcacataagagatctcagataattattccaaatcagtgtgaaaattctgatacttcaggggactaagagctttccattgagttgcttacactctatggggcattgtcattagcttcctgatcaaaattcgctcaccttcacatcagattccagccatggaaagaagaaagagaggatgagaaaacaygtcaaatatctttgggcccaatttggaaatggcacaaactacctccactgacattctattgataagagaatagttatacaattatagctaattggaaggaagctggaaaatttagtttagctggtggtatggtttagctgtgtccccacccaaatctcatcttgaattgtaatccctataattcccaagtgtcaaggaaaggatcagtgggaggtgattggctcatgggggcaggttcccccatgctgttcttgtgatagtgtgtgagttctcatgagatcttatggttttataaggcagttttccctgctcttgttcacactctctcctgctgccttgtgaagaaggtgcctgcttccccctctgccataattgtaagtttcctgaggcttccccagccatgcagaactgtgagtcaattaaacctcttccctttataaattacccagtcttgggtctttctttcttttctttcttttctttcttttctttcctttctttcccttctttcctttctttcgctttcttttccttccttccttcctttcattcattcattcattcattcattttgagacagagacagagtctcactctgtcccccagactagagtgcactggtgtgatctcagctcactgcaacctccgcctcccgggttcaagcaattctcctgcctcagcctcccgagtagctgggattacaggcgcacaccaccacactgggctaatttttgtatatttagtagagacagggttttaccacttttggccaggctagtcttgaactcctgacttcagatgatccacccaccttggcttcccaaagtgttgggattacaaacgtaagccacggcacccagcctcaggtatgtctttatagcagtgtgagaatggactaatacagctgggtagcctcttgccaagaacggaaggattttggtaggcagttagtacattctactacagttccttaaactgactcgaaaagagcttggaatgtattataattctataatgattgaggaaattaagttagtgaattagtataaaatatctttatattaaaagaaactaaaaagtcaaaacaatgaaaggtctataaacattgaaatggataaataaattatagtagattcatacaatgaaatatggacagcaatttatcccacaactagagatacatgctaacaacatgtatgcattttacaaataatgttgagctaaagaaaacaaaagcaattcatgtagtatgattttgttgtgggggaattccaaaataaaaatcaaacaatgttgtttgaagatgcatacctaggaggttaaactagagagaacagaaaggtgatgattatcataagagttaggacatttgttgcttcagggaaagctgtcaagggaaggtacaggggaggcttctgggttgttagtaatattatattttaacctggatggtgatttacattggtgtttgttttataactgtcctatagaaggatatatgtattttatacactctcaggtatatatgatgtatgtcacaattttctaatggatatgagagagcaaagtcagcttcaaaaaataaagggcaagggtaggcctaataataaattagtttagtatttgtgcaagaaaaaacaaatagaccaattgaacagaagagagatctcagaaaacaacatatttatgtatgcagaattaatataagataaagttagcagcaccagtcaatagggaaaggatgttttgtttaggagatggcattgggagaatggtctcactctaaggaaacaaaactatatcttatccaacatctctagataactacctaagaaaggtggactctggatgggttaaagatcttaaggtgaaggataactcttagttaatagaaggcaataaaggagagtatctttatgacctaaaggtagggaagaacttctgaaacaaaatttaaaaagcattaaccctaagactaaaaaacctgattgaatttgaatcatcaaaattaaggatttccactccttgaaaaacaccatggcaaagataaactgacaaggtattagtaagtagactatattaggaactcttaaaaataacgaagtggggataataaccccaaggaataacagacaaatggtgtgaagaagcaatttacagaagagggggaaaaatgacacacatgaaagatgctcagaatcctagtaatcagagacgtgccaattgaagcagcacttttaaattactttatacctattagactagcaaagaattaaaaggcttgatattgccaagtgttgatgaggaggcggggatgtaggggaccttatgcatcattggtggcagagtagatagttgtacccgtgacagttaagatccagagctcaaggaaccacaagaactgtaggctccagagccactcctgcagccacaggcctccctgcaaaacagatgcttgcaatattgcctctttcctcagttatttctaaatttaattttgctcaagtcctggctaacttagatacaaaattacatcctatactctggcttcaaggcagttgaaggaatatagcctttagtttctatctctgcagggcaggtatgcacactagaagagtgaggtccaaccccccagttggggttcaggaactggtattttataaaaactccatacattattctaatgtatgagccgatatttaacaacacttcaccaaaaggatgctggaaaagagcttgaaggtcctgatttagtgtcctcactacacatcacagaagtaagacctaggtgcacactaagtattattgatgtgttcatgtttcattgtcacaatacagcagaaatttgtctacagcaagaaaacaaatcatttactttttgccaaagttcatttttattgtgcaatgagattttctagaagagtgattcactagaaatgtaaatgaccatattagcacagccaagggcaagtcatccaactgagggaaaccaagaggaatgtwcttaagcagaagcagagaatgtaatgaaaatttttaacatattcagtttcatattctgtctaacagatgtatcagaaaaagctcagtcctttagggatgactttgggaaatggtgaatgaataggtatcacatacttgtgttcatcaagctccaggctttgcataccagaggagttctgtggtttctgacagctaactggtgaatcacataaaccatagaatgtaattgattctatcaagaagtaaaatcaaatgaagtatagatggagcattctgtggactgctatcaattttctctaaagaaaaaaagaattggcttctgccatgaatctgaagattgtctgtgggtaaaatgcaaatggaaagtaaattgttcatgaatgaattctagaaaagcccactggtattcatagagagagaaagtaaatatctatatagaaattttgggaataataaagtcagatgtgccctactattaataggtttaaacattttgatcatttccctatctttatcttgctttactcactactttccaggacttttcctaccaggcactgtcaataaatcatgtgcttctgaattcctctgtctcccattctagggaaccagacagacatcaaatatgtatctaagttgcccaagacaggagccagatactcactttatcagcctttgtggtacactggacaactgttttccatatattccatttctcttcttgctgtgccactcttagtgggctgagtatacatctctgtgttattaaactcaggaatggccatgtgacttagtttggccaatgaaatactggtagaagtaacacagatcactttcagatagaaattttaagagccactgtagttcactgtgtctcttttctctttgcccccagactggtaatgttgtagatatagcttgctctgccagactggaccctggattagtgataatcagaagcagagccagagctaacttgcaatggacaagtagcatgagcaataaatgttaaacataaacagtaaaccattgctgttaccagcctctgttgcagcatgctgcagtagttcattctttttcatttgctgtgtgtggtatttcattgtatgaatatttcacaatttatccattccactattgatagacacttatatttatccaagtttttgtacattatgaataaactgcaatgaattttcttgtaaaatgtattttaatgcatgtatgtaaacatttcttttgactatatagaattggaattactgattaataaatcacatatatgtgcagcttttgcaagtactgtcaagcagttttccaaagtggttgtagcagcatactccttcacgaataatgttggagagttctasttgcttcatttctttgccagcacttaataatattagttttccttctttaacttttaactatttggattgttatgtaagaatatctcattgtggttttatttgcatttcttagataactaatggagttgaacactttgtcttatggttgttggccagttggaatccttgtttgtgcagtgaatatttaacattttgttcatttaagaaattaggttgacattatttttcttattgatttgtaggtatgaatcctttgtgcatacatgtattgaaaatatattctattttttagagtctttttcttaatcacttctgttgatgaacagaaagtctgcaattttaatgaaatctaacatcaatatttttgtttatgaatgttgctttgaatatcctcttttaaaaatctttatgtaccccaaaattatgaaatatgcttccttgtgawcttataaaatatttatagttatttttcacatttagatttttcatccacccagaatatacttttggttgtcctgtgagtaggaatcaagattcattttggccatatgtatatccaatatatacagcatcattttattgaaaagaaaatcttttccccactcattgcagtggcactttatcataaataaggtaaccatttatgtgttggtctacatctggacctttttttttttttttttgagatggagtttcactcttgttgcacaggctggagtgcagtggcacgatctcggctcagtgcaacctctgccttctggtttcaggcgattctctggcctcagcctcctgagtagctgagattacaggcgcccaccaccacgcccagctaatttttgtatttttagtagagatggggtttcaccatgttggccaggctggtctctaactcctgacctcgtgatccacccgccttagcttcccaaagtgctgggattacaggcgtaagccaccgcgcctggcctatatctggactttttgttctgttccgttggattatttgtcagtcattcaacaaaatcacagcgttttaattataatagatttataataaaccttgatttttggtattaaaatcccccaaatttgttcttcctcaaaattttttatggatattcttaactcttygtattttcacttaaatttagagtcagattgccaatttgtacaaaacctttctaggatttgtgttggaattttattgagctccttatagatcaatgcggggagaatgtacatcattaaattgccacctttccaagatctgaagttggtatatgtgtctctttaaatgtttagtttctgttagtgaagttgtagattttcgtgtagagattttgaacatcttctgttacatcctaagagtttagcagttctgatgctcttgtagatagtatcttcttaaaatttcattttctaattgtttgttactacacaagaacaaatgattctgtatactgactctatagctagctaccttagtaaatttatgtttttattttaaagtttatctgtagagtctttcgtatcatctacataccaagcacattgtctgtaaataatgagtgttctagatcttcttttccagccttgacatctcctctttctttttcttacctttagtttaatattgggcataagggataatcacaaatgtctttgttcctttctcaatcaccagggaaagctttcaaattctcatcgagtgtgaaaattgctgtaactttttctctttggcaaaatattcttcacctgattaagaaatttgcattctctttctagtttactaaaaatgtttttaattgtaaatgagtgttggatttttaaaatactttttctgcatctattgagatcatcatttttcccctttattctgttaattatatgttgatttaaaacttcaagccaaactcccatatggtgtataaaccttacttgattatgatattattatgtttttataattgtggacttacttgactaatattttaagatattaatgtccatgttcataataaagattggcctgtaattttaatttcccttttttgtaattaattgtcaggttttagtatcaaggttatattcacctggtgaaagacttgagagttatttcttctttttttattctccaaaagttagtgtaaaatttagcattttttcttccttaagtgtttggaataattcacttatgaagctacctgggactaaagatttctttaaggggrattttaaagtatagattacatttatttaaagaatatagaaatattacaattaaatgtttctgcttgtgtatgctttgataaatttagcaattcattcttttcatttaaatttgcagatttagtggaataaagtagttcataatatccttttgttacatatttaggatctgcggtaatatcctctttatttctcacatttagaatttgttttctttcycattttctttctgtcagtcttaccacagttttatatctttcattagtcttttcaataatcaacttttgaatgttttgtcctaagtttttattgtagtaaatttcacatagtataaaattcatcatttaaccattcaatgacatacaattcaatggcattaagtatgttcacaatattgttcaaccatcaccatgatcttgcgccagaatatttttcaccatctcagaaggaaacctatgtgcattaagtagttattccccatcctcctctcccctgcagttcctgacaactactaatctgctttctgtctttatggatttgccttttctggctatttcatgtaaatggaatcctataatatgctgccttttgtgtttggcttctttcacttagcataatgatttcaaggtgcatctatgttgtggcatgtattaggactttattctttttttataactgaatgacacttcatacaatggatagtctctcttcaagtttgttttttatttcattgattgctgattttatcttcatttccatccttctcctttctttggatttttaagctttttgagatgtgtgcttagacaattgaagtgaagtgacatagttctgttagctttcccttttcgtactttcagtttctgtttttaggtgcacgtcagttttggtttgcccatatctagacatacaaacttagggctcctacacttcctaattggatgactttgtatgaatggggataatcgtattgatcctatctccttgtccagggtcttgtgagagaatgtaaggtaaaagcattttgtaaactaacttccagacttggatagtaccttgtactttgcactgccattgctttatatctgcatagtgctttcacaggtttttaaaaatttaatacagcaaacccacaggaattatctccattttacagatgttatttctgctactatagaattttcaggaagtgaccatgaatttagtatttaaagcccagggtttttgggtttttttttcttccagctttactatagctgcctcatgcagaatggtattattggcattcttagaacattggaatttcacactttcagaaacttgagaacattgcaacaactgccaacagggctcagcatcctctgcagatgaacaacaccaagtggtatagttacccaatcaatccttttgcacttctacaaaattaagcttggcaaacttggctctggctttctaccaattcattgacagtttttactgactactccgtgaattaggctttttgtgggaaaataaaagaatgggttgatgtgattgttaccaaatatatttaggaagaagtatttgaacatgtgcaaataaatacttagcacatgaggatcaagggaggaaaggaaagggattctaatagtcaaggtgagatctgagtttttaaagaagtttgctttttaaatgtttggttatacatttctggtgataaaaaaattctaagtttaaaacaccttcataacttctcataacatttaaaatcttcacatagcatggactcatactcttgtctgcacattttaacatgtgtgaaataggaaattattgtataattaatagtttcttagaattgtgttgtagattaattatagtttttcttttttagtagtacataaaataaaagaataatagatagttatgtatttaacactgatggcattacagtaaataaaatatggaacattaaagtattccagaggattctgtaataacttttaaacattcattcattcattcatgtattcaacaatatttattgagcacctagattttgttaggtgctgtaccaggcgttagagctataacaacaagcaaggcatttttatacaggcttctggtctagtgagaaaaacagtaccgtgataaagtattaacaatacagagtggcaggaataataaagaagcagcatggtgcaatgagacatatgagaatggtatccaagatttagacatcaggaaaaactagtagaaataaattgcaaacaggtgcctgaaggagcaggtaggatttgatcatgttaagaatggggactagtattcataccctcgtgtaattccttcaccttgagagaacagaatgaatacaacatggaaaaaatgatatgtcactttgaaaattaggttacaaagagatggtgacttccatctggcttgttaaaatgagatcacagtcctggccaatgcctgggctacgaccttgggaaagaccctgaggcagaggcaccaggtaagttgtagtcatactcctggcccacagaaagtgagaggtgataagtgtttgttgttataagctgacacatttcaggcttgtttgttacatgatggtagataactaatacatctgtagggaagtggggtggacgtaggtatgagagggattgcaaataggcatgaagaaatttggaggcaaaggatatatttattaccttgatgcctgtgatgttttcatgggtgaatatatatgycaaaacttattgatttatatataatgacatatattgaattataaacacatataattatatttatatattataaatgtgtgcagtttattgtatataaattatatctcaataaagacgtttgtattttaaaatggggaataaaaagcttatggaaagacagtgtttcaggcaaaagagcaaatgaaaacaaaagcccagagcaagagctccagaaaaagcagaccatttcaaagtgtgcattgacatgggaaacctttgctcttggatttgaaagagataagtaggttaagggaaggaaggaggacaagattggttgtgaaaagaggtaaaagagaacaaagagaacaaatagtcagtgacttcaaacaaataccatggatttttgtgcaagaaagaccacttgggttctttaaggcccataggacaactgggtcagaaaaggagagagtggcatctctagtctactcccaaaccatctttcaatccctgctcctcctgcctcctttatccccaaccccttgccattcatttgtactttccttccctttacaaatatttgagcatttactatgtgccagaaactgttctaggagttagagagaaggtagttagcaagttaaggtctgtgacctctaaaagtttacatgctagtaggggaaggcaggtggcattaagtaggaagatgatttcctatggagtgctgtgaagacagtggtgatagagtccttaacaccaggtatggcacagcctcaatcagtcagttcagtcccagctgaacaaaacactatttgggagaagaatcctagagaccctactgtgccaggaaataataccttggttgctagatcatggtaaagtgagggaggattccagggaagagagaatggtcagtattgtggaggacctcttggagggtctgaggaagtggttatttaacaaccactgtagaaatatgtcattattctaataaccagtaattctgtactggtgctaaccatttgatatcagcactgaggtcttagtaactggtgcagagagagggttcaggagaagagggtgtggaggaagtctactctagatggtaatattgggaaaggcctctcagaagaagtgacatttaagctatgacctgaatgaagagaaagagaaatgcaaggggtagttgggaagttaagtcagggggatgggaagaggattctagccaaagaatagcaaagacaatgatggtgaagtgcaataaacttggtgtgtgtaccgaatggtacaaaagctaatgttgctgcaacgttatgctgagtgaattataagaaattaggtcagatgataagcacagcccagatcttgtggggcctttcaggccacaataagaaaataaaatgagaagccacaagagggaggattttaagcatggaaatgatataatctgatttacatttttaaaggattacgtgggccttggtaagaagaatggatttgtggggagggtgattagggagagaacaatggagaatctgttctagcctggagatgatagcagcctgaaccagagtaatggcagtggaaatggggaaaattgggttgattcaagattatttgaaagttgtagtggtttcaaagagctatctatacattctttgatatgtgggctaggcatttttgcactgctataaacacctgaggctgggtaatttatataaaaaaagttttaattggttcatggttctgtaggctgtacaggaagcatggtgtcaacatctgctcaggttctggtgaggacctcaggaagcttaaaatcatgggggaaggtgatgggcatcactagcatgtcacatggcaagagagggagtgggggtggggggaggtgctatagtcttttaaacaaccaaatctcacgtgaactcagagcaagagaactcactcattaccatgaggatggcaccaagacaattcagagggatctgccaccatgacccaacacctcctaccctgtcccacctccaccattggggatcacatttcagcatgagatttggaggggacaaacatccaaaccatatcaatatgcctcaaggcatatgaaggggagcctcaaaaggtgaagtttaattcttctcaccttgaatgtaaactggagttagcagtttgcatctaacaaacagaatatgacagaagttaggggatgtcatttcagaagttaggttaataaaagattgtggcatccattttggaggcatgctatctcactctttcagattgctcattctagtgaaagtcagctaccttgttctgttgtagttctgtagagaggcccacgtatcaagggactgaagtatcaagggactgaagtctctaaagagctgtgtgagtaatcttggaggctgatctcacctccttcacccactccagttgagccttcagataagatggcaattcacactgacagctcagctgctaactcatgagagaccttgagccagaggtatctagctgtrccatgcctgaattcctgacccacagaaatgatgagataataaatgtttgttgtttttaatggtgagactttagtataatttgttatgcagcatacgataactaatacaaaatagagcctataggactgactgatctgtttggtgcaagagggtgtgaggaaaagagatggatgaaagaagatatgtagattttggacttgagcaactggatggtagtgatgccatttattgaagtgtgagtttgggcaggggggattaagagttttcctttggacacattttgaaaagactrttaaacaccccagtgggcatgtcaaccaggtagcctgctgggccctgcccaaattccttatgcactgtttatgagcataagaaaatgattgtttggtttagcagctaaccttgtgaaatatctccaatcttccattctcaccttaacccattctaatatggtttgtgttcttttgactcgtgtagaatttgttcttattaaaccacctattgtatccatgttatctaattcagtagttacttctctgccataagcatactcaactcatagccacattggacacagatcatcattccccctcttttcsaatactcttctcttttggattcattggttctacttcttaggtagattcttctgctccacctggtgttaaccagggtggcttagccagtggtattcagttggtggccaggctgtggtggctgggcttgtctaatagcccacttcattcatttctgcttccttggtgccgatggttaagaggttggcttcagctgaccactttccctctccatatgttcatggcctttcatgtgaatgctccagtggagtggtcaggttttttacatagtagctcaaggcttaagagcaagtgttcagaaggagcagagagagagggcagtagttacaatgtgaggccaaagaagcttccccccagaaarctaaaggtgataagtaaagcatgttggtattggctggcaatattccacaagagatgaaaggacagatattgcagaagagagaaggtataactgggaccaaaagccttgagaaggaaagagacatggagcaaatcattcacagtaacagcagacagcagagaagagasacatggttgtacagaggcacctcctttgggtctttactcaaatgccccattatcagtgagaacttctctgactgctrttcttcagcagagggtattccttatcccctttcttgctttatgtgttttctccataacatatgtgcatatccataacacacacatgcatcacctagagcattatatatgccacagtgacatgttttgctgatttctcaattgactccccccattggaatgaacgtaagcttgaggaagacgttttgtcctgttctgtagcatctagaacagcgcctggcacatagtaggtactcaataaatgccagctgcatgaggaaatgaatgagctgtgtgggggatgtacttgagtgaactctaaagtcagagtggtgttgagagaaaaatgcttgaaatccagatgttggaaggtgacacagagtagtagcctggtgagaacagttagatcttaggggttcctactacagccctcccttccgcacctttttggctgtcaccatgatcaagctactgaatctctctgagacgcaaggaccgggatggcacaaagtgagtgctcaccaaagcttgactgtcctttcccatggcaatttacttcagcttgtttgatttcccctccccgactggactaggcacctattctctgtcttctctctttacagttggaaggagcaaaatgggacttttggctgaaagtgctgagctcctgcggtgggggctgaccgcaagccrcgccttctgtgcacctggtcggcccagctagctgcsgacccggcggggaggggyggggcgggccaatcggcgctgccccagcagggctgcggctgcaggcaggcagagcctcctagcccgtcggtgtctgcgcccatcgatccctttgtctatccccgaccatggcgaagctgattgcgctcaccctcttggggatgggactggcactcttcaggaaccaccagtcttcttaccagtaagttgggttgtggtgagggctgcagccttcgtcctcctcactccctgccagctccacgagcccccagaaagttgggtccaggctgttaacagaacatttacaagcaggtgctagatgcacactctgcgggggtttcataaatgtttgtccagccgtcatgtgtcacttgaaaacaaactcttgctcatggcctgagacatgggataaggaggcaattgccaggggtgtgagtgcccaggttgtcagcatacacgaattaatttttcatgaagatttgtgtgccctggctacagattcacttctcaacctggaaagaaacaaactaacctggctgggggttctcctgatattttgtgtattagagaaaggagcccctgtcgcttctgcgccttgactgcctggccatggcaaaccttccaggcttgaagattctcaaattgaggctactgagggccacagcaaaactgcgtgtggacccgagcaggtggagctaacgtgtgctgtgatggttcgcttcagtgggggcaggcggggaagagggaaccctggagccagcatctgatgtcctggggtttagctctgccccatgagtatgcgatttgggcaaatcactttacatctctaaccttagctgcttcagtaaactggaaatagtaatacacactgcctgcgacagagtagctattcaataaatgttagttccctgcttccctttaaagtatttaataaagggttaagtgctatacaaggggggtggggatattttaagaatgtatcaaaagtttcataacttttaacaggagttcaaagtctacagatcatcctagtctctaaggcttagtcaacaatgccttatttactttaaagtaaaacctaataaaaattaaatataaaaaaattatatgagcttatggactaattagaagcttacattcagaatgggtttttactatttattgtggatgtttttctaatttttttaagttacagagtgcagaaaaaaagtaagaagcagttgktattcttggcttttaaatcatgtaaaaattacagtttgtgagtttttattaatcacagtgctggtggctgccaaaggagattataggtatagataaaaatatatagataaaggatgggttgctgagcctcctggagtgacccagacagaggaaggaagggaaattttacccactgttggaaacccctaaaacctagctactcaactgggtctggggaccagatgcctgagcatcacctaggggctccctgtacaggcagaatctcaagccctaccccacactattgaatcagaaccagcgtcatggaacaaactccctgggggattagagatcatgaatctgccccagggagagaaggcaagagatgatatcatgaggyctgcatcaggagcaagccaaatccccaggatagatgcatccttttttcttcagacttggagtgtatgtgtgtgcggctcacaggaagctatatatgcctgggctggagggaacttaaggaagcacacaagggatgcctcaagagatttctgagtttcccaggtgggagcagtacagagaaaagaactgagagagttcccctagaccacgagtctcccacccacgagtctcccacctttgtagtcggctgtatgtgccgcacaagtccagggaatgccttggatgatggtagaaacagctcccctcccctaccccaacttgggctatggaatgttgcagcatctgtatggcaacttccttgtccctacattgctaattgcaatacgtgagtccactgagtttcccttctcagaaggaaaccacaaagctaacgttgggcctctcgatgcatttctgccattccatgcttactgtaggcaacacacagttgtgggaagagagtagttgtggattcctgatgacctgggttagatatcatttctgcaactttcaagttattttaccactttattccagaaaagttccagccagtttctccacccgaaaattaggggataataatacatattacagcatatatatatatatayacacacacacacacacacatacatatatttatatttatataaaacatataaataaaactaagwatatatatatatataaaaatcaggcatatagcagatgtcctgtaaacgttagcttttatagctgtcatatgtgatctcaaaaatatagagtgatacttgaatatgtattataatcatacttcattgaaagtctgagataaggacaaataatcctccaaccctccagtctcccctatgaatgcaaccaacaccatcttctcagtctgatgtacttgcctagtatctccacaaaacacttcagtggacatctgcagagtaccttctctttgcaaacgttgtgtttctgctggaggttataggaatgaataggttgcagtattcactcaccaattttaaagtctactgggagcaaaagaacaaaaactgacagctgtgaaactgacaactatgacaactatggtaagaaagttgacagatgtatatgtgaaggttcctgagggtaaastaaggagttattaatcccaatgcagaagactggagaagctacaaagcatcatgagtaggggtctttccagtgggtaaygggctaaagagcattctaggtgaagggaaaagtgtgagcaaataaaaagaggtatgaaagaaatacagggaagagtccttagtatcatgacacttgatttcaaatcccaactctaccctcttaaataagcaaccacatgcaatttactcagcctctcagtgcctccatttccttacctacaaaacagggtaaatattcatctttttctcaaagrtggctaaaaagattaaatgaggaartatgtgtgagagcccttattggagcttggcacatagtaggccatgaaaagcaatttgaatgaatgaggcgtgtgtagtagcagaaaatagaytgattagagtgaatttggccccaagaagagtttgagaatcgatacggatttcttaatgcctaggcaaagatctctgcttttttctgcgagcagccagcatgtattttcaccgaatacttctgccttggtttggatgttcgtcctctccaaacctcgtatttgatctctaatgttggaggtggggcccaatgggaggtgtttgggtcatgaagatggatccctcatgaatagattaatgacctccttgggagtgagtgaattctcactctattcatttcgagagagctggttgattgaaaagagcctggtacctctcccctctcttacattctctctcatcccatgatctctgtgagtactggcttctcttcatcttctgcaatgagtggaagcagccagagcccctcaccagatgcagatacccaatcctgaactttctaaccatccagaatcataagccaaataaaccttttttctttatcagttgcttagcctcagatgttcctttagagtgacacaaagcagactcagacaagttcacagcaaaggctgtatggtttctgcgcaragttcagagtctagtgaatcagagatatatctcagacattgacccttatctcttaggcccagaacatttggacttaagcctttgacaagatatttcctaataaattgaaaatgaggtagaamaaatatgagttggatgataataacacaggtgggtcaattttcaggtgcatcttccagcttttaagcagtgttctctgtagattttgcctggtcagagagctaaatgtgagctttgtgttcatacttraattccaatccctgctcagccactttataactctgtggccttagaaagccacttaatcttggtcaactataacttagggaaaataacacctcacggaggtgtttgaggattaaacgcgggcatatayggtacctgaactatagtagtaatgattatcctgttgagatatgacatgtttgggccacaaattggaacccaaatcaacaagtgctgacttaatgcccccttgcccaccctgggctccctttaactgtgattattctaygttttccaggctagagatcatcttctatgagagagaagcctgaattagaataggagctgaccagttctgcctttctccatcttttgtgaacccatatgtttagtgacccttgtgagtcaggcagcrtgagtattcttcccattggttttgagtctaagaaaagtgaatttgactatccttggtgtttttcacaagtcttggcccattcagtgattttatgtccttgaatctctccttccatgccagtctttgtgttgtcctcggttatgaccatcacccttaacatcttgtacctgccctttggttccttgagggcatgctacaaatattcacyacactttccctagaccagagttttttcaaatggtgggtaacaaagtcaatttagtaaataattaccaacatttaaaaataaataaaacagaattgaacagaaaagttatgaatgtatgacacagattaggatgagtattgttttgtgaagcttgattcagatgtgtatgtgtatgtgtgtgcatgtgctgggtgttcgcaccatataaaatacttttcctactgtgagtctctgtctgaaaagtttgtaagccactgctttatcacttccccttttatttccttattgtcaatatttgcaattataatgtcagattttcattttgaaaatacctttccctttcttaggttatgggacagattccaactttcctttgaagcctgctttctaagttcacatctatcaatcaggaaaccacagtctcctcacagtccaagccttcatcatctattcattcatctctgtatttctagtacctagactggtgrctctttactctggttatacgttgggacaaactgtggcacttttacaaagcagattaytaagaggcactccttgcctcttacgtcagattttyttagacagcgaaaatgatagccagtggcctgatggtaggaatgtactcatttttttctgaatgaataaatgaaagatcaatcacccccaaattcctatcattttgtaccacgtcggtaagaaktttatctagcgtgtctgttccgcctgtagcccatccgcctcctgtgagttcaagtcatcaggaggacaagtaaatttcttagcctatctgaagccaaataagatttctagggatatttggataattgtcactacttgctatgacaatactgtatcactagttctctaaaaaaaaaaaaaaaaaaaagtttattgtttaaatctcttggttgtgctaacgtcgtctgtttctttcaaatgcagcatcagtagcttcgctctgctcaggcagccggctggcacttccytctcacatctgttcatttttcctttgtcctttactcagacattttctatggtgtttatgcactcatatctaataagtcgctcctgtgtatgtgtgtgagtgcacctgtgtgtgtgaaatgcctttttacatgcaggccttgtgtatgattttctgaagttamaaatcctttcaacgtacctgtatttttcaagcactacatcacaaagcagatgcccagtccaggctgcggagtcagattgggcagatgagtaggaggctgcccatctgtcagcaactctaaaacatcaatggaataaactggaaccatgttgccrtttacccggactttccacytaggagtccttacacactgatgaaattgctcctgttcctrccaaagtacacagagccctagagaggatattatgtatctcttatgtgtacctatccacctctgctaaataaaaactaaatattgtacccagagttccccacttgtcttgccctggccttgcctggaaaaattgcaggaaaaactctggagttgaaactcaggcaaagtayagtgaaggagaacttttgtggactgcctacctttgcaacttattataatttctgaatagttttgtgtgtgttttatttctttctcccccacagaacacgacttaatgctctccgagaggtacaacccgtagaacttcctaactgtaatttagttaaaggaatcggtatgtatgtgagaggaagaagggtctcatttgaacttccggtatttttttgctctttgtgtgattaatgtgcctgttcaattctgtccaaaaataaaattttgaatcaggagagtcagtggtagttaatgataaataccatgttgtttgacttttgacttcaccaacatactgccaaggtgttgggagttttggttgtttgtttttgtttgatcaatagagcaaaaaaaaaaaaaagaaaaaaagaaaaaagaaaaatagaataatgtttgattccatggcaatctaacctgaggagatggcagaagaggggagggagagccagataaagcattgaataaaggtaacttttttttagaaaggctctgacaggactttgcaattaccacaaggcttctccttatgcatctctcttttgatattggacaggaaaattttttccagaagctctcagcagatttccccttagatcttatttgtcagagctggaggacaggctggtgccctagttgcaaaggatgctgggaaagtaattatcaagcctccaatgtgggaggcaggccctgtcagcaaagataaaacggtaggagaatagcagctgggaggcaaccaacaagragagtccccgggctcaactctccagctggttccaaccaaccagctttgttatttgaagacaattggtttgagatcatgcttttgtgtgctttgggtgtttctttttctttyttttttttttttttttttttgttcttttagaattattcatctcagttgattaaggctcaggaggctagatcagatgacttagtaccactaaatttcactagatatcttatggtgcgattgttttctagaaaaatatgatattgatatcaaatatcactgggtttttgaaaagcaaactttccactaagtgtagaaatacctatcaaatagttcatttttctctagataaattgaaatgttaaaaatttacatgtacttaaagtataactaacttgaagacagtaatatttaaccgatgtttataattagtagtaaaaattcatattcttgatcamctaaaatgtatccccattttaactcaactatttggaatttgcttatatcttcaatatggctttccaagggtttaattgatttggaagtattaagtatcaacatatatttgtaatttaccttgtatctttagaaaacaagttcttttcaaataatcatggcttttgtacgttttgtgaatttccatgaactttaagaggattcagtctttgaggaaaaagctctagtccatcaatttaaaacaaatatactaagtgtaaattttaattaaacttgttaatgaattaatatatttttaatttccatataatcgcattmatcaatttgaataaatgaaagaatgaattattctgaacctattaaagaagagtgatgtatagccccagtttcaagtgaggtgtgataaagaaatggatccacatcctgcaataatatgaaacaacctgtactttctgttctcttttctggcagaaactggctctgaagacwtggagatactgcctaatggactggctttcattagctctgtgagtgttttctttcacttttctgtgttctagaacgttttctaggactggcagtttaagtctttcacttaggctttctgtatacccatgcccactttcaaataaaatgaacagtcatggtttaaaagacaaattgtgtatgcatttacacttgtgctataattatgatcatgygtgttctatgcatatttgtgttcttcggtctacattgaaccatattacgttagcttctattgcagcaatttttttgtgagttcagtgtattcaagaattgttttcctctcaattgtctattccctaagcacttaaaattgccatattcaaatatttgctaaattaaatatacatttaatgtatactacttcacaggtcatttcaactttcacrtttttaaacaaatttcagaataagccctttaatttaaaattgttgataggtcccaattcccaattcccaagctttgaagacagaatccaccatatttgctgaaactgtcctgcatatagatcgctatggtagctgatatagtgcaaaacaaaagaagtccaccatctggcctagggatcataacataacagagttgataggaaacgacagacaatcatccagccatttaaaaacctttgctaccccttgtaatttacttagtccagttttctcttacaaagatgrtagactagtcatcctgcaaagcaatgtcttgcaaactttcttgagcaacataaggtgtatttcaagcaaaatcttatatgggaacacaatatataaaacaacagctttattgttttgattgaaggctaagaaaggagtagttcctctggcccaccaaamctctgtctttgagatgcttccaaggacctaccagggaacagtttaaaagccataagcaatattctctctgtattccttgcttatatcattgaagactattattaattgcctttttggtctgctcttccatttttgatctttctcatgggctggaagctgtagtgtcgtgcacatatgactttgctgcaggggatgaaagggtttgtgtggggtggcctagtggagcatgtggcttccagaagacttctcctggggacccattacagaagctaactaagaggcttcctatgtrgccatctggctagccctgtggtttggagcagtcaacatgaacccatgggccatgcagcgcctctattagcatttgaagtactggtattgtgcttgatttttctcctccatggtttataagggattaaagtatcctggaataaagagcttcaaccccaacagtcctggaaaaatacttctgatggacctgaatgaagaagatccaacagtgttggaattggggatcactggaagtaaatttgatrtatcttcatttaaccctcatgggattagcacattcacagatgaaggtaacaatatttactatttattaaaaccaaaaccaaacttaaaacaaaaacagaaaaacatgccaataaatgaattattttttctcattcaaacaaagcatagtcatgaataatgttcttactctgggttttaaacttaccctctatgttaattgaactttatagtaaaaccacttaaatacttgagaatgctaaaatatttaagatttgtaaagcatctaattttgtaaaatactaacattcacattatccctataattaccataataataatatccagccctgatcattatagcttttccattttaaacgattttcaagactcgggcatttacaggaacagatttttctaacccaaggcatctgtaagctataggtccagtgacagaaagtcaccatggtcagctttctgccggtcccattatcttcaatgcctcctgtccgctggttcctctgttctgtgttcaaaatgctcctctgcatgttggtccctttcaacataacttggtgtcatcctttatgtctttactccctttctccctttccatttgctgtcacttccttgtctctgtattaattttcagccccagttgcacaatggtagcacctgaagagtttaaaaagactcgatgcccagcccccagcttgacagattccaattccgttagtctgagggaggcctggatcacagtagttgttaaaagtttttcagttgataaaaatgtcaggctagggttaagaaccacgtttatacccattacctccatttcatcatcagacgatccctcattcagttcctcttctggactttccccactgtgggtggctaaaattgctaccttgagaatcatcagtgatgttcctactaacaaatctcctctcttcccttcctccctctccttccttccctcttcccttccttccttccttcacctccttttgttttttgttttgttttgtttttgagatggagtcttgctctctcccaggctggagtgcagtggcgcaatcttggctcactgaaaacttcacctcccgggttcaagcaattctcctgcctcagcctcctgagtagcggggaccacaggtgcatgccgccatgcctggctgatttttcgtattttagtagagacgggggtttcaccatgttgcccaggctggtctcgaactcctgagctcaggcaatcctcccatctcggcctcccaaagtgctgggattacagttgtgagccaccgygcccagcctacttcacctgcttttatgctgtttaccattttctcattcacaaaacttgctcttccctgatactgcagtgcacctagctgttccagttctcatcctactacaggttttctccccaattcattgttttgtcactcattgctacttccctgagcactaccccagaggtttgatcttttacttcctctatattttctctattttagaactttcaaaccagtgtcacactgcctgctttctaggaggacatccccaaataggggtattattattcttcttcttttcattagcccttcacttttaatgccgcaggtgcttactggacacttctatttggattcctttcctatagacactttaaactcaaaatgttgaaagtgattttccatccttttatctttccttctcttccccatgtgagacacacacacacacacacacacacacacacacacacacacatatacatatatatycctttcaatggactttccactcatccacccattcatcaccattatgttttattttaaaaatatttttaagtacaaagaaatatagtgtttgatgtgtggatactttttaaaataaaaatgaggtaatattacacaaccccttctataaattkcttctgcattaaacactacatcatggactcctttatatatagcacatttgcagttgctttgccaaggcagttcgggattcagttgtgtgggagcactgtaatatagctcatctgctaacaaatatttaggttgttcccacctttatgctcattgcaaacaatgccaaaataaactttctcgcacatgtattttctgagactatatccttaggatacatttctagaagtagaatccactgcacaaaatgtgaattcaggttttaatcctcacttgaatttgatttccaacaccctccttcctcagctgtattcagggcctttggattcttcctgtcaaatgcctctcatgacctttcctgccttttattgccagtggcatcctcttggtccagtcctttctctccacattgctggattactgctgtagcctcagctcatgttactccttggttcaaataccccagtgagcaaagcttggatcttcatcttaagccctaacaagactgattctggctccctgtggtttcagccctctcactctcccactctctcttgccttcactctgctcccagcacaacctcacaattaagtgaatatgtccaggaagttctgccccggggcctttgcacactcccagcacaacctcactattaagtgaatatgtcccggaagttctgccccggggcctttgcacactcccagcacaacctcactattaagtgaatatgtccaggaagttctgccccagggcctttgcacactttctcccctcaacctggaatgctctttccctagatatccacattattcgttctcttatttcacttargtttttgctctaacatcccctcatcagagagaacatgcctgactcccatgaagataatacttcgttactctctattcttttatcctgttgtatttttcctttgtagcatttaacgccaactaaaataaattaaacacttgtttgctgaatggggtaatgaaaatcattttagcagctttctctgttcaaatcttctcaattcaacctgccaaattttgcatcttaacatggtgaaaccccatctctactaaaaacacaaaaattagccaggcatggtggtgggcacctgtaatcccagctacttgggaggctgaggcaggagaatcgcttgaacctgggaggcggaggttgcagtgagccgagatggcgccattgcactccagcctgggcaacaggagtgaaactccgtctcaaaaacaaaacaaaacaaaacaaaaacgccaatttgatcatgtcagaggtttcaaaagacctactctttcttaaggcaaagaccataatctaacttttacttgccagctctgatcacacattcttgaccgcttagactggtcacctttgtgttcttaaagtcccacttatccaaggaagctgcttctgtttgtttgctactatttctcagatgttcttctatggaatgtatcatctcacactgtgtaaattacacctgatcacaccttctcatattgggagttcccatggtttttatccctttcatcgcaactgtgcatttcgtggagaccatttgaactggaaaacttaaaggattctttggagttttagtgtcagtgatactcattcttgagaatttttttttctcctgtggagttttgagttttcagagactgtcactggttcttccttgagccacttttgtttggaacaggagcaatcacmaatgcttctctctacaaagagatgaaaatattccatctgcctgacatcctaactactagctggaggtgggttgaaattggtttttggagagagggctgacagtgagagcttagttaatgtttcatttttgtttttaatctcctctcagataatgccatgtacctcctggtggtgaaccatccagatgccaagtccacagtggagttgtttaaatttcaagaagaagaaaaatcgcttttgcatctaaaaaccatcagacataaacttctgcctaagtactgagatatatcacatttctattttcctttagctgtagcggatagttaatccacttttagtttttccttttggccagagtaggtatggctgttcaactctcatttctaatgatcacaaactcctccacatgctcttctgaagaaccttctgaggactcaagmccctcagaganggcccattcttttcctctcttgtttctcgagctgattggatgctggctcctggcctcaggatctccattcaagttattaccaggaaaaaaatcctcttcttcagaaccagacttagtatttcaaacccaaaccggcttcatagataaatttgacatcatgagcttatttatttatattaaaaagtagactcttagatgtttccatgaattagaaacacagacccaagaggagaccctgaatcaagtgcatctaagacctccttatactgcctccgctgctgtttgattgcacaaaatttatgcaatagcagatctgtggtaacactcarttccccctaggcaccttgttcatgtaacatatggtgaaataaaacactcaagaatctccaatctcagtcaacttcctcacatgccctgtgaagatttggcttgtaaggccagtgatggatttaggagaacaatccgacwctatcttctgaaacatttacctccaactgattacgattttctagaatcccaacctatttttatataatttatgtacagcatttgactacctccatatctgtaaatctagatttgtactctttgcaggtacctagctaagggcctggtatgtagtgtgcactctgtgttaccaggaccccttcctcttctttcttatctggtggtttgaggatgaggaaaatgagattggagagaaattgagttactggatgaaggccaatcaactcactagtggccaagtaggaaccccagctcaggtcatcttctgccccatcaagatgartaaaagttcagagaacagcttttggtggaagagtttattcgtgcatttatttaacaaatatattttggagagagaataaggtcactgagtggagaatgtgaggaacaccaagatttaaagtagagaacagtatgtagaatggagaagctgggcaaatgataacactaataaatgagctttctctgtaagtcaggtgctacactaactaattcaaacagattattttattgatgttttacaaataccttctgaattaggtgttattattatatccattttggatttttaaaaagttgaggcctggactaattgttaagtttccccagatgacatcatcagtaaatggtgcagctgtgattctaatcctggtaacatgagttcagagctggtgctttaaacctctacaaaatagtgaaaaaaattatgtgttttaacatttaatcttggaaatctcagattggtctacgttaccggattggagtatttttttcttgagccagttgcaaaaatattggtcttaggcagcattggagactgaaaataaccacggtgccgtaattaactagagttctgctctctcaatccaaggattagctgtgtgtattttcttctttgtattttatggttttttataacattaatattccaataactaaatctattataatttaaacttgttattattcatatatcacaactgttattattggtcatttactgtatgccaggcatggtgtgaaggcctttgcattcattatttcattktattcttactctagcctttcaaggtatacagagaaaacagaggttcagaatagtggctcaaaatttagtgacaatgctgtggccccacattataaggatagcaagcagtgtcaggatgcaaatgaagtccatcagatttcaaagctattactctattaccctttaaaaatttgttatttatttacttattttactacacctgggggtagtaaattttcagcaataaaaagctattgctctaaaccrttccactctgcccctttctgtgaaaaacagacaaatgatagtccagcatactaatttaagaaatttacttttaaaaaagagagagtaaaatcagattgtagatttatgtctggagcccatccagactaatcctaaattccgagacctttttttttttttcatgttgtaatagtggctagcattgattgagggtttattgaatgtcatgctccctgcaaagcacacaacaggcattgtctcattgtaattcccactgcaactccacaaattaagatcctgacccttagttttctactaatgagctgtatgattttgagaatatcatttaacctctctttacagatgagaaaactgaggctctgcatgcctgtctaacttgcctgagagctcaragctgcgtcagagctgatgcgctggccatgacgcctctgcaatagagcagagataattttctcccagatcatgccctggggaacttccatcacctcaatcagcaaagaatgactcacttatgtgttccctattgtayccattaaagcagaaaaatagactcatatatcttacattttcagtaacagagaatcctaatcagaaaggaaaaaaaaaaagycatagcattctatttctgagcattcttgttcatggacatttcattcagtttagaatcacgaaatcttaaggctggaagatcaaccagtctatcatcctgctttcacagataagaaaactgaggtcctgacatgtgaaaagattgatttttcttagatcacacagctaatagtagcagagcttaaactaaaatgcaagtatccaggctgctggttcagcattttttcaatttcttatgggagttagttctatgtgagcccagatatgtgagcacatttttgccctgacaatgatttctggcttaatttaatttctactgaatttagtgtatttacacacagacacacacagatacmcacacacacacacacacacacacacacacacacgacgtaacactattttaagatacatataataggatttttatgttacagtgctataatcacctcctcagatttcttagaccaatgattgtctttaaggattgtatcggcaggactaatttcatattaattgtgttccattatagctagcacgaaggctccatcccayatcttgattttaggaatagacagtgaggaatgccagttaataatcctgtaatgttcaataccttcaccttatatattatgtgtgtatgttttaattgcagtttgaatgatattgttgctgtgggacctgagcacttttatggcacaaatgatcactattttcttgacccctacttacratcctgggagatgtatttgggtttagcgtggtcgtatgttgtctactatagtccaagtgaagttcgagtggtggcagaaggatttgattttgctaatggaatcaacatttcacccgatggcaagtatgtgaactctctgaaatgtagtggatttactcagattctcaggagatatcttggaatatattctttttttaagtaatatgatacattttaacatgttaccctagtgagataaaattaggaaaaatgtaaaatgtcttaatttttcagggggtgaaatttatcaaatcaaaaatttcattgtgaaggcatactggttttatttcctttttggaaagaaagtacattttaagagggggaactgtgatgaagatttgatatgtctgaatagctttgttttgagtaaagatgtgagtgtataatgagttgaatagtatgcaggtatagatacgtcagtagtgcaggtttatgacaagatgaggaatttgtaccaaaatgtaaatcaaggcaatacttccttcatcaagaaagtattactgtgaaaaacaagtcagtttaactaagcagtgtgcttagtgatgtatttgatttataatgttatctcatggtgagctataacaaacaatttgcaaaccaacattggtctggagactgcattttgggtagcattggtatatacatgaaatatctatatccatccacatatatgccctttctcatcttgtgtcatcatcaaggattttagagtccgtaacatatgcttagagaaagcaacaggggccaggtgtggtggttcatgcctgtaatcctagcacttcgggaggccaaggtgggtggatcacctgaggtcatagaccagcctggccatcatggcgaaaccccatctctactaaaaatacaaaaattagccaggcgtggtggcgcactcctgtaatcccagctaccagggaggccaggcaggagaattgcttgaacctgggaggtggaggttgcagtgagctgagattgcaccactgcactccagcgtgggtgacagagcaagactctgtttttttttaaaaaaaaaaaaaagaaagaaagaaagaaaagaaaaagcaagcaagcaagcaagtgagagcaacagggacagggacagcttttaattattcatatcatagaccagttttcaaaaaatagaagataattgagcagtaatttcttttttttgttggggggatgcacagtgcttagactaaccccagatctttgtggggtatgactaaagccacagggtcaggaccacactcagggcagaagaggaggaagacttctctygatccaagccaagcagcttttcttctctcatattttctctggattaaaacaaggggctgttgtccaagggctttcctgcaactttcccgagagagaactcactagcccctgaaatgcagaacctgggccttgacactaaattgtcaaaccaaaagagaaacgctgtaatgcattttactcccagatactaaaagttagtgttagggctaagttcctcccatacygataaggacaactatgtcccctccttcagaaacaacttttcagagattaaacccctctgtcactgtaaactcactgagttctttcagaatttggtgtgtttgaggtgggttccattttccattccttaagcaaagttcttccctatgaataggtattacaacttcatcttaatctctcaagttgtgttacttctagtactttgatgtagctctttcttctttgaaggtatgtctatatagctgagttgctggctcataagattcatgtgtatgaaaagcatgctaattggactttaactccattgaaggtaagacgtattaacactgtaagtctgcagagtgataattagattctaattgatttgtgaaattaaatgtgaagaaaaaaggactgcttaattggggtgggtgagaaccaatttttcactcctttattaagagtcattagcttggttatgtgtttgttgttcatttttactcaactgcagagtggcaaacagcaaaccccacctcttacccgtgaaccttgcattctttctgctctagcaaattttaagcttggcattgtgttcccagatcctccttccatccctcccttcctgcctttcttctgatctccctctcctccaccttccttccctctcctcccttttctttctcttttttcctctatgttgatggaacagccaagaaatagcctcaaattgtactttatgcagggctgctctccacaatgtttatgaagtccacgtgctcacgatggctgctaggtgacctggctgcccctcacctctctgcctttacctccaaccattgtgtccctgccccacgtctcctgccactgtctcagaacggggcaccattccctctgctaggaggagaaaccttcctccagatctccatgaccccctccttcatctcctttcatttttactaaaacgtcacctcgatcttcaaaacctggaactgctccctcccgctacgtattttccctcgcctttcctgctttatttttccattcagcacgtattgctaacatactatatattttattcataccctttattacctgattccccaactagggtgtaagctccacaaggacaggctgtttttctatttgcttctggtacaattcacattgactagttggcacttaacaaatacttgttaaattactgcggtggggctgggcatgcttcagggattcacctgctgcccccaccaattctggtcatctgaaggttggagtcaaaatgggtgaaaacacaaaggagaggaaaaagagaccaagagcaaactagagccctaagaaagcagccctctacctccgaaaaacagcaagacgttgctttcctgccataaacgcccactgcaggaagcactgtcagcgccaattgtatgactgttcctgtcagcacatctgagagactgtcatgaggggcctcaytcagagaaaattaccttaaagcaacatcaaatgtaacatcgtgtttgacattaaaaatcactggcagggctagtttggtattagctcaagtaaaatggaatttcacacgctcatactggctaagggaataaaaaacaagctgcggttttaacaacaggtatttctgtaaaacaaaagttaaagaattttatgagaatagaacccaatgtaacagacattcaccacagaatgtcaaggctctgctctcaccagggygagactgagggcaaggccagtttcagcaacagaccaggcctgtctcccatcatgaaaaccccaaaaaggttctccatcaattgtcacattattctttcttttgaaagaccgtattaattaatatcagttaattaatgcccgagagtgccaagtaatttgataaactagctgaggctattcttaaatttgtgatgaggtgtggatgggtttatgtccaattggatattgttcagccttaaaaaggaatgaagttcttggccgggtgcggtggctcacacctgtaatcccagcactgtgggaggctgaggtgggtggatcacgaggtcaagagttcaagaccagcctggccaatatggtgaaaccccgyctctactaaaggtacaaaaaattagccagacatggtggcacatgcctataatcccagctacctgggagactgaggcaggagaatcacttgaacctgggaggcggaggttgcagtgagctgagatcacaccattgtactccagtctgggcaacaagagcaaaacgccatctaaaaaaaaaaaaaaaaaaaaaaaggaatgaagttctgatacctgctacaacatggataagccttgaaaaacatgatgctaaatgacataagccagcaacaaaaggataaatattgtacgatttactaataggaagtacctagaacaggcaaattcatggagacagaaaatagaatagaatggtgattgctaggaacttgggggagagaagaatagggagctattgtttaatgggtacaggatttctatttggggctgattaaaagttctggagagggatggtgatgatggttgcacaacattgtgaatatacttaatgccactgagttttacacttaaaaatggttaaaatgtcaaatttttatatattttaccacgatagaaataattctctcctctctccaaaaaaagattccaggacttagtcaatgaattagtcacacttcaatgaacctcaatgcgcaaaaacctggagtatttgttaacagagaatactctgtttttcccaaagagaataatttattatgttttcttgaccaaggaatgcgaatttttcgagttgcctttgtgggagtgtgagatgtgatacgcaggggtcttgcatgagttagcatggagaggaattatttatttgcaaggcaaagagttcattgctggactcagaacaggctccctgctagactgtcagcacttccatggcatgagctgtgtctgctgggtacctggtgctctccaggtgttgcgttccttgcagagctcrtgtaggagctcagtaattgtgtcttgaatgaatgggaccccaggtttctgtgtccttctcccactcccactctcatctcaggtttcatctgccgtggaattcaccaattggctgtactgcttccaaagataagagcaaagccctgaaacaaacattttcctcattcaaagacattatggtatcagagtggtgtgctgacactgggatggacaggggtttagggatggagaaagcaagcatggagccgcctgtcttgcctgtctctggggtaagaaagactgatggctctgcatggtggcgagactgaggctctgccatgatgcttgagccctctaatccctccttgggcatgtgaggaacagctctcattttgagtaggaggcacagggaaacgttggttttctgcagctgtctgcttatgccctggctttttcaatgagtcatgaccagttatttacaggttctctgggcactgaggtatgctggcctctgaggtacatggtagatattatttctccaactgagaattagaggtaaacaaatagatgggatttctccccagtagaaggcagccaagatgatgaatggtggaattaagaatcattggtattatttatgatccttgtacaaagcctcgacagcaatctgtgcagtcatcaaatgcttgcaacttatatttagagaataaacagcagaagaacggggagttgaacaacatcaggaaactaaagaacaaacttttcctcaactacaaggcaaaaatgagaccctgggtgatcatttcttctctggctgcacagcctatgattagccattaaagagtccacatttcattgatattcttctgagaaagaatctacatttcctggttgttttctgaatgcttataaaaatatcattaccacatgccattttagaaggagatgttttatgatgcaccgaaaacttcttttttttttcagttttaggttcatgcacagatgttggtacaaatgattttgtctaacttttaacagtctttcttggctttctgtatcttcaccctacccaattctgccctggaaactgacaaaatactagcatagatgaaaggtcagagaaattttgtgagtcttattgaaatggggcagaattgtatccttggaagcagcagcgtggtgaccaaggacaagaggcaacttttctctgatayattttgctccatcacaattgtgttttactttatgtcttgttcttttcttgtttttaatcttttaagtcccttgactttaataccctcgtggataacatatctgtggatcctgagacaggagacctttgggttggatgccatcccaatggcatgaaaatcttcttctatgactcagagaatcctcctgcatcagaggtaagttttaaaaatgaaccagataagtgactttattcccagctactgttttttcagttgacaacataattctcaattcttggtttttttttttttttttttttttttttgkgacagagtatcgctctgtcgcccaggctggagtgcagtggcgcaatcttggctcactgcaagctccgcctcccgggttcacaccattctcctgcctcagcctcccaagtagttgggaccacaggcgcatgccaccatgcctggctaattttttgtattttttttttttttttagtagagacagggtttcatcctgttggccaggatggtcttgatctgctgaccttgtgatccacccgcctcggcctcccaaagtgccgggattacaggcgtgagccaccgtgcccggccaattctcaattctatgtgcaaataaaaggggggacatggatagatgatccaaatgatcagaaatgaaggcttttggaggtgctttagtcagagtctaggcaagaaacacatggcacacttaaattggataatttgaggggagtttaatcaacggactatacacaaaatgtgtggacacagtgtagggtaatcaacagagttataatgcagtaccccagggctagcaagggagggaggaaatgaataccagaagccagaacaggtagacggtggtgggtggagagggttgcctgacaggaacttggcctctggttaagggatcctcaaagaacataatgatgccatactgctatggtttaatcattcattacctgccttcctattcaactcccccttcctgtgtggcggtatacgcacaggtccatgcaatggaccagtcctggagcacactggccagcctctctagatcttcctgcaggtggcaagataaatagctggaattattctggcttagaagatctcatcttccaccttagttacagtactcaaaggtcccattttttgtccacggtctttattcagtgaactattttgggtacaagtaagaatttgcaacctacttcaatataggtatttgcacatttactgagttttcagtatctactaaggatacttattacttacatcatatatatgatatcatcttgacatatttgtctactgctgkgtattgttaaagctcagttttaagagtccatttcacctgcccaacaggaaaaaaaaaagtgttaaagcccgtatctcttgggttaaaaaaaaaagaaacaaatgtgtatttccatttacattatggctctcttaccttttatctctaggtttgcaggacaattgtgatcatgtttaatggcaaccctttgtgccttttgctagtttttagctattagggttgctgaatggtatgtttaatagaattgaagaaatgtatgctgtggagtgttcagtgctcagamctgagcagaatgttagattctaatttgttcttgcttgttagctcatttagtaaccttgggtcatttgctatagcatggacttggtttgttgttctggagaaaatacttcatttctaatgattgatctgcaaaggagtagcaaaaagtagtaacaattccttatccaatgcactgcccctagatgagtgatttagttttattaacaagaagcttagctaagccaaggtgtaccatcaactatttccctgtaactactacatgttaatgctatggcaacttcctaagacatctgtctttggtgccagctgtttttaagaggtcattttgaacgttcccacagacccttttatatccacgcagtggccttcaccgtctgccacatttgtgatgtagatatcctttcttcaagtcattatatattatcataaaggcttaataatagaaagctagagctgaaggggaatttagagataatctagtcccacccatttcattctacagatgagaaacaaatgtgagtggaagatccaagacatgacccaggtctcccacctcagtgtagtgcttttcatactaagttgaatcacacgctattgctattttttacagtcagaatgatcagatattggctatttcatatggttggcttaacatgatactacactgttattattgatacaatcacatttctcctcaattaagtgaaggaaactgaacttacaaaatcttatacatttagagacaggaggttaagttcagaacacatgagtatggkacacagatatggttttttgagggccacattttttttcttgtctgcattttaaaaaccaggaattaagtgtaaacatccagttagttccctggcttacctgaaaatacatgaaaacggaccttaattactgcatggcaacagtttggctattgctgagtgtattagtcaaggttccctagagggacagaactaataggatatatatatatgtaaagggggtttattaagtattaacttacctgatcacaagatcccacagtaggcggtctgcaagcctgaggagcaaggagagccagtctgagtctcaaaactgaagaatttggagtctgatgtttgagggcaggaagcatcagcaygggagaaagatgtaggctgggagggtaggccagtctctcctcttcatgtttttctgcctgctttatattcgctggcagctgattagattgtgcccacccagattaagggtgggtctgccttttgcagcccactgactcaaatgttaatctcctttggcaacacgctcacagacacccaggatcaatactttgcatccttcaatccaatcaagttgactctcagtattaacyatcatactgagtaacagcttcctccctccacatttactgaaatccccactgctccctaatgtcccacatccaggatgcgctgctcatttgcatttcctgcctcatccctgtaggtctagatactctccacctctgctaaagatcacttgagatcagtacccacctgttcccaaatgaagaaacaggtgtgttaagtgtaattttggaacaaaataggatttatctcattgtataagattatatggcttcttatggaggatgaccctattatgcataaggttgttttaagtgacttaacaaaaatattaacccaatgttatttcttccacaggtgcttcgaatccagaacattctaacagaagaacctaaagtgacacaggtttatgcagaaaatggcacagtgttgcaaggcagtacagttgcctctgtgtacaaagggaaactgctgattggcacagtgtttcacaaagctctttactgtgagctctaacagaccgatttgcacccatgccatagaaactgaggccattatttcaaccgcttgccatattccgaggacccagtgttcttagctgaacaatgaatgctgaccctaaatgtggacatcatgaagcatcaaagcactgtttaactgggagtgatatgatgtgtagggcttttttttgagaatacactatcaaatcagtcttggaatacttgaaaacctcatttaccataaaaatccttctcactaaaatggataaatcagttatgtcaattgtcagatattaaataacagtgtgtgaccccaaaagtacttaccctaaaacatgtgttgcctgraagcacatgtgtgtatcgctgccttgccatgtcttgttcagaagacacaggggagcagggttagctcacgtgtctttagaactccagtactcacccagggactccagttcacaggccagaaaacatatgcattatgaagttcccctctactccatgcacatagtaagtctgactatggcagtcagacttacttactcccattttcccttcgatatatgactttttctcagtaaatattaacctgaaytattccaactccccttgtactcttgctttttcaattctcctgttgcaatgacacataggaaaatcttaaaattcttgggagtgttgtcacacctgaaaattatgagtctctatgatcttggcacaaattgtacatttgagtgtctttgacttggttaaaggaagtttgttcacttcgatgaytggatacagaatgaatcccataattgacatgggcgaagctaaaagtgtccccaaagactacactgttgttgaggtggtggtagtgctggtgggtttttgtttaatatttaaacttcttgttgtggaggctgaaaagaaaaaaaataatagaaaggtaaacaaacaaataaatagaaaagatcaacaacccctttggctatctactgagacatgactaggaagaaaacatgactttatcattttgttatagaarctgatatataaaggttacacattttcatttatttgtttttctgatttgaaggtataaccttcatgatgaattacttcttcagggtgttaaggcagtgactttagaaacaaatttttttcttgtttttgttttgtttttgagaccgaatctcactctgttgcccaggctggagtgcagtggtgcgatcttggctcactgcaacttctacctccgaggttcaagagattcttgtgcctcagcctcccggatagctgggactacaggcacacaccaccatgcccggctaatttttgtatttttagtagagacggggtttcaccatgttggccagcctggtctcgaacacctgacctcaggtgatccacccgccttggccttccaaagtgctgggattacaggtgcgagccaccacacccagccagaaacgaagtttttctaaggcacttgttatgatgatagtctggcatttccgggaaaatgttttgccaataaattgagaaccaccaacagttgtttaagaatcactgacttgaagtaataaacaggaacattttgtttgggtcaaaaaaccactttattcacagcaagattggagttactcatgattccagtgacataatatcccgtgccctacatgggctcaatttttctgagatgctgctcacagcccaggatgctgggttctctgaaagactgtcttgaaattatcaatgagtgtgatgcttagggaacacccccaacatatttcattatttagaaagaaagaatttcctgagtagttaggctccctaacatcttcaataaaatgaccacattctgttctttcttgttcttgatgatagataagcaaattccactgaagaaacaaaagcctatccaatttgacacagcacatactcaagatcactcaaaaagggacatggcttggttagaaatttcataacatacattgtgaaaaagaggaaaacagcttaattcatgtattctgtgattcccagatctaaattttcgcactgacataggcttagtcacatataaattatagtttgcgtgtgtaagaatgaatgaaattaatagccctcacttatttttaaggctttagaaagaatattgtttaaaataaccccatactctacgatggtcctgattcttccttagcttgcccctcgctatgtgagactghctacttaatggatttgtcacagaggttttcctggctgagagatatcagagactttgatggtgaagcagcgacaggggaacaaaatgacgggcgaggaagcttcgagtgcaggctttgctcttttaactttatgcccagttccataattgtgctttcaaatgtaatttctagctgccaatttacactttaccacagttaagacttagtttcatttccatgaaaaatgtgcactttgctcytgattgacagatatatgctttgacaattgatacaggtttacccagtcaaggcttgttttagttgaaggtgaaaatggaagagggaaaaaaaattgcttcaacagacctcagtatttctttttattgcattcgttgtctaacaacaataatactcattggcaagaaatttatttacactaacaaattaaatttaatcacaggtattkttagattggtcagaaaacaaaagaccactgtgatattttgcttgaatgcctctgaaaaccaaagagtaaggaatgtcatttgaaactttttgaacaatctagagaagtacatattaaccaagcacaagagaacaattcagacgtggcactattgtctcttccatgcaaatgatcagacatcaaaatgtacaaattaaaagcttaggtaacatgctatccatacttatcagacttaaaattattttcaaacaattcgtgttctttactgatatacaaagaaagctgaaaagaaatcaacttcttacagtggaatagaatttattctcttttattttcagctgcccagttttgtcagtaaggtgtagcaggtgtacaagtggttgcaacaccattaaaaaatataaaagcagtagttatattaaataatgttgaagaaaacatatacatatatatttaaggaatttcactaagcactaactaaatttcatgttgttgggaggtgttatctggctggagtgcctcttaattctttttaaggtaatttaattatttcttgccaattgttctttcttgaatgaatgattacatccttaacagaaaacctgggtgtataaataatacagctgaaagaaacagaagtgtacaccttccaacaacatacactcccaaccacttgtgttgtttttggcaacaaccaaaatgccattgcttgcacaaaaagtaaataaatgatcatatgatggcaacattcatcataagagagccagtaggcagtgactgtaagcatcacagccaccaattatgtcattttagaattgtgagcaaattcacaagaacacacagtgcaatttttagctgcatacatttcttctgagctccaactcagcaatatgcaatcttgacatcaaagcattagccaaatatttgaggaaattttcttactaaaataccaagtatctgataaatcaattttaccaaaatatataaacatatagaaggataagtgcatttagtagaaatacttacaataaaaaaatctcttaaaatctatgagccattcaatgtatacacaacgmaagaagtggcaataaggctatgattacagctccaggtcctgactgacctcgccaagttccatacacaatatattttttaatgccatgtgattgcagtgtgtgtgcgtgtgtaaggtgggagtgatattcacacatatgtagttctgaacatctacacaaacggcatgcacattgttgagaagttatctgttctcttattgcatacatcttactcactgttgaatccctagcagttttggggttgggttagggtcaagcataggaaatcatcatatttctttccttctccactcttgaggatctggaatcaggtcacagactgtgctgggtccacacgcttacatatgtgaaccttcaagtaactaccattccctcaataggcccacatagacaccacggacaagcaaataaggaccctctgtctaccataaatagaacttgatgctttcactttccaggagaagctgattctgtcggctttctctttgcccctccaacttcttagttgggcctattctatgctgctacttcaagttactcaaatgtgttttgtctggtgttatttttttctccagtgttttggaccaagactagatttcctgagactttaaatacgcaagacaaatgcaaacaaaatctgccaacatacccaggctgcttttcaggagtgaatcactgaagtgcatttggatttcctataacactactttcttttgggaatgtacagccctcccccagctccccatcccccatcataatgtaaaccattctaagagaaaatatggatgttttggctgggggtggtggcacatgcctgtagtcccagctacttgggaagctgaagcaggaggaccacttgagcccaggagtttgaggctgcagtaagacatgatggcaccactgcagtccagtctgggtgacagatgacagaaaaaaaaaaaaaaaaaaaaaagaaaagaaaatatggacattttatttctggactttatccttaaatgcttagctttagaatagtgcacaggtacatccttaataaaaagtaaatttgaaaagacaggaaaggactgtgcttttctcttccattttaccttttcattctgagaccactaaggtctttgcattaagtaggtgacgtgaaccctagtggccactgcccaccaaaatgcccctcatctccagctctgtcaggagtacctttagttactcaaatggaaatatctcagtgtaatgatggggctacaacatatccaaagtatagatggttctctcagggctgctggggcagcttcctttagaatcctctagaacactattgttaaacactggatctcctcttgaagtttagtctgcataacctttaacacttaaacatgaatcagagtatctatataaatgcaaattttcatttcccttttataaaatgcaattttcaagcacatgctaattctggtgcacaatgaacccagacaaatttgtcttcagcacaaactctaacggccgaggtgctagatcaaaccacctgtgaccatttttgtagcttgggactgggatattttaagatttcaggctagtgatgattacagggtcacagatagtggcaaaggtaaatctggttcctcattttccctcttgccactttgtttccaacaacaatggagcaaaaggtgacagtcccattttgtgccagttgaaagctgagtttggctttagtacctatcatactgcaatcatgaactgctgtgggttaaaaaaagcttgtgatgttgagggtgtgaaatcaattgtcaatcccagctaaaggatgatagccacagaacagctttattgtcatgaaactaaagggggacttcatcaggagtgttagaatggatgaaatgaggtttcttccctaacttaacattctgcagaaaattcctgattcaggtaaaaaaagaatgagattagtattacataaactgtgagttacttgaagggagatggtcttaaacaaagtaatctgttataaaactaacatcctttaatgggaaaccctgacccagatacagctcatacaatgctttctgtctgcagcttggcctcctcaccacacattccctcccaacaaagcataacctataccccaaaacacttttggctattgttagaatcatactgagctctcctttagggaatcagttcatagcaaccagatattccctttttgttcattttctgataataaaaactgcagtttttaaggttgatgaaataacaattctgtgttaaattgtaaggacactgaaaaccactagcattaaagtaggaattgtgcaagacattggagccttgattaggtatcatgcactacagtcaataaaagaaataatrrgaaaacaaaatgtkcacaagatctgaggtctttcactttgctttcatacccttaatcagtttacatcttatgctttgtggggcaatcaaaccaaatgacttttacaatttcatccgttttaagtggtaatgttaaaataactcacttcggcctaaaattactataatttaacttaaaaaatcaaaatacttataatactaaatgattttaggaataagaatttgatttataacattgtcagttggacatttatctaaacattcaatatacaaagttataaagaaaaatacttctaagatatttaagaaaatgcaatataatagatcataaattaggtgcaaaaacaagacacttacagacatttccagtatatacatccattttcaaatattaccaaagtgtaaacataacttaagataatcatccttctatttctactcttgaatacagtgaaacttccagtgtgatccaggtcacttttttcccaaagataagcaaaaatggcaaaaatttacaatagcaagcactaatattaccagatttttactaatttagtgttttagtatttgaaaagttttgccaaattgtatcactcattaatagtggcttcttatttctcatgatgttaaaaaataacaaagcaccagacatctcaagacattaatagagtatccaatatggcagtttcattatcatacccctaatgaagacagacagaaaaacataatggtgactttgataactgtaaaacacaatgttacttcatgtcaacgtttctgaggattgaatgaagggtctgtacctaatgacaaaagagctgacgcataaccgacaatactctggcaatgaaaagaaaacaggccttgggggtaaaacagaattaaaaatgtccagtttagataatttctgaattcagattttcagataaaaaaaaatcacactgttattaaaatacaagatggggctacaagggagttcccttaatctgttacactcaaaagccttgccgaggctctaaatatggaatacttctagtggaagatacgagatgctgggaacagagcagagattcccataaagtaaaagaagtaaaatactgtccaagaattcatgtggcctcaagtcttattctgaaacttgtcctttggaaagtggataacctcatttttagagtcaacgcagca

SEQ ID NO: 94695 - DNA, 20007 bp, Homo sapiens
cagagcgagactccgtctcaaaaaaaaaaaaaaaaaaaaaaaaattagctgggcatggtggcggcgtgcctgtagtgccagctactcgggaggctgaggcaggagaatcacttgaactcgggaggcggagcttgcagtgagccgagatcccaccactgcactccagactggcgacagagcgagactctgtctcaaaaaaaaaaaaaagaatattagatcttaattaaaaggataattgtgtggcttatgtaaattacccccaaaatacagttttaatgtgagtaaggggttaattttttttcttttttttttgagacagtctcgctctcgcccaggctggagtgcagtggcgcgatctcggctcactgcaagctccgcctcccgggttcacgccattctcctgcgtcagcctcctgagtagctgggactacaggcgcccgctaccactcccggctaattttttttgtgtgtgtgtttttagtagagacggggtttcaccattttggccaggctggtctcgaactcctgacctcaagtgatccgcctgccttggcctcccaagttttgtttgttttttatttcttctaaacaaaacaaaacaaacaggatacacgtgcagaacgtgcaggtttgttacatgtgccatggtggtttgctgcacctattgacccatcctctaagttccctccccttacccccgactccccaaaaggcccaggtgtgtgttgttcccctctctgtgtccatgcgttctcaatattcaattcccacttatgaatgagaacatgctgtgtttggttttctgttcctgtgttagtttgctgaggctgatggccaccagcttcatccatgtccctgcaaaggacaggatctcattcctttttgtggctgcttagtattccatggtgtatttgtaccacattttctttatccagtctaccactgatgggcatttgggttggttccatgtctttgctattgtaaatagtgttgcaataaacatatgtgtgttggctgagtgcagtggctcacgcctgcaattccagcactttgggaggtcaaggcaggcagattacctgagatcaggagttcgagaccagcctggccaacatggtgaaaccccgtcactactaaaaatacaaaaattagccgggctcggtggcaggagtatgtaatcccagctactcgggaggctgaggcaggagaatcgcttgaacccaggaggcggaggtggcagggagccgagattgtgccattgtactccagcctgggtgacagagtgagactctgtctcataaataaataaataaaataaaataaaaaataaaagagatggggtcttgctatgttgcccaggctggtctcaaactcctgggctcaaacgatcctcccatctcgacctcccaaagttctgggattacaggcatgagccatcgcacctggctcctgttggctttaacagaaaacaggaacactcagtactccaggttcaagacatttgaacatagggaaggcagtgaggtcaggcctggccacccctagggagaggacaaggaactcagtccagcaggtcgttccaggaatacgaatgtggggagggagccggatgacacgtcaggccagcgcagtcccataggagcggctcggggaagacaactgacttcctcctcatttgttttgaataacgctttgtgctagtggtgctggaacttcaaatgctggagatcaggctgcaccaccaatgcttctccaaggatagcagcccccagggtgggcaggtagtttttggattgggaaggcaactatttcccgagctctgaaccgttttatttattttttcatttagagacagtgtctcaccttgtcacccaggttggagtgtagtggcacaatgatagctcactgcagcctcgacctgcgctcaagggatcatcccgcctcagcctcctaagcagcagctggtactacaggtatgcaccactacacctggcatttttgcttttgcttttatcgttgttttttgtttgtttgtttgtttatttttttatttttattttttttttgagagacggttttgatacgttgcccaggctggtcttgaactcctgggctcaagcaatctgcccgcctcagcctcccaaagtgctcctgcactgttttaaggtcctgtctgaagtcctgtgaatgtactgtctgaggcacagtcctgataaatcctgctacagatgtgaacagcacgacctaagtattggttctgaatttttcctcacactttagctaaggtgccggtccactgctgaagtacctacgcaaataaatctttagggctaaagaacagaaaatacagtgtccaaggttgagagttaccggcaagctataactcctgttggctaaagaaagggatgatcacatgtttgaccccgacgtgatttgaacacgcaaccttctgatctggagtcagacgcgctgccgttgcgccacgaggtcttggaaacctaacttttttgtgctttagatggaccctaaagagttctttttcccttttgtaattcagagggaagtgtaaaagtaaacgaaacaggatagaagcagacgccaccacggggttcgggaataatcctcttgtcattcgggaaaattcacctgcctcgggctgtgtagtctcctaaggagacacgtttgggaagccacagtggaaaatgtttcacgcagcttagcagagaaggctggggcggggttgtcagggatccggattctcttctccccagccctctgcttggggagcactaagaatttgcacgagggccagatcaacgaaagagtactatgttcaagctgggggcggtggctcacgcctgtaatcccagcagtttgggtggccgaggctaggcggatcacctgaggccaggagttcgataccagcctggccaacatggtgaatccccgtctctactaaaaatataaaaattagccgggcgtggtggcgggtgccagtaatcccaactactcgggaggctgaggcagaatcgcttcaactcgggaggcggaggtacagggagccgagatcgcgccattgcactccagcctgggcgacagagcgggactccgtctcttaccaaaaaaaaaaaaattatctttggaataatctgctccctccaacccacccccaccttccccgaaacaaccccagttcattaactaaaacgttggcatttatacatatacaaatcacagctcctgcgccctcagtccttccatccaccccaggggatcgggcattggcgtagcttccctccggcctcttcccggggcctccctggattccagtgtgcggatcctgggctccggcggctctgcgtccccgcgagtgtccggcctggggaaggggcgggggcgcgggtgccactggccactcctgccttttgctgctctcctgcacgtcccacggaacagcggccccctcagcttcccctgccccagccctcaagtccatcagctcccggaggctgcctctgcccggacacagtgcagtcgggtctcttcggtccctcgtagtcttccaggtcccatactcgcaccctgcaggaggattccctgggtggaccaggaaggtccccaggccgattcctgccccacggaggacctgacacctggggtccggcagaccccatccctgatccttcctgcggggccctctgccccagccctggcatctgccccagccctggggagtgggagttacataggccctggtgcaatgggcagggtttttcctgggggttcagttgcttagggacgcagcccaaggcgggtaataaactcctaagactacattatacccgcattataccgtggatggtcaacacacaccgcaaggagcaagtgaaataaactttgaagacagagagttcaagggtgcaaggaaccgttgagaacactcctaccgcagtacactactatatttgctggggttggttggtttgtttggagacaagttctcactccatcacccaggctgcagtgcagtggccccatctctgctcactgcaacctccgcctcccaggttcaagcaattctcccgcctcagcctctggagtagctggaatgacaggcgcatatcaccacgcttggctactttttgtatttttagcagagatgaggttttgccatgttgaggaggctgatctcgaactcctgatctcaggtgatccgcgcaccttggcctcccaaagtgctgggattacaggcgtgaaccaccgcgaccagcctggtttttttttgtttgtttgttttttgttttttttgagacagagtcttgctctgccgcccaggctggagtgcagtggcttgacctccgctcgctgcaacctccacttcccaggttcaagtgattctcctgcctcagcctcccaagtagctggaattgcaggcacctgccaccgcgctcagctaatttttttcgtattttcaccatgttggcccggctggttttgaacacctgacctcaagtgatccgcccacctctgcctcccaaagtgctaggattacaggcgtgaaccaccgcacctggcctgtttgttttgttttgtttttttaaccatttttaattcccactggcgatgctggccgtgctttcacacacctataattgtatatgcgattttcactgcctggggagaagggaagcagacatggaggagccccacaatgccacctctgaaacaagaaatgtagcagaatgaactgaacgagggtggcatttatttggcaagttatgactacaagacctgctctcgaggttgttttaaaaatcggaggcccggcgcggtggctcacgcctgtaatcctagaactttgggaggccgaagcgggtggatcacgaggtcaggagattgagaccatcctggctaacatgttgaaaccccgtctctactaaaaatacaaaaaaatacaaaaaattagccaggcgtggtggtgggcgcctgtagtcccagctactcgggaggctgaggcaggagaatggagtgaaccccggaggtggagctggcagtgagccgagatcgcgccactgcactctagcctgggtgacagagcgagactctgtctctaaataaataaataaattaattaaaataatcaaaattgaagtagcccgggcagtgtggttcatgccggcagttccagtattttgggaggccgaggtaggaggaacgctcgaggccaagagtttaagagcagtctaggcaacatagggagacgccttctctacaaaatataattagctgggcgtggtggcgtgcacctgtagtcccagctacttcggaggtggaggaagaacgcttgaggccaggagttcaagaccagcctgagcaaaatagagagcctctacccccactcctcaccacactgtttccaccaaaaaaaaaaaaaaaaaaaaaaaaaaaaaaaagctggaagtggtgatgtgagcctgtagtcctagctacttgggaggctgagatgggtggatcgcttgactccgggagttcaaggctgcagtcagccgtgatcaagccactgtctgaaaagtaaatgctcgtctgaaaagtaaaaaataaaaataaaaatagactgggcgcggtggctcacgccggtaaccccagaactttgggaggccgaggcggggggatcacgtgaggaaaggagttcaaggccagcctggccaacatggtgaaaccctgtctctactaaaaatacaaaaattagcttgctgtgctggtgcacgcttgtagtcccagcgcggcctcttcccaccttttaaggtagagagcccaggctgaggcgcccctctctctaactgcaggaccctcggatttttgctgtccaggcacctcgcccttcgcttcatggccttctagtagttccagggtgttcgcagttgtgacctgcttcccgtgagcctctgctctacgcccctggatggggcgtgcattccctacccagcagccctcgcgcggtccggcacagcggacaccaggactccaaaatggcgtcagttggtgagtgtccggccccaggtaaggctgtttggactccgtggtggaagcaggagccagggtccagggtccagagccacactgggagagaaggaagctgcggagctgcctgccctttgctcaggcacttcgccacgacctcacttgaggcgcgccagaccccgctccgcctgcccaggcgcgccttcctgctgcccagggcctgcgccaaccgggttaggcgtggagggtgaaggcatctggggcacgcgcttctgggcctgggaatgcgccgccttgggccactgttcctctttccgctaagaaatagccgcttccctctcccgctgcgacccagttgctttgcacttgaatgttaggcgcagcttttgcccttttttcccaaggcttaagctcagatgaagctccaggaggagctcaggactaggactgtacctgataccatgtaaggttcgatgcatatatgttgaatcagagaggcgaggtgacctgttcaaggtcacaactcgtgcgagggctgagctggtattcaaacctgaggattcgtggtaaatgaactttattctctaggacggccttatgactagcaggcttttccgagacacccatgtgtaaatcgctacattcatcccgctgtgcacactgatgatttttgtttgtttgtttttgaatagttagccctagatgctccatagtagccttgtcagagagtccttgttgggaaagtcgattccattttacagatgagggaaataactgttcgggatgtggtgtggcctctctgaggtcacacagcctgatagtggcagagttttgattaacacatgtgtgtcttagctcagtttctggtttttttttatcattttttttttgagatggcgtttcgctcttgtcgcccagggtggagtgcaatggtgtgatctcggctcactgtaacctttgcctcctgggttcaagcgattctccagcctcagcctccgagtagctgggattacaggcgcaggccaccatgcccagctaatttttgtatttttagtagagacgggctttcaccacgttggccaggctagtcttgaacccctgacctcaggtgatccatgtacctcggcctcccaaagtgctgggactacaggtgtgagccactgcgtttctgtattctttttttttgacatggagtctcacgctgtcgcccaggctagagtgcagtagctgatctcgtctctgcaacctctgcctcccaggttcaaatgattctgctgcctcagcctcccaagtatctgggattacaggcacacaccagtacctacgcccggctaatttttttttgtatttttagtagagatgggtttcgccacgttgaccaggctggtctcaaactcttgacctcaagtgagtcacctgcttcgacctcccaaagtgttgagattaccagcgtgagccactgcgcctgacctctggtttgtttttttgagatggagtctcgctctgtcgcccaggctggagtgcagtggcgcgatctcagctcactgcaagctctgcctcccgggttcacgccattctcctgcctcagcctcctgagtagctgggactacaggcgcccgccaccccgcccagctaattttttgtatttttagtagagacagggtttcactgtgttagccaggatggtctcgatctcctgaccttgtgatctgcccacctcagcctcccaaagtgctgggattacaggtgtgagccactgcgcccggcctccggcctctgtattcttaatctcagcctagagaaatgaagaggggttcagaatagatgagagggaagctgttttcccctcagtaaaatgggcataatagcattcgtcgtacacggtagttgtgttaaggagacaacctgtgaaaagtgaacactggggcattttgtttaagcatagggctgtggtcaagagctctgaactaaggatcaatcgatttagcatgtgaaagacacttggaacgctgcgtggcccacagtgagtactcagtcggtgtgagctggtcatcccagcctttactttgtgacctttaggcagggtcatgtcacatgcctggcctattcagcatcacccccggtgaagaaattggagtccatgtctcttaggtattgatgatcttttaggtagtgtctgtcaccagaggacaaagacagtatttcatgagcacataaagtgagggaaatatgaattagcagcagtagataagatcgcggttggcaaactatggccagtgagttggatttcgtgtggcctgtttttgtctggccatgagctcagaatggtttttttgtttttatattttatttttatttatttatttattttttgagatggagtcttgcttttgtcgcccaggctgcagtgcaatagcacgatctcagctcagtgcaacctccacctcccaggttcaagtgattctcctgcctcagcctcccaagtagctggaattgcaggtgcccgccaccacacccggctaatttttgtatttttagtagagatggggtttcgccattttggtcaggctggtctcagactcctgagctcgtgatcctcctgccttggcctcccagagtgctgggattacagacgtgagccactgtacagggcctagaatggttttttgtttttattttatttattatagagatggggtctcaaactcctggcctcaagcagtcctcccatctcggccaaagtgttgggattactggcgtgagccactgcattgggtcattttctgtttttaaaaagattgtttaaaaataaaatagactatgctatgaagaccttatgtggcctgcaaatccaaaaatctttattctctggacaacccccaggttggatttagcactcaggagagacttgctatttccatgtggcttcatagtaatgaacagtatgtttcctctcgaggatctgtggttctacaaccattactgagaatctgtcgtgtaccaagaagtggtggggatattcgcaccttcaggtagctcataaccaggcagaaaggtggtaatagttctcatttacatagtacctagggccaagtaccaaggatttcacaaaggaggaaactgagaaggagtagtaccttgcccaagggcacacacctacaaaatggcaytaaacccagaatggcactagacccaagggtctgctctgtctctgaactctactgggtctctttatgtgacccagtgattgcagatggaagcttcagtgctgcagaggagcgggtgtgtgtagagttggggtgggagttccaatagggcaaccaaggactgaggccttcctttgccttccagtgaaagagaaattcgtggaataagtatagatgcatcttggatgaactggatagtcccttgcagtggcacgatcttggctcactgcaacctctacctcccaggtttaagcgattctcctgtctcagcctcccgagtagcggggactacaggcacacgccaccatgcccagctaatttttgtatttttagtagagatgaggtttcactatgttggccaggctggtcttgaactcctgacctcgtgatctgcctgccttggcctcccacagtgctgggattacaggcgtgagccaccgtgccctgccaaatgtgttaggtttttgtttgtttttgacacggattcttgctctgtcacccaggctggagtgtagtggcacaatctcagctcactgcaagctccgcctcccaggttcacgccattctcctgcctcagcctccctagtagctaggactacaggcgcccgccaccacacctggctaattttttttttttttttttttttttttttttagtagtgatggggtttcaccatgttagccaggatggtctcgatttcctgacctcaggatcttcccgcctcagcttcccaaagtgctgggattacaggcgtgagccaccgtgcccggcccctgatgtgttggttttaaggaaacacccttgtcttcataatacagagatagaactaggaagaaaaacaagttgtaaattgttgccttttttctcctgtgatgtgccaggctccatgccagcccctgaacatggtaatgagatgcagaatatgtctgcatagtttatgtgaatgtgaaaaaatggcttcactggatcaggaagtgagttttctggcctggtgcggtggctcatgcctgtaatcccagcactttggggggccgaggtgggcagatcgcctgaggtcaggagttcgagaccagcctggccaacatggtgaaaccctgtctctactaaaaatacaaaaattagctgggtgtcgtggcgcatgcctgtagtcccagctactcaggaggctgaggcaggagaatcgctagaaccaggaggtggaggttgcagtgagccgagatcatgccactgcactccagcctgggcaggtgcagtggcgtgatctcatggtgcagtttcaccatgttggccaggctggtctcaaactcctgacctcaagtgatctgcctgcctcgacctcccaaagtgctgggattatagtgtgaactactgtgccctggcctccctcagcagactcttgaggctggtcctgacagagccttagtctttcctttgatctcaaaatggagaagaaaccttgggattatttaatctggctcctcttgtggttatctttgagaaggcaccgtggtcctagactctttgccctcaataggacatctgctaaaagctttttaaaacttatcattagctgggtgtggtggcacacacctgtagtcccagctgttcaggaggttgaggcaggaggatcacttgagtccaggaggctcagtgaggctgcagtgagctgtgaccacacctgtgaataaccagtgcactccagcctgggtaatggagtgagaccctgtctctcagaaataaataaataaatctttgcagggagaacaggggagacgattcctttcttaaatgcatctccttgacgcccacaggcccacccactccctggccctccatagtctcctcctgggcccaaatgtgaggacagtacagcctcagccaggagcccttctgattccttgttctcagactcccattggaatacgatctggggccgttcagtcatttggagtggtttttcgtcacttgacttctcggaatgtgttatctcttatttttatctctggaaattgttggtgtccgtggtcccaggatgctggaggtggaaattccttgggtttctttcattatacttgctcgggctggcccatctggtgagtctgccagctgtgtgaacccaggtgctgtttgaagcccttccccagtaaacaagtgcgtcaagtctgagtgagacacttggcaccgtcacaccgctctccttccacatcccctcttgtacgttctccagcgacacatccccagggttggacagggcaccctcatattggcttcagggacataggagggccagtcctgaccccacgttgtgtgtgtgactttggtcacgtggcccaacctctctgagtctatcccccctcccctcctttaaggtaaagacatgaagtgcttgttgtgaagattaaataagctaataatgtcaagtaaatgttagctttgcagtaatctttcctgtccgccacgttactgcttttttcgagacccttttctggagttactcccagcaagctgttactcagacgtcctgttggttaataaagctgtccctgcagcagttctgctattgtatagactcagtcttaaaatagtgggcttgatgtgacatatttcttcataatattgtgtatgtgcagcctctgtgtaattgcattatgcacctttattgcatagttgaagcagtggcaggaaaggatgccatatgtgttactgggagattattcagtgggtattttttctcactcttccgtttcagtaccagtgaaggacaagaaacttctggaggtcaaactgggggagctgccaagctggatcttgatgcgggacttcagtcctagtggcattttcggagcgtttcaaagaggtcagagycttgtggatgtctgtaaatgaaagcaaatctctgggtcttcagatctcttttttgccatgaattaatttgggcaatgaaggccttgttgtctgaaagcagtaagttatgtagaggatgacagggagggatgctaggccttggacttctgtggttgattggccctttcaaaggctggctctgagatattacagccaagaacatgtttcctgttgcttggaatcagtatgtctgcctctgtcttagagaaatcctaagacttctttaagaggaaaatgaattggaaccgtagtgggcattagtctataatatgatgctctcctccctgccagaacttcaggacaaatatttgaaatggcctrtcttggcctggtgtggtggcttatgcctgtaatcccggcacttcgggaggccaaggctggaggattgcttgagccgagtttagaccagcctaggcaatatggagagaccccatctctataaaaaaaaccacacaagaaaaattagctggctgtggtggtgcatgcctgtagtcccagctactcaggaggctataagctcacagccaaaggggagaggtggaatccaggtaggcctagttcaggagctggtatgtgcttatagttcaggctatggggatgagagaccttactggcatttgtgcttgtcatctttatcagccagtgaatgcagggcgaggggcttaaacagccagagcaggactaggtccctgaatgtcagccagactcaactgtgtgctcaacttcactcaaatgtgaagcccagcagggcagtgagcgcctcttgcgtttgcaggttactaccggtactacaacaagtacatcaatgtgaagaaggggagcatctcggggattaccatggtgctggcatgctacgtgctctttagctactccttttcctacaagcatctcagtgagtgcctctgcggcgtcttgcctttagttcccatgagagggtggtggtgactgatttcattagatacagcagcccaccttcttctgaggctgagggacctttagttaaagttccttatgtttccacctaaaagaattggagggacctatcagagtacagtatgtgggatattstttgaaatgagaaaattgtgacaaagagaacacaggaaaatcaagatgaagccagggtaaagagagtacttagaagcattctttaaaatacagcacactgtgaaaatttggctcgattttcctagtagccaatgcagaaagagaaatgagttgagtgggataatctggtaccccagaaaagcatggctgttccggctctgaggcttgagaggagcttgtctggtgggagattggcgggaggtgtcggtggcagcctctgactaggctgtttctgacagtgtagtgtacaccccctacccccacctcactcccattctgtggcaccagggcggtcctgcctctgaaggacgggttctctggggctgtttgtctgagcgtgtgttccctctgttccttctggaaagaaagtggttggccaggtggcaggttggctcctgaggtgtctttgtgccccccgggtctgctgattctgcagagacaccggcaggcgggtcrtgggtcatctctgaagggaattctcaggaaggctttgtgtgatctcagcctgcttcctgccatgctgtgccttcactgtaaccttttaagatacttaccatcttgccttcctgacttcagagcacgagcggctccgcaaataccactgaagaggacacrctytgcacccccccaccccacgaccttggcccgagcccctcygtgaggaacacaatctcaatcgttgctgaatcmytycatatcctaataggaattaacctccarataaaacatgactggyacgtgtgctgattgcctgcctgtctgccgtagccattatcccatgttccaggggctcctgtggcacaaggtggggggaggtcgtctttccaggccgttgaccggtgaaggcctttgtggacttcccagaccaccactctggtcgtgtcccagctccctggagggcagggtgtcatccagaccttcccgaagcagcagtgccgaagtccgtcccttgccatgagtgctgtgggcaggtgcatttgcagacattctggcctttagttggctggccctttatggtgtaacacaaaggcttgcgtacctgagagcgccagatcccaccccggctgtcctgtggctccaggcagggatggcccgcatcctgtgtttctgcatcaccctggggcatcaagggctacagggtgaggtgacccggcactgtctggagagacctcaggcagcactcacgcccaggctgcagggattgtggccctccggctgaggcggcttctctaacaggaggcttagtgggttgggggtgatggggaaaagtgaggggctatggcggcccctccctgcttcctcttcatcagagcctcattgggggtgggatactgtgccccagaaataggtgccaccagacatctgagctgaggtggaggacctgcctgctggctccacagatcagactcccagacttgaccagctgcttgcaggccttctgggcagctgcacttccctttgtgaggctgacatttgttgaaagggacaagaaagctacgccgtgattgcagccagtgtaaaagggttggcatgagacccttaattaatgagacatggcttaaaaaacaagctttaatccatttcataaaaattgttcttgcaattgaacacagccaggcccacatgcccagcakgttgcaggagacagtttcacattttccaggctcaggacagggcagtctcctccacatgccacaggtgtctgagtgacagtgtagacgcctgatgggcaggaggtaggcacagatgatctgaaggggtcatctatttaaaagtctgcaactccagttcaacggacaccttaaacactgtcaggcacgtaccccaagagaaaattaagcccagagaagaaaacctcaggcttgagagccctgtacccctcctcaaccgctgccacctgggaccagggccagcctgaggcaatgggggcacctgaatttgccccaaagggctccctcattcaaatcacagatataggcacagctttaggattcagcagggcagggagggaggaagcaggcgtgagctggccacagctttgaatgacctaccagcccctggcgtcaccaagaactggtgtttaatgaggggaatgaccaccgccacacagaactacctagccaagcccctccccagcagctgcctccctccctggatgaggggagttgtgccgggagtcccagaaaggaggcatcgatgcccagccaaacatgatgtcgactgcagggacccacaggacacatgtccctttttcaaaaaatactaaggcaaaatgataggaaactaacagacgtggcccctcagagtgatgaaacccacgtgtctgcgggccagctcgagccacagtcgcgccaacaagcgcatgaaacagttaaatgcacactcccaacagcggggcccccgggctgctcggagctggctccagctgctgtcactgtccactgagaaaggccaagtgccctttggtgcatctgttggcgtagtgtcctttctcgccacactgggaacagcaggaagtgggggaagaggagagacagacaacaacactgttcaaatgcagttttcaactaagggagtgcccaccaaatcccaaatcatccaccaagtccccagtcgggacatgactctgaaattctcagtggtacagagtttctttcaaattagagggtgagggagctcaggatggaaagtgcagtggtgcagaaactagccagcaactccgcagatgcaagggagaacaaggccgccagaaggcgacctgctagcgacctgctctttcaggcccacaactctcccacctggacacatggcctgcccagggagggactcccaagtgggtagcaggacaaagagaagcccgtggcacctgagctccgccaccccgtctggggaccaagcccttctgcaccacaggccagtcacttacctctgagccaaggtctggggttccctggcaggagatgggagggaacagcatcagaagtgtcccagcctcccctcccttggggagccactgctggggacagagggtgggctgtacccaacgttttccctcgtggctgtgacacacctaagctaccttggggacaggttttgattacaggatcagagagatgggacgatgcttagacttgggtaaggggagcctgcagagccacatgacaaatccagccctgaccctgcctcatcccagtcctgattatccaggcccttccatagcttctctttactctatgactcctaaaacggcagcctcaagcactgaacaaaagggtcaggaggcagctgggggcactgactctgtactgacacccacccctgagtccctgctgccctgaggggctctgcccagttggcacccaacactcttgccagctctattccctggctctgcaattcctgttttctttcttctatgttggccaggatggtctcgaactcctgaccttgtgacctgctcccctcggcctcccaaagtgctgggattacaggcgtgagccaccgcacccagctgtccctgtgttttcaactttgtctgatctgcaggtgtgactctgtatggagaggctgccgatgggctgtagggctaacatgatggctgggggagggaccacacaccctgctcacggcatctggcatgtctgtcggaccccacagctgactctggggaatccaggacttacatgaagtgtctctgacattaatggggtgacaggctgtggacaggggcggtcagccctacctttctaaggctccaggacttaagggcgcttgctgcacagaagtggccccgcttaacaggcctggagggtggcaagataacagctaagtctgctctacacagtgccccacttccatgctcttttatttttttggagacaaagagtctcagtctgttgcccaggctggagtgcagtggtgcagtcatagctcactgcaggcttgacctcctgggcccaagcaatcctcccatctaagcctccccagtagctgggactacaggcgtgcaccaccacacccagcctgttttgtgatttttaatctggactcattcttcagaactccagctgtaggaattgtgtgcgccttgggttgagaacatactcttcaaagagtactgggggttactcctgccacgtgccagggacacaccaatcctggggcgattttagattagaaaacttagtttgtaactttccagccttaaccaaggacatgaatacaggcctagactcacataagggcccattaataacgtcaaactatcaagagattttcctcccctttccccgcttcccacagagccaggagtgaacaggacagttttcgaggaggtttcttgaagctcacccttcctgagtcccattttatgtactgggggaggggatggggacaggggtgctgtaacccagtgtcctgttttctcgggtgtgccctgcaggatccaaggatgcccccaggacagccagcggctccaagggctcacccttccctggatcagtgtttctattttgttcccggcctcttgggggcttccctcacctgcctgcaggccccgtccattcactaggcaggcgttctcaccatcctttaccgtgcctcagtgcagtgtggtaggaaataggacagtctctagcccaccacagtggatggtaactagactgtaactttatgcttacaatcagcaaaaatgaatgttttcatttttctcatttcaccaaacacatggggcatgagggaatggccactgacggtaagggaagaccccaccctgtcccccagcccagggactcaccttgtaacaggtgacctgctccagtggccggggtccccggttgcccgcgctgctgttttgactctgcatgaccccgatgacctgcggggttctctgctgattgggagaagagttctgactcgttaactggatcaaggaggacgacctttgtaatggcggattgttactttgctggaaagagttacacaacacggttttactgtggaaaacacgtgcacgcagactaccgatggggacaggaaaaaagagggcgggactcgtcccgcaaacggcaggaagcagggcttccacgacggcccacctcaggacagtgggcagcagagaaacatgtggtgatgatggcagaagccactgcccgaaaaacaccatgcagacacacaaaaacgaaaaataaaatagaaaacaaaacatcaaagagacaagaggaggtctctggggcagtggggcgagggcatgatcaggccttactttggtttctgaggttctggcttcaggtcaggatgaacgcttggttcagccagatgtttagcagcctacacggcgagcaagtcacagaaaaacagttggagcctgacacactgagctgcgttctcgggctgagaggaccctcctctagggagccccaccaggaggagggccagggctcctggggtagggattccacagcagggcctcctccccaccaggtgggctcctggctctggcccgtaagtgcagaacccgagctagaaaacccccaggttggcacggctgcacctacacctggaattcccggctttccccatcaagagttcaatgtgattggcgcctccacgcagctacatcctccgcatcctctcctggctgttcagcctctagcactgagcggggctggtggggctttggcagccagtccagagcccagcagggtaggaggtgaggcattgggctcaggaggtggttgggcttgatgggcctgttgggaaccctgcctgatgcccgccctgccttgacgccagcccttcctcttggctcaactcccgactcccataaccaaactcagggtgcccttggcattgagaggctgctgcagatccccatgtgtctacagcatttccccctctccttgtgcttgaggggacggaccagctgcttggctgtggggcccctcatctagaaaactggagccagccgggcctgttctcgcgcctcctcccaacctccactccacaggagcaggggcggtgctggccagagtggtcagttctgctgccacacctgctcctgcccagtggtgtcacctcaggcaggtccctccctctggtagtctcggtttccctatttgcaaaataaagggtctgacccaggagcaagagcagcagacacggtgcccaggccgccctccatgccagccccaggggcagacgctgctgaaccaggttagccccatctcacaacgggtggccagttgcacggcgcctggactgtgtctgctgctgcgcttggccttgctgaggttctagggcaagaggccctccgtctctcgagggagatatacacggctttgctcctgacttttcttcgggaacttgggagactcccctcctctcccaagttgtccagcggggtctaaggcagaccacacccctgggggacactgaggttctcgctgtagaaaaggcacttccttcctaccgaggaaggccaggcacggtacctttgctggaggctgtgtctgctgyggcagtgggggctgctcggtggttcccatgggcagttcaaatcgagggctggtcaccagcagccagaggggatgagaacaagagaaggagtggggtcaggggatgagaagagaagccaggccatgctcttaaattccagccctaggaaaatcacactcagctgccccagcacaaagtgactgacacaagctgcatggatggggtggtggctggcactcagctctgctcctgggaggccacaggagtggcggggag

SEQ ID NO: 94696 - DNA, 21111 bp, Homo sapiens
ttcgcccgtcaccaccaccgtccccagcgtgcagcccatcgtcaagttggtctccaccgccaccaccgcaccccccagcactgctccctctggtcctgggagtgtccagaagtacatcgtggtctcacttcccccaacaggggagggcaaaggaggccccacctcccatccttctccagttcctcccccggcatcgtccccgtccccactcagcggcagtgccctttgtggggggaagcaggaggctggggacagtccccctccagctccagggactccaaaagccaatggctcccagcccaactccggctcccctcagcctgctccgtgatgctccacctgccagcccccggattcccacacatgcagacacgtacacacgtgcacgtacacacatgcatgcacgctaagcggaaggaagttgtagattgcttccttcatgtcactttctttttagatattgtacagccagtttctcagaataaaagtttggtttgtaagttctgatccactgcagtccttcctgcatcagataccacagaaaggctgggcccattgccccctcctggtcttgggactgaggactcttcctgcccagattcagagtccgaaggccaggaggctggaaaagaaacgactgtcctcccgtgggacaaactgccaccttggccgtcgtgtcctcgtttggggagcctcagatccgaatgacataggcgtcgctgtggcttaggtgtcgcacccacttgtgggggttggcattgccgcatggcctgaaggccagcctgaggaatcggacctggaggccagagcacgtgtgccggggaagctcgaaggagagactggcagggcccagccccagaggagaggccgaggtggagagcccatggctgggaggtcctgggggccctgggacgtccatctgtgaggggcagaggcagggagaggaaggagggcaagaagctgaccacgctgggggaaccaggcagcagctgcttcgggagggtggggtgggggctgcaagtgaatgtgggaggagaggggctgggggtccacagcgaatacctggaaaaggcctgagagttgagagcctccttgcacccgaggcaggtcccagcgaagggctccctctgccagctcagccttctgctctgggctgctcagctcctgagacaggctggagtttggaaagggaaggtgctgggcttggcaccttcttgaggcagacccgtcatgctgagctcactctctccccaggaatctccccgtggtgggtgcacacactcacctgaccacccctcgaggcagggggaggtgcagcctgacattgagggcttggctacagaggagacgggaacaaagtcagccccaggaaggcacagtcccttgtcctgttcctcttcaatgtcataacaggatttcagcacaggtgccccccaccttcccaaattctacagcctctaccttaactggcttctgaggctggcagctgcatctgaagggagaagcagcaggtgccctggccctgtcttccgtcccatagagctgaactcagccaggccagcctcactcttacctctttgagagcaggtcacatcgcaactttagataaacctggagcctggatgagagggtaaaacaccacgactcaggccatcttctactggcatctcaccattccccaccagggacctccatgtggggctgtgtgggtgtgggctgtactcccaagagggaaaagggctgaagcccagcccaactccattagccaaagctttttccttttttttttttcagagagatggggtctcactatgttgcccaggctggtctggaactcctgggctcaagtgatcctcccgcctcagcctcccaaagtgctaggattacaggtgtgagccaccggccgcaacccaagcctttttccaatttgcactccatcaccactaccaccacccccactctgcagtgagtcttgggaacatacaggtcttggcttgggttccaaggtagttctagaacccaggaaattgtctcaccggcctgagcctcggtcccactgcacagaggggaagagccggaaggggagcggtgaggggaggtcatcggagagttggtaccgcatcacagtcagctgagagaccagagagcaacaaggttagtttggtctcacgaccccactgcccccttccccatggtggacggaatttatgaggccaccccaaccctgacctcgccctgaggtggttgcaagcggaggattcgatgagactcaaattcgtccagattcacagagctgtgaaacgagacttcatcgacccggattcctggcccataacctggaaagagagagagagagacttctctcctgactcctgttttgggagaggagcaaggagaggggaggctctgtctgacttctctccatgaactctggcaatgacctactccaaggggagaaagacccactttctcctcacctctcagctctgacttccccacacaaaactcttccgtcaagccaatgcgcatctctgtcggaggagagaccatcaggagagctcagcaatgccatggtttaagacaccaaggaacccgccctaaccccaacccttggtcctgcctgcagatgcctcaccagagccgctaggaaggaagctcttgagccgaatctctccctgcacatccaccttcagcagggatccctgagaggcaggggcgtcaaggttagagtctttttttctttctttttttgagacggtctcgctctgtcgcccaggctggcagtggcgtgatctcggctcactgcaacctccacctcccaggttcaagacattctcctgcctcagcctcacaagtagctagggttacagatgcctgccaccataagtagctaatttttgtatttttagtagagatggagtttcactgtgttggccaggctggtctcaaactcctgaccttaagtgatccacccacctcggcctctcaaagtgctgggattacaggcatgagccactgtgcccagccttttttacttatttattttttttaagagacagggtcttgctctgtcatccgggctagcgtgcagtgactcgatcttggcttactgcagccttaacctcctgggctcaagtgatcctcctggctcagcctcccaagtagctgggacagcaggtgtacactaccatgtctgggtaatttgtttatttgtattttttgtagagacggggtctggctatgttgcccaggctggtttcaaactcctggccccaagtaattctcccacctcggcctcccaaagcactgggattacaagcatgagccactgtgcccggccgttgctgggagtcttagccaccccaccatgtttcccaagtcccatctgtcctcagctccaggtttgggagctcaaacttacattagatgctatcagtacagacaatctctcgaccacatccaaaaaaacttcattcttttggctctgagaaagagagagaatttgggtggttggaagcagaatagcctatgttctgaaatggacagacagggagaaagaacaggacagtcaaagctacagctctagggtgaggacatgggtgatggaagggatcatctcccacctccacccacatctgggggggtgggagatgtgccaagatctttttctttttttttttttttttttgcatttttagtagagacaggttttcaccatgttggccaggctgctctgaaactcctggcatcaggtgatctgcccacctcggcctcccaaagtgctgggactacaggcgtgagccgctgtgcccgacctaagatcttggactcccggatcccagagcaaaaccagagcgtctgaccccatggatccttccctcacctggtcagagcgactggacaggacggggcggctggctgcactgctgggggccactttgctctgttgtgtctcagccccaaactgtaaagcatccaaagcaatcaatcatcaggtctgacaaccccagccaacccctcttttctttcctcaccctcctctttccctctactgaccaagccaacgctgctgaggtcaaagaggctgaagggcttgctgaccacagcttccgtctggatgaaattcctcagcatctccgtggatgtggtctgtacatagccatagtcctagtggtaaaggaaggacagtctgagtgatcagtggagggaaggggtaaagagggggagtggggccaggcatggtgactcactcctgtactctcagcgctttggaaggccgagacgtaggagaatggcttgaggccatgagttcaagaccagcctgggcaacacagtgagactctagtctctacaaaaaataaacaattagctaggcacaggggaggctggggcaggaggacggcttgagcccaggagttccaggctgcagtgagctataactgcaccactgcagtccagcctgggcaacagagcaagaccctgtctctaaaagcaaaaaaaaaaaaaaaaaaaaaggtagacttggcctcctaaccacggcatcccacagtagaagagcagatgtatcttcaggggaattgggtaggggccacagaaggggattgttgattctcaccagcacttcatccaggagttcgtataccagagccacattgcgggagatggtcccctcgcccagggagccacagtaatcgcccagaagggtggccaacctgaggaaacacttggagcgtgtattttctcctcctctcagacccctcctagctaccaggtgcccagcccaaccctcctcacctggagagcagttctaggaggctgaagggagaaacgttttctgaagttgtgaccaccaaatagaggccgctgtgtctgatgtgaatgaaatgacggccatggtgatgctgagacacaggcagggagaagagaggcgttaaaaaaagggaggtggagtgatcagaacccaggagacctgagctcggatcccgatgcctcttactagtcacaacagcagtgcctttgggagatacatgacatatgcctgggcccagcttcccaatgtggaaagggggttaattacactaactaccccgagttgctgaggatggagtcacgcagggagctgggcctggtgtgttgctggcgcccgattgactctttttttttttttccccacccccacctaccccgagagggagtctcgctctgtctcccaggctggagtgcggtgtccggatctcggctcactgcaacctctgcctcttggattcaagcgattctcaagcctcagcttcccgagtagatgggattacaggcgcccgccaccacgcccagctatgttttttttttttttgtatttttagtagaggcggagtttcaccatgttggccaggctgatttcgaactcctgacctcaggtgatccgcccgcctcggtctcccaaagtgctgggattacaggcgtgagccaccgcgccgggcctcacgttagctttatttggcggaatgcaccccccaagtggaatctaccaatgaaccagtcctgggagggagctggcgcccacccggcccgacgggaccccgctcctcacccgcctcccgccactggttaccatgacaaccggggactcgtctcctggcagtcccgtcagcttccggtagaagagctcggccacatcccggccgccactgtccccgcggactggcgggtggaaggactcagtgaaggatcctgcgacacaggctggccctgggcgcccctcccgcccggcccctccgccccttcccagccccaagggtctaggatacagtctttgtagatgagcgggtcccccttggaggacagaatgaagaattgggaaatcatggccgttctggagagtagacaagaagacggcgaaagtcgggcctgccccgccctgcggccccggaacaaaagaacgcgtgtgcgctggccctttaagagcgattctcctccgcccgcgccagctcggaccgcgggaaacccggcgcctgcactaccccgcccggagatwcccttccgacgcccgcaccgcctccccgtcactcattctaggcccgcacggtgattggcttgcggctagcgggaggtgaagaaggccgccttgtccgattggcccgcacgcagtggcgccggtcacgtggggggcgacgtttcgcgccaatttcggttggccggccacagtccaccgcgcggagattctcagcttccccaggagcaagacctctgagcccgccaagcgcggccgcacggccctcggcagcgatggcactgaaggactacgcgctagagaagggtacgggtctacgagcccgggagggcgtcctgcgcggggagcctcccggggaacacctgttggtgtgagctggggtcttgggggaccggggtcggcgggttctggggtgcgcgaggccagaggcagggtcgagctgcggcctggctaaggcccacggggcctgggaagcgtgcggggggccatcgatgttgaagaaaagctagtaatcccacctggtaaaggtgttagggtcgtggggttgggggcttgggggcgcgctaacccggctgggggctgcacagggaaaagtcgcgcccaggacctcaggagagtcttaagggctctgggctcccgtgcccgctttccttcgcgcttttgggcattcccaggttcccgcgccctccccaggcgcgcgtaggccccgggggcgggcaggccggggccgctgcgcgccgggattggccgtttgaggccgccctccgagcggaagtggagccgggcggaagtggcgcgaggaggctggagggagtgtcgtgtaaacagtgtccttccgcgcggcggccgcggagagagctgcggcccgggggggcgtgcctgggatccggagcttcgctcgggcccgggaaaggcggcagtgggctgggatcgcggtgtctctgggtgtgatggccaatggctggactggctcccgccctgggcggaggaatcccgagctgtgaagcggctggaatccgggcccatgtgcttctttgtttactaagagcggaagcgatggcgggagcgggggtggggtgcggtggcggggtgcggtggcggaggtcccggtgaaatcaggggctaaggggacccaaagaaggcgggggatcataggggtggaaagaaagctgagaacyttgagaccggagtgtgaggggccaacggggaagggcgctagaattttaaactaaagtagggaccggaattcccctggggagatgttggatggccctgtgcactgccacgggctctttattcttcgctggttagaaacagacttgtgaaaaagagttatgcccactttggggagacttcggtaggtttatttaaatgctcatattattaattagttcataggtcgtgttttaagcgaaaatgggtatctaagatttgtcttaaagtttgtgtcttacggttttacatttcatgttacagaaaaggttaagaagttcttacaagagttctaccaggatgatgaactcgggaagaagcagttcaagtatgggaaccagttggtaagtctaagattgggtaaagggaatggggagcggggtgcttaaggagccataagcagcagcttggcttgttttattaaagacataacaattagagggtttgagggctgaaaagcgagtatcgctctgtgtggcgctgcgttctcccctgtggatgcccagagcctgtgctgagttctcagtgatgcattttcacatatgaacactggtgagcaaagtgaatgtggctctgaggtgtttctgtctcttccccacttgaggttcggctggctcatcgggaacaggtggctctgtatgtggacctggacgacgtagccgaggatgaccccgagttggtggactcaatttgtgagaatgccaggcgctacgcgaagctctttgctgatgccgtacaagagctgctgcctcagtacaaggagagggaagtgagtggttagagaacaatggcaaacaaagggcgaggcgtttaagcttctgtagagaggctgctcagatactgatgttttctgagcaggcagaaaggaggggcacttctgcctggtgttctctgtgctctcctttccccatcctgttgctcttttttttttttttttttgttcttctcctttaggtggtaaataaagatgtcctggacgtttacattgagcatcggctaatgatggagcagcggagtcrggaccctgggatggtccgaagcccccagaaccagtaccctgctgaactcatgcgcagattgtgagtggtctctgtcgggaaagatgtagggattggttctccaggatcttgtttgtgactgttttctccccttagtgagctgtattttcaaggccctagcagcarcaagcctcgtgtgatccgggaagtgcgggctgactctgtggggaagttggtaactgtgcgtggaatcgtcactcgtgtctctgaagtcaaacccaagatggtggtggccacttacacttgtgaccagtgtggggcagagacctaccagccggtacgtgtggagcaagaagcaggaaagcacttacccattagttgttttgtagagattaatttgatcctgtgatgcctattgttttatttggttgtaaaagttgcctgtgtgttcgcctttcattcttgggtatgtagtggtctttctacctattttctgggtgtttgttgttgacccagagtaagttcagagggttcttgacacttacaagatgtctgccatgaagagaaaatgtgattcaaaggaccgacccaatggggctcttttccttctgasttcctttggtgtttctgttctcacatcctagatccagtctcccactttcatgcctctgatcatgtgcccaagccaggagtgccaaaccaaccgctcaggagggcggctgtatctgcagacacggggctccagattcatcaaattccaggagatgaagatgcaagaacatgtgagtttggggtacgtggccctgggcaggtggatcgggagtccacttgaatcctgtagtcacttgtggaatggcaggaagaaagaagaacaaaagagggaagtgcaggagggaggtggaactagaatttcctgggagccttgggaaggggaaaggaggtctcagcacccctgctgtgggcttgtctgtggctgggtagcctgggagcctttgagtgggatgcctagggagggaaggttgggtccttgtccatttctcctagtcttatgtgcctttccctcccctagagtgatcaggtgcctgtgggaaatatccctcgtagtatcacggtgctggtagaaggagagaacacaaggattgcccagcctggagaccacgtcagcgtcactggtattttcttgccaatcctgcgcactgggttccgacaggtggtacaggtaaggaagagtttgacatgaggaatggatcatccccttttccctcacctactcattctacccacacagagaaaagagcagcaaaaccccaaacaaaacagaacccagggatttgtcaagaaattgttagggaatccagtgatgggcaagttgaagggattacatctgtatcctggcattttcctgcccaagggtttactctcagaaacctacctggaagcccatcggattgtgaagatgaacaagagtgaggatgatgagtctggggctggagagctcaccagggaggagctgaggcaaattgcaggtgaggggcagggkagagagaggaaattccgtttacatcctagctcccttttcccccagaaaataaaacaaccttaacttctctacagaggaggatttctacgaaaagctggcagcttcaatcgccccagaaatatacgggcatgaagatgtgaagaagkcactgctgctcctgckagtcgggggtgtggaccagtctcctcgaggcatgaaaatccggggtaagaagaaacaagggagaggctcagggtggatgaagtcatttaggaggaaaaaaggatgacaagtgtccctgtaggtcacagtatgagtggacatcttgccttcgtggacacagggagggcttagaaatagtgctgggtgttaggggtaggcagaactcaaaattgctctgttgttggccaagcactgggagaagagtcattccagggytgccttcccttcctccaggcaacatcaacatctgtctgatgggggatcctggtgtggccaagtctcagctcctgtcatacattgatcgactggcgcctcgcagtaagtagttgggctttgcgggaggtgaatatagtgacagacaggaccacagtgtttattcaaaaagtaggggtgcatgtttgctcacgcctgtaatcccaatgctctgagaggctgaggcaggagaatcatttgaggcgaggattttgagaccgcttccatgtctactaaaaagttttgtttttgtttttgttttttttgagatagaggcttgctctttcgcccaggccggagtgcagtggcgctatctcggttcactgcaagctccacctcctggggtcacgccattctcctgcctcagcctcccgagtagctgggactacaggcgcccgccaccacgcctggctaattctttgtatttttaatagagacggggtttcaccgtgttagccagatggtctcgatatcctgacctcgtgatccgcccgcctcggcctcccaaagtgctgggattacaggcgtgagccaccgcacccggcctaaaaagttttttttgttgtttgggtattgttttgttttttgttttttttgagacggagtctcagtcacccagactggagtgcaatggcatggtcttggctcactgcaacctctgcctcccaggttcaagcaattctcctgcttcggcctcccgagtagctgggactacaggcgcgtgccaccacacttggccactttttgtatttttagtagagacagggtttactgtgttgggcaggctggtctcgaactcctgacctcgtgatctgcccgccttgttatcggcctccgaaagtgctgggattagaggagttagccactgcgcccggcctctactaaaaagttttaaaaattggttgggtgtggtagtgagtgcctatagtctcagttacttgggaggctgaggccggaggatggcttgagcccaggagccaaggtttcagtgagccacagttgtgttctgaagagaaccagtgggaggggaagggggacattgccagtgccccacagatcctcgggcatctcaagaaggcctggtggagggagtggaatgatcccagcgcaggcctcgcctccctggcccgtttgttgtcttttgcttgttctctttcttgttctttctctctcatggttccttatttcttctcttccaggccagtacacaacaggccggggctcctcaggagtggggcttacggcagctgtgctgagagactccgtgagtggagaactgaccttagagggtggggccctggtgctggctgaccagggtgtgtgctgcattgatgagttcgacaagatggctgaggccgaccgcacagccatccaygaggtcatggagcagcagaccatctccattgccaaggcyrgcattctcaccacactcaatgcycgctgctccatcctggctgccgccaaccctgcctacgggcgctacaaccctcgccgcagcctggagcagaacatacagctacctgctgcactgctctcccggtttgacctcctctggctgattcaggaccggcccgaccgagacaatgacctacggtgaatgaagctcaacacccaaagagaggtcccctgtaatgatcygtgtagggaggaggggaggtgaatcagaaaacaaattccacgctcctggaaaccccagagcctcccctttgcagcaggggctggtccatggttctcagggaaatggtgggttggggctgaaatgctgatgaggatttcccgggaaagcttgtccctcctacactgtgaggaagtggcagagccaaaggagggacacctaagaggacatgggtgcgtagccctaaaaagggtgttccttctaaccttccctctgtccaggttggcccagcacatyacctatgtgcaccagcacagccggcagcccccctcccagtttgaacctctggacatgaagctcatgaggtaggagagctgggtgmgggtgggcaaacgttggcgtgggccgtgcgagcctcctgaaaaagtgcttattagtcttagggtgtgtgtttttcacaccaccacttcccgctacagacatgtccagagcctcagatcagcttttaagtggaaaattccacacttcatatcatagggacacaggaaattttgtttcctacactatttattttttttgagacgaagtcttgctctgtcacccaggctggagtgtagtgatctcagctctctgcaacctctgcctcccagattcaagcgattctcctgcctcagcctcctgagtagctgggattacaggcgcacgccaccacgcctggttaattttttgtattttagtagagagcagtttcaccatgttggccaggatgcccacctctgcytcccaaagtgctgggattacaggcatgaaccactgctcctggcccacaaaaatatttttaataaaattaccttcaggttatgtgtatcagttgtatatgaaatacaggtgaatttcatgtttagactggagtcccatccccaagctatctcatgcatatgcaaatactccaaaatttaaagtttaaaacacctgctcccaggcattctggatgataatctctatcgctattttcccatgagcctccagtgttctttccggtttttactcccttttaaatattctgtaaacagttctctttaaataaaatatatgttttgccatgtcatgcgctcagaggaggggtctggatcctctcttaatgacagacggatttgtcttacaaaggccattttcccgaaaaaaataggaaataacttggaggatactggtgggggctatacgtttggtgaaatccatcagtgatattcaagccaagcaaataatcacccactaatttgtgttttccacttaaaattcttggaggggaccatgttaaatggggagccctggtacagaaaacaacatgggctcatattcactcccttccccatctccctcttctgcttccccatgaaccttcccccacaggcgttacatagccatgtgccgcgagaagcagcccatggtgccagagtctctggctgactacatcacagcagcatacgtggagatgaggcgagaggcttgggctagtaaggatgccacctatacttctgcccggaccctgctggctatcctgcgcctttccactgctctggtaagtgcccaaattgctggagggccatctgttttgacccttaaagggstagctcyttrccgtgctctcattgccgcctycccacctcccgctccagccctgccggggctaaagtgctgacagtgcagatagtggtcctctccgtgctaccgcactgtgggtacttgctgctccagcagggcacgcacagcgtccgtggagggaaaggccttttccccacttcttaaccttcactgagagggtggttggggtctgtttcactccatgtgtcctagatcctgtgctacagaccttcctttctgtcctcccgtcttggacctcagtcctgggggctccaaagtgctgttcgtgcaggtagtgtgattacccaacctactgctgagctagcacttcccgagcccccgggacacgttctctctgccaattgtcttcttggctgagctccccaagctccatctgtcatgctggggagcccagtggcgttcaaaagggtctggtctccctcacaggacagctgaactccgggactggccagtgttgagaggcggagacttgggcaattgctggacgctgccctgggcattgcacttgtctcggtctgacagtgccggcccaacactgcggatgctggggggaggggggattccactcctgttttgtgagtaggcgacccatgggctgcccagccttaaagccagaacaagggtgtcccctgacctcgttccactgccctcctcccgttcccatctttcccccctaccttccccttaggcacgtctgagaatggtrgatgtggtggagaaagaagatgtgaatgaagccatcaggctaatggagatgtcaaaggactctcttctaggagacaaggggcagacagctaggtgagtggtttagtgaaggacaaagctgtgtcacttkgtcttctgtggccatgtgtctgaggttggcctcaattctaacactggccaccattgttctctgttgatgtcgagcattcctgtttgtatcctgaccttacacacccactcatttccttcaggactcagagrccagcagatgtsatatttgccaccgtccgtgaactggtctcagggggccgaagtgtscggttctctgaggcagagcagcgctgtgtatctcgtggcttcacacccgcccagttccaggyggctctggatgaatatgaggagctcaatktctggcaggtcaatgcttcccggacacggatcacttttgtctgattccagcctgcttgcaaccctggggtcctcttgttccctgctggcctgccccttgggaaggggcagtgatgcctttgaggggaaggaggagcccctctttctcccatgctgcacttactccttttgctaataaaagtgtttgtagattgtcatcttctagcctgggcctgacttccattaaaacagggttttgtgcgttttttagattcctgttcgtttttatgctatttcatccactcagtaaattacctgagtaaagtgcatctccctgccaggcccccagtatagacactggggatgcggcaaggactaagcggtccctgctgtttggagatacttaagatggggctccactttttgagccccccgactcccttatttggtcttatactgcctgtgtgcaagtcaggctctggggatatggcgccagtatgaaatgcagggtctcttggtttttccccttttctagcagacaggtcattacttagttcccaactcccactctaaagctctggttagcgggtgatgaaaatcagcacaagtgatcacatacagcaatcccaacctttagaccacttcctagctgcctctccaaaatatgtagtaaacggtcattgagaaactctccctcctggtaattcacagtgcccacaggatcaaggcttggacttctttctaataaaaatctgcttactatcccttcttttttgcgtatgtgaaaaacaagttaatttagctcaggaaagtagtcaattatcatgtttataaggttgggtgggctaggtaagatgatgtagagggtgacattaaagtgtagaacagagaccacttaggtggaagcaggcagccttggactttgctaaagaccagtccatgtgactgacatggggtcacttcaaatggtagtgcctccctcactgaagagcatcagaagggcttctgagcaaggccagaatgagcctcgatgaacatccaagttgaccaaccagtgtggtgcctaacagaggacagagccaccagcaggggtgctcaggggctgctccccttttattaatgacagcggtttctctcaaggaagtgtagtgccctcccctttgggatagttgcctgacccctgtccatcagcccttcaagtaccctcatcagaaaaagagcccgcgcattctcctgccgatgccttgtcggtcgtagaggacattgaacttgttcacaaactggytcatggtgttgcacgttttggtgatggtgccgaggtaggccatgagccccacgtcgttgcattgctgggagggaacagaaaggaccagttcctcgggatccctcgtggcatgcccggggaacaacagtccccagtcctgcacgtgaaagtgacagcataagccccgcctccccatccgggttttacactcacatcataaaaatctgtcttgaacttgtctgtgctgagcaccgggagacagtgacacagagcataggcctcccgcaggatctcatgattaaaggggacctctcctaaaggcacaaaaagagactacattagtttggatgctgtcacttccccaggagggagaggaagaatgccagggaagcccctgtcctacccgcttcagaggccttgacgtactccaagatgagcttgacgcggctgtgcagcatcttgatggcgctgtgctgtgctatcaggtgttcagccactgcaaggggatgaggacaggaggaggttgagacgggatgtggccacaccttccaaccccacttccaaggaatcccctccattaccagtggagttctctccactgcctgttgctgtcattcgggctacgtggtctacaccaatgcgttccgcttcctctgtggccagagtgtaggtcagctcagcaaacagcattgtggcctacagggcaaggtaacccacaaagggagaatcaaaagcaggaaagaggccaagagcaggatctgagggttgaagggtagggtattacctctccattgattatatcaatgacagactcaaaaacgctgacaggaagctgtgaaggagacggagaaacctgaacactatatgccaacatttgggctagctgcttttacacatttcctctcatcttcccaagaaaccaatgaagtagggattacctcctttcacagtttggagattaaatgactaagccagagtcacagctggtaagtggcatctggcattccccaatagaggagtgtcacacagtaaaaggtatagcgacaatcatgacagagtaggcatggagtattactcacatctgtgtgcttggtcatagggttcaacttcagaaagagggggctctcgatgatctcrcacacctggaagagagggacaatgcacaggaagtcagtgccccctacctttctccttcccctcattctccattctctgccccagcatgcacaggtgtgagcatgcatacctgcttatggacgtggatgtccgaggggtcaggtggcccccctgtggtataccaacccagaaactccagctccttgaacacctgtttaactagaggggaaggggccagaacatatagtaattctttttttttttttttctgagacggaatctcgctctgttgcccaggctggagtgcagtggcatgatctcagctcaccacaacctccgcctcccaggttcaagcaattctcctgcctcagcatcccgcgtagctgggactacaggcacgcaccaccatgccagactaatttttgtatttttagtagaggtggggtttcactatgtttgccaggctggtcttgaactcctgacctcatgatccacccacctcggcctcccaaagtgctgggattagaggcatgagtcactgagcccggcctgacatagtaattctttaaaccatccttcctcaatgtgaagctcctggtgtattttcaccagcttctctcctccctcctcaaatcctggctcagtttagaataactactcccttctatcctgtctcctctcatcctttgctttcttttgagaaagaactctgaacgttttctttttctgagatctctccagctactcttcactttttctcccctgttcttggtctcctctcctgtttctttccaaccctctccatcttccccaccctgtacattttttttttaactcccactcctcttccccacatctattccactctcacactgctcctccttggtgtaataatattccttgtcaatgataatcttctcttccacggtgtgggacagcagctcaaaggagttcatcacctcgatatttcggccctcctgcttgccaatcagagccccaatcactgggaaagagaatgacatggaaaaggtgagggtaaagaaacttctatgacctgagggtctgagatcagtgggaaccatgtattggggaaacgatgatttgggggagggggaattggctccagtagaggaaggggaaaagaccactgcctgggggaggtgagcaaggagaagagactggagtctatgcccaacactcaccctgcacaggccgcccctcctgggagcgcatgcggatccagtggtctgagatgttgagaatgacaaggggatggagagcgacggaaacactcccagtcactccgcaggccatcacgctggggactactaagggtggagggaaaggagagagggtgagagtccgggmcccacgttcttccctggagatggcagtgggggacggcggagcccgggccacactttcctcccgtaacttatcccagggaaagatgttgctgctccgccctcctcccttctcccgggagcacagggaggcctcaacgaacccctgaaggaggtctccggaagccacccccgcacggcccgttacctgctgcatccacctccatcccgctgcttcctccggtcccgttcgtagctgcagccgccgccgccgccgccgccattttccccgcgcccgccagcctcggccccgcccccttccttcccggcttccgtaaggcgagcggcgcatgttcggtgtccccgcggcgtgcggcgggcctggcgtccggggagcaggcagttcccgggtcgcggcgggcggcactcggtgcggggacgcccgacgccctctgggcctcggtgcctagcgggttttcccagaccctgtccccgcctgtcgcctgcgggtgacctttgacaaattaacgacttgatcgtcctcgtctgtgaaattgggataagaacgcctagttcttaaggctgttgcagaaggaatgacatgtcgtgttatttccctcacaataaaatccaaacaactaaccacaacctgcaaggccctgcctgatctggccccggcctggcctcttctagcccttgatcttcaggcttcagctgcactggccctcatgtctggtggtggtggtggtttgttttgttttgtttgagacagggtctcgctctgtcgcccaggctggagtgcagtggcctgatgtcagctcactgcaccctcaaactcctgggctcaagtgatcctcccagttcagcctcccgagtagctgggactacaggcgcaccccaccgcacccagctaattttattatttgtttttattttgatagagacgggggtctcactaggttgtccaggctggtctccaactcccgggcagaagagatcctccatcctcagcctcccaaagcactgggattacaggcatgagccaccgcacccagctctccgtgtgtttttcacatgctttagtttcccattcaaaagcctgtggttccttctcttgttcatcatggtatcccctgtgaccaacacggtgcctgacacattggagcctagatactttttgagtgaatgaaggaataattaggggtggaatctggtgttgagttagttgctccatcttgtgaaagttgcagataccaggacaaaatcacattgtcaggtccaaacaaattggagccatgagaacaccaaggagaaggtctcatgcttgcatgtctgagataggaattatctcaaggactttcgaaaataaccccacaaggccaggcatggtggctcacacctgtaataccagcattttgggagaccgaggccagacaatcacttgaggtcagcagtttgagacgagcctagccaacatggtgaaaccccatctctactaaaaatacaaaaattagccaggcgtggtggcaggcgcctgtaatcccagctactcaggagcctgaggcaggagaattgcttgaacccgggaggtggaagctgcagtgagctgcgatcgcgccactgcactccagcccgggcaagacaaagtgagactccatctcaaaaaaaaaaaaaaaagaaagaaagaaagaaagaaagaagataactccacaaggccaggcatggtgactcacgcctgtaatcctagcactttgggaggccaaggttggaggatcacttgaacccaggagtttgagaccagccttggcaacatggtgacaccttgtttcaacaaaacatggaaacaaaattcgctgggtatggtagaggcatgccgaggaaatttatgcttgggaagtgagtcaaaactcccttcctttttgttcccagatagctgtaattccacaaccctgtgtcatagcctcatacataagccaggctcctacaatggcaaaaggcatatacctccccagatggtcttcctcacaaattgcttgccaggaaattcctcattagcctctgaatctttcagcataaacattccccctataaaccagccctaatccgagttctgtgaaatctcatactgacaatgttgattacaagcttatcttcccaattatagaacaaggaagagaccaggaatcatccctccacctatcctgagacagatgcataactgactttttcctccactccctcttttcaaatgtttattgtatcttacataaaatgtagatttactgaacactaatgagaaactcacaaaaaagtaacaatgtgcagcagggtgtgcagtggctcatgcctgtaatcgcagcactttgggaagcgagtggatcacttgaggccaggagttcaagaccagcctggccaacatggcaaaaccccatctttactaaaaatacaaaaattagctgggtgtggtggtgcccacctgtaatctcagctacttgggaggctgaggcaggagaatcacttgagcctaggaggtggagattgcagtgagccgagatggacccactggactccagcctgggcaacagattgagactctatttcaaaaaataaaataaaataaccatttgctggactgggtgcagtggctcacgcctgtaatcccagcactttgggaggccgaggcaggcagatcacaaggtcaagagattgagactatcctggctaacactgtgaaaccccgtctctactaaaaatacaaaatattagctgggcatggtgacacgcacctgtagtaccagctacttgggag

SEQ ID NO: 94697 - DNA, 35976 bp, Homo sapiens
  misc_feature (1)...(35976): n = A,T,C or G
ttgggagtggtggtgcataactgtagtcttagctactcaggaggatgagctggggagatctcttgatcctgggagatggaggatgcagagagccgagattgcactactgcactccagcctgggtgttggagtgagaccttgtctggaaaaaagagaaagtgttaaggggagggacaaataggtttcaacaggcctcaaggacaagcaaaggaggacccaaaccacccccatcccctgggcagcagctgtgccagctggcagggctcactcaggccctgaccctcctacctgccaaccatgtggtcagcaaatgagttttcccacaggtgctgaccttcgcttccttcccacagtagacagctggcaccttgggccttcttggtgccatgggcaggcaagtgggagtaaatgagtgctactgggtggcagcctagggggcccagctgcctgccttgggccaccctgcagaagagaccaggcaggcttgggactgcttaggagcacccagtgtgtctcttctcaactactggtgactgtggcaggggtacccagccctctttggagagcagcttggtgcaaagacaatgttccttgataagcctagattccatctatttcacagattaacaaactgacctgcaggaggagagacaatagcaccatagtaggagaagaagcccagaggtcaagtccctcctcttccattcaccctcacactaagccctttaacctttctgggcctctgttgtctcagctgtaaaatgggaattaaataagactctctatttcttgaatgttttacaactctaagagcttggatttgatcactgccatttatctgaggtcagcttctaaaccaccaccacctgattcctttcccgttcttagctctctcccatggcccttaacatctgcccttgggactatatgccccagatgtgtttgctcagtttactcctcattaccttggacattgttacctcttgggtgatttcttatcccctttagaaagggtttaagtgatgtgctccttcagggtgactgttgcttgaatagaaaagcaacatcctttctctaggttgcagtttccaaaatttctggtggggtcccagatttgaaaacaaccttggaagaagatcacctaagtcaacccttacatgctgcttgacttctgccaacctctgctcatgtcgtaatgtcattcaagtggggcagagagctcattcccccaccgacaaaactccattctattttccaacgagtctaagctctggaaagtttttctttacactgtgcaaatctgcctcagtgagtccttccagagcaggggtgactgtgatctgacttggcactcagaacagagtctgaataaagcagaccaggaaataacaataattgcttcttgcctaaaggaactgcaacctcctctttttttttctagctccgctttctggggtggatgttgaccagatgatatgccactggccactcagtgagaagttttctttgactattcatggctagagccaggtgaggatgatgatgggacccacaggttatctgaaagtgccttagctaaaccacaccaaaggttatgagcaagccacagaatgggttggctactgcatgggtggctaaaccaaaaatcaaagaactacacaatccaaaaccctctgtctttcctaagaaagacagaaatcctcgttaggaatatagagtcaggaaaggaaggtgcctagctaatcccttaaaatggaccacaggcctctgtacaactgcagtcattctctctccgggggagtccagtgcccagttgcacctgtcagagcctggaaaagaaatactccaacctcttccttccaccatcccacctgctgatacctcccattggctaaacccaatcagagggccaagggtcaagtagcccagggaggaagcccatagaggcagcctcagggcaccgagcagagagtaagaagaagggggactacatctggggacacaaataggatcagctcatcaccaacctaatgaatcattaactttttttgttgttgttgtggtttgttttgttgttgttgttgttgttgttgttttagagacagggtctccctatgttgcccaggttggacttaactcttgggttcaagtgatcctcctgcctccttagcctcctgagtagctgggactacaggcaccacatctgggtaaaatgagtcattaactcttaattccccatgttcacatctggcaagtatttactgattacttactatctggcaggtgctgtgctaggctgtcacaacatagcagtgactacacagaacttgacccttttgtcaagacaagacctaaacaaattgtcatggaaatgtcgttatcaattgggatactttctatgaaagcaaagataaggaacatgacaagagatgttaaggaaggtctggtttcaatttgaggattgaaaaaggcttctttgtaggctgaaccctgaggtatgactttgatttaggcagggaaaggggagagtgtcaggaagaggaaatagaatgtgaaaagaccctgagacaagcactttcaagagaccacctggagtttagtgagcaagggagagacacaggtgaggccagggatggagagaaggtccagagaacaccacactctaaaggccacggtaaggagtttggatgttttcccaaaagctaccggcacccactggtcccatgtcatgggccttgggcttcattcagcctcatgttgtcattccaggctcctcagtggggtcacttatgcacatcagtgttgagccttagacctaacctcctctctcagctgccgaacacctccaggggcagtgggtggtgacgtcaggctttggatttgctgagacataggtgaccccattcaggcttcatcatcactacagattccagaagacttttttttcttctttttaaatttatttcatttattttggagacagagtctcactctgttgcccatgctggagtgcagtggcatgatctcagcttattgcaatgtctgcctcccgggttcaagcgactctcatgcctcagcctccctagtagctgggactacaggcatgcgccaccatgcccggctaatttttatatttttagtagacacggggtttcaccatgttggccaggcaggtctcgaactcctggcctcatgtgatctgcccaccttgctgggattacaggcgtgagccaccacacccagccagaaaccttgacttttcttaagcccattgagataagaaagttcattcttggcttccctcagctccacactcttccagcctcagaattctcagaagagagtttcaaaaaaaaaaaaaaaaaaagctatttttctacacatgaaaccctcaggaaattgctggcaacctcgtgcttctgggattgatcaaaggccaggggtggaatgggaagcagctagagctcccatccagctgctggtgggaattacgctggtgcgaccactttgggaagccgtctggcagcatctcctcaagctgaacacactccaggaccctcacaatactcctgggcataaacccaggagaaatgagtgcatatgtctaccaaaagacctgcactagactagaatgtccttagcagtagtgttcataatagccccaaactggagaattcagatgtccaccaacagcagaatggataaacaaattgtgctgtattcttacagaactatatcaataccatacagcaataaaaaataattactgatacacgtaacaatgtgaacgaatctcaaaaatgtcttgagggggagaaaagcaagacgctaaagagtacatactgtattattacatttatatgacattctagagcagacaaaacgaacctatgatgatggaaatcagagtattgttacaagggtggtgatggtggtagaaagatctggctgctggaaatggttttttttttttttttgagatggagtgtctctgtcacccaggctggagtgcagtggcgcgatcacagcttactacaagctccgcttcctgggttcacgccactctcctgcctcagcctcctgagtaactgggaatacaggtgcttgtcaccgcacccggctaatttttttgtgtctttagtagagacggggtttcaccgtgttagccaggctggtcttgatctcctgaccttgtgatccacccgcctcagcctcccaaagtgctgggatcacaggcgtgagataaaactatacttaggttttcttttttttttttttttgagatggagtcttgctctgttgcccaggctggagtgcagtggcgggatctcggttgactgcaagctccgcctcccaggttcatgccattctcctgcctcagcctcccgagtagctgggactataggtacccaccaccacacccggctaattttttttttgcatttttagtagagacggggtttcaccatgttagccaggatggtctcgatctcctgaccttgtgatccacgcacccaggcctcccaaagtgctgggattacaggcgtgagccaccgcgcctggcctgtacttacattttcaacttaagatgtatgcagtttggtgtatctaaattacacacccatttaaaacatggcaggatggcacctggttattcacctaggttcttctgtagcagtgaagaaaagaaaatacctccccttcttatctccaggtcaaggtacagtctgtgcagctcagaaacacttttaaaacaagctatattatttctaaacaaagttgtatttgaacagtgttcatgttcattttattctttttttttttgagacagaatctcgctttgtcacctaggctggagtgcagtgacgcaatctcagctcactgcaaactctacctccccagttcacgccattctcctgcctcagcctcccaagaagctgggactacaggggcccaccaccacacccggctaattttttgtatttttagtagagatggggtttcaccgtgttaaccaggttggtctcgatctcctgacctcatcatctgcccgcctcagcctcccaaagtgctgggattacaggcgtgagccaccgcgcctggcctcattttattctttggagcttcgtctgtgaggttgcgttcatttttgtcctctgtctagactctctaatagggaaggtagccctccacctaccccacccccaaagtaagtaaggtgtctgtcttcaaaaacagtcagttccactgagcaacaagtctcctgacttcctaggcccgcacaatctgtcaagagcaacaggacgacacgatgggtttgggggatcatgtgtccaaagggattttgttccagagatgctatgcgcggcatgatgtttccctgttaccactttgggaacacaatctcttggcaactaaacctgtaaactcagattaacagagctctttcccttcccaaagttggttttcctttccttgaatcttacttaataaacattgctgctcccagggttgagttggttttatgtgtttacgataagttaggttcaaagcgcccacgtgcagtgccttatctatcctgccccggcctttcctctaaggagtccaaaggataaagcctggttataaaaggccacagccaacctgctgggctgtgagtggaagctctggtgcagcatggtaagtcagggccccatgtgrgcaggggatttggcagggcgggggcagcccaggctacaagagggacgtggcccagaggcggggaagccaccacagtggagcccctgagtccagggtcctagtgtgctgctgtctaactcctgtgcactgggaggactcagcctcagggtccccacctcaagggagagccctgtggggcccgggttgcggggcgtctgttctactcactgtccttgtgacccgggctcctgacccagctgggtcctgcccctgccagcctcactgtgcgcatgsgtctgtgtgtgtctgtgtttccatccatgtagatgctgcccccttggaccctcggccttctcctgctggccacagtcagaggtgaggatgctgtcaccattcctttagggagaaagtgacatgcctgggctggcctttggtgaggcagctagaggtatattaataattattataatgattatgaagagcattatcgttacttggagaaaacaattgtgccactcagagagtgttgactctcaggcagacacagggcaacgtgccggacacagagtatctcccgtaaccctcctacttggccaccttcttcctgcaaagactctcacggctgggagacaagtggagggtgtggtgttcccacctgatcccaatgcccttgtccttgcctgcagaccaaagtcatgtggatgtgccctctcccaagaamgcccagtcctgccaggcaagcctgcctttctgccatcaagcccacrtgtcctcttctcagagtcaccgtttctgtctctccagtttgttcccccgacctggttctgtccagaggagatacagatattcaagttctacttatcctaaaacacaaatcacctccgtttcttttggagccccctgagccccagcctgctgacttcccatctgcctacrccttcacaggcgtgcttcctccgggagtctttccctctccgtgggggctgcctcacctcctctcctgccagaatacctcactgcccaatttggycccccaagtcctgctgtaggagacatggtctccttgggtccctgtgggggctttcttctgccttgtgactcttcccccttgtcttctcaaccccgccagcccactcttggcctctccttccatcctggccatgaattaaggccaggctcctgacggcagagaccggggtgggtgcgactgctcctccggccatacaayccctcttcatctcctttgctgacctgcagcctcctcctgccccaaatgtggacattccccaaggctcacgccaggctctctcctcatctctctcctcctagggccttccttcttgcccagcttcctggtcttcccgagttgcaagaagccctatcagggccaagcctcaagcctcaagcctcactctcacttccctgcccccagccttctcaggcttttctgcttttcagccccctgtactcgagtcccaaaaacacaggactgcctgtggaagcacagcattgccactgccaccaccacctcccctcaacctcaccaactcacaccttccaacactttcctgctctccacttaagagagcccaggtgtcttgcattcgagccccttcatttaaccagctacctttcccctggggcaaacattgcttaagcctcctagagtccacctccaagggtgcaccctcttcctggaatgaattcaacgccatcagtattgcttccctattagagctcctccctttcaggacagggttcatatctcatttatctttgtgtcccctcaagttctagctttattcccagttaaacttcttgggttcaaatcctgcctccaccactagctgtgacctcaggtagcttaccttgtctctctgtgccttggtttcctcagcagtaaaatggagataatactaattccatatttgtgttttcaggcttaaatgatactataccagtaaagtactaacatggtatctggcacatagtaaacaaatataaactattatgcatttttttaatgattcaccaatatttggcatcatcagtacaggagttgaggaagcrtaagagaaaggacccattataatcctttgggttggaattatgtcacccgtagtgaccatatcctgtgatcatgtttatgtcatggacacagaaagtactctcagacttagatgtggttacttggatcatggattacatgtattgagtctctactacacgtagtgtgatacacaagtcattcctgttcttaagaaactyactttttcaaagagcaaaagagaaaatatgaaacggcagagaatcaccctttcaaaaaaatgtgcataaaaggatgacatgaagacatgtgaattggygtgggcacggcctatgctgtgtgtaatagagatgtcaagacaaagtagcaactctgtgctacagagtttgtaggcactcgataaatactcactatttgatgcttacatgtaaagagtcagctgcaagtttcctgaaagaggtggttttaaggcagcagtttgtattaggttggtgcaaaagtaactgtggtttttaccattgaaagtaatggcaaaaaccgcaattattttgcaccaacctatgcatcagcaattccccaatttgcctaatggtaaggggcacttactgaatatgtgtttctaggaccccaccccagaccctctgaaccagaatctctgagggagggacctatgaatgtgtatgtacaatacacctgttccccatactgccgcctgcccccacccgcccttcccaccccgcgacgccgcagcccccaggtgattcttatcatcccagaggtttggaaaatgatggcaaagataaagaccagcactggccttagccaaacctgggctctgtcctgyagagttttcctgtatggatatgacgttgcttctttccagaagttcacacatgtcctgtttgtggctcaccctaggaaaagaggtctgctacggacaacttggctgcttttctgatgaaaaaccatgggcaggaacccttcagcgacctgtaaaattacttccctggtcccccgagsacattgacacccgctttcttctgtacacaaatgaaaatccaaacaacttccaagtaagagcaggcatgtaagcgctgcatggtgggtgtatttgggccgccacagtggagtctttgcatggctgtctagggcataagtcactgccytggaattttccagaaactccaaggcatagaatccaaggcgtagctctcaggatcataaacacctgagtatctgatgaaatctactgatgcctaacccagaaacttacacattcacacacamtggtgcagagaacttcaggggctaccccagcgtaaatgccttgttccctgggaggaagggactatgagcagcatttatggagaagcccaggcctggtgtagccaccggaaagtctgcctcgtttctacacaggagagtggagggggagaagcctcttgggcattgggggtgggggtgggtgtaaattcttcctgaagagctaggagacaggtaggggagaggggacatgtagccacaatagataaaagatgaggtcctctggagcaacctccagttttcagcaggtctgcccatcagaagcagatcagacttgctccagagtgtcagaagtgaccaggagacagtttcaagaaagacattgctgagaatccagcagctcacagctctggtccctgacagagtttagggagccaggtgtctgtcaataggtttctgaggtcacccactgtgggactstatstgacagaccagccttcttagtgcccccagcccagagtcggcttggacatggttacggtgcgtctcatctgtaggggttggtggcatcttctggcatctcatctgtagaggttggtggcatcttctggcgtctcatctgtaggggttggtagaagggggtcgagcagcctgtggcaatttagaagtgcattccaaagtctcacagctccactgaactgaatttgctcccacacttaagcttctggtccaggggttcctcaccttttctgtgccaggaacctctctggccacctggaagaagcctaaaggccccttcttaggtcaattttttgttgttgttgttttttgttggtttgtttgttttttttgagacagagtctygctctgtcacccaggctggagtgcagtggcgcgatctcggctcactgcaagctctgccttctgggttcatgccattctcccgcctcagcctcctgagtagctgggactacaggtgtctaccaccacacccagctaattttagtagagacggggtttcaccgtgttagccaggatggtyycgatctcctgaccttgtgatccgcctgcctcagcctcccaaagtgctggtattacaggcgtgagccaccgtgcccggccaggtcaatgtttttaaatgcagaaataaaatatattggattacaaaagaaacgaattatattgaaaaataattaccaaaacatttaaatatataaatatgtgatatagtcayatatgtgctttttatatatcaytaaataacaagatctaggggttggtctaataactactataatttaaaatattaatgagtataaatgatatttttagatatctgcaataattacattatgacctgaaaatacctgtgacttctaccggggacagagtcacaggtgttgctaataccactgtggtttattgtctagttttgtgattaactgaaatgctagatatggattaaggattaaytaaaatagaaagtctgtgaatttggactttctgaaatctatccacaaccccaggtcaggagctccttctagtctgacccagctttgtgggcattgaagctgtgatatcaattctgaaactggctctaatagactcgtggcttggaaagggcaacattcaaattaatctttttaaattaaaccagctaatcactggcacggaaccagacaccattgaggcttcaaacttccaactggaccgcaagacacgcttcatcatccatggcttcttagacaaggcggaggacagctggccatcggacatgtgcaaggtagggccctaccacttggccactccctggtgagaccagcacccaacacacagattcaaacactgtacccccagtttcccttagactgggaaaagaaatacttcagagagagatgggtcctttttaaaaccaccgaggaaagcccagttccaaagggcatccattaccaagctctctctacctaccaatttctagccaacaatctcctatgaggctgaagacacccagagttcagtcaaaaagtctcgaggtggagactgmagcaaactgctgggcatttatccctgaggacttatgtaaaacccctttgtgatgttaaaaacacttaaattttaccctctaaagcaccgctatccaatagaatgttctgcagtgatgaaggtgttctatatatgcactgtccaaatcagaagccactggccacataagttattcagcacttgaaatgtggctggtgcaaacgaggagctgaatttgacatgttattgagtagtagtagtctgctcacacctgatttagtaagtggtctttttaacctggttgtgttcctaacgatgtgtgagacctcagacacgtcactcacccattccagggttcagtttccatatctgttaagcgggtactagcatgtccagtccatagcactgcagtgagggtgacgttatggcaggtataagaacatcaaagctctggcatgggctaggtgtttgacagacgtgaatgcctatctctggggtgtgcamctgggkgctgtttataaattgatttctctcccttgtttgtcttccccagaaaatgtttgaagtggagaaggtgaactgcatctgtgtggactggaggcacgggtcccgggcaatgtacacccaagccgtgcaaaacattcgggttgttggggcggagacagctttcttaatacaagcactgtcvgtaaaaccctgcctgggccctgtcctgtgggtaggggtcagagaggggcagggaggtaccacgtggcatggagaggcagcctggggacccgtgggcatgggtaggggccggcagctagtagcccagattgcaatcaagaagggcmattcccaagatgaagctctgcaaccttcctctttgcctgctgtcctgaagacaccttgccctatcactgtctagctgtggggcctgaggcaaactaagccttggtttccccttttgaaatagaccttccttgcaggctgttctgcaagggtcagagagcaggctgggctgccccgcagctcccagtgcagaagatgagttttcatccttcgccagcccacgagggaaggccctggacctttctgcaggatctatcgggagggggcggggggagccagagatagggcccactctacccgtgcttgcccagacaggccatacccctggcagggacgaggaaagggagctgggggtggggcagtcccgggmggcaggccgtgtgccwcgcccgcccaggtggcctgcagttggcrtggtggccgctggtcagcactgttgccccgcgcacgagccggcctgcgggactcgcaggctgcaaataggragcggggtcgycctrccccaggcggcgtgctcgagcccgggtcctgcccccatccctggcagggcccggcgccccgctctcagaccagcgggtccccacgcggtgctgtgggacctgacacgctatccctccgcagacgcagctrgggtacagccttgaggacgtgcatgtcatcggccacagcctgggcgcgcacacggccgcggaggcgggcaggaggctggggggccgcgtgggcaggatcacaggtaggggtcgcggggccccgggccggagtcccaggcccccgggtgcgcacctcggaagcctcggccagygcctttccgacggcgaagggcgcccctgatggtcctcctggggacccgattttttgtgatgaccggccttaaatttaaaaataattttccataatgtgtattagaaaatagataattaaaaataaaaatgcattcattttttaaaacaaaggctgggccactggctcacacctgtaatcccagcacttttgtaggctgaggcgagagaatcgcttgaggccaggagttcaagaccagtttggcaacatggtgaaaccttgtctctataaaaaatttttaaagttggccaggggtgatggctctgcctgtagtcccagctactcgaaaggcccaggtgggaggactgcttgagcctaggtgttccaggctgcagggagctgtgatagctccactgcactccaccctgggtaataaagggagactgtatctcaaaaaaaaaaaaagagaaaggaggaaagaaaagaaggaaaggaggcaaggaaagaaagaaagaaagagagagagagagagagagggagggaggggagggaaggagaaaagtgaggccgggcgcagtggctcacgcctgtaatcccagcactttgggaggccgaggtgggtggatcacgaggtcaggagatccagaccatcctggctaacaaggtgaaaccctgtctctactaaaaatacaaaaaattagccgggtgtggtggggggcacctgtagtcccagctactcgagaggctgaggcaggagaatggcatgaacccggaaggcggagcttgcagtsagcggagaccgtgccactgcactccagcctgggcgacagagcgagactccacctcaaaaamcaaaaaaaaaaaaaaaaaaaaaaaaaaagaaagaaagaaaagaaaaggagaaagatttaactagcacattaaatccatgacttaagagctattattttcagagtatggcaaagtaaaagaaaaaatgtgagatggttttaaaaattcgtcagttccacgtaattgtttgaatgtctctactgcgccaggcaaagacagaaaatgcaaatgcacactgagacctgccatatagaaggcgctcagtaaatactgaatgaatgaatgaagcactaaactgaatgcatataaggcaaagacacaaataacttaattttgtgcagccaaatcagtttgtaacttcaccaaacagttcacatcaacatttaatgagcgtccctttgcccaaggcactgggtgaaggatgagggggtattggtttgtgtttatgtagaattttgcagtttgcaaagtcccttctcttacatctcttcatgagggtttcacaacgactctgtaaggtaggggttgtcattattcctgctttccygataaggatacagaagctcagagagggcagacatttgacctggagtagaactagggcaagaatacaggccactgtgtgccccctcctcccacgctctgtttctctctgaagatgacctggggacagcataatacaaagtggatggaatgggctgagaaaggagaggggttagattttccatttaaccatgaggaggtggtgtgtgagctgggtttggaggagaaagatttagataaaggaagaatgtgggaaagrgcacagcaggctggagaatggcgtgagccaaacaaaggagtagatgctagcagctgggtaaggcctggggtcttgcagtctctgagagcagtggccaaatggtaatgtgtgaggacaaaaagaaaaagggaaagaaggggtgtacggaggctacccagatcctccacggagccaggcactgggtatttctgaatgttcatccacaggcaatsaccccattcccagcctttctgtcccagactctctctcccaggcagaccaagaactgcagacccaatccccagaaccatagctgctggggtaggaggaatcctcatgcttagtctgccagtactggctttaaatcccagttcttaagagtccagcctgcctaccttctccctttcagggctggatccagcagggccgtgcttccaggatgaacctgaggaggttcggttggatccatctgacgccgtgtttgtggatgtgattcacacagattcttctcccatagttccttccctaggtgagttcctcaatcccatctcctgctgacctgtgctacagctaatgacattgggtccagatatcccctctcacacatacatacacacacagcaggggaggccatttgaaatagctacaggaatggcttgggcaccaaccagtcaaaatgggtaccagtcccaaataaatagctagttcaatgccagtggaatcagcgtgcagccctgggttaaacaaaaacccttctgtagtctatgaaaggttgtcaatcaatcttcaaactctgcatccttccccaatctaccagtaactagtggggcagatgtattcattcttaaaacttgacctgtacttgcaaaatacgaagttaatttttgaatatttttcttacttcttcagtcaaagctttggttacactttgttttgttggcaactttatcccattctttaattcttctaaaatcagtgttyttttttcaatattttcttatatagccactcatgaaacttgccaataaagggtatgtttttgatgatgatgatgatgatgttatcacttacttagtgtttaccatgtgctacactgaacattttgcatacattagcttgtcaattctgtaacactctaaaaagtgggctttattaccaccatttcatggctgaggaactgaggctcaattaggttaagtaattgacccagatcacaaaatctgtaagtaaaaccaggatttgatcacgggttcatatgctttgaaagccaaagagcctagccatatgctacggctcacaatataacaatataatgttatgtagtctccacataacaatataatgtagacatcaaaattttaaaatgagtaaagtaatacaaattgcaccagtcttgataggtctactggtgcataatggtascagggcatatcaatatggtccaagactctccgagacacacagatgcacatccaaatgtatgtgtctcactcacccaaagctcagcctccccctcatctcacttcctctgccctctcctccgtcctcatcttgccaagcacccatctttgagaactttctgcagagctagaggcagtggtagctgtgataaagggagaatttgccaaaaagggtcttgctgtggccacaccctaactttggcaccagtcacctcrccgctcatctctgcttcaaatattttaggtttcggaatgagccaaaaggtgggccatctggatttctttccaaatggaggaaaggaaatgcccggatgtaagaaaaatgtcctttcaaccattactgatattgatggaatatgggaaggtatgtaaattaaagaagtaagacagcaattgctctgttcggggagaaagcagaatgcatggtctggccttcataatgctgacatttgccaccgtttatggagtgttgtgaaaatgtgccaggcattttcacagcaatgcaatgagatagttactctgattagttccagtttgcagatccaaaaactgaggatcmgaaaaattacataactcaattgggcgtggtggctcatgcctataatcccagcactttgggaggctgaggtaggcagatcacttgaggtcaggagttcaaggacagcctggccaacatagtgaaaccccatctctactaaaaacacaaaaattagttgaatgtgatggcatgygcctgtagtcctagctactcaggaggctaagatatgagagtcacttgaacccaggaggtggaggttgyggtgagccgagatagcaccactgcaccagcctgggtgacggagtgagactgtctcgaaatatatatataaaaaaagttacatagctcattcaaggccgctctatatctaagcccaatttctaactataaagccctgagctcatgccccagcctgtgtatctccctgttgtcggcatcctgggacagcggcttggctggcatgttggctctggctttgaccacctatcctacctgcagcacctgctccttgaagaactgcaggacataggccaagatttgaaggccttgacttgcttgctggttgctgttgttgggtgctagaaatggaaggggactttgctgagaagaagacaaaggagggatgtgctctgtgggtttggggtacacgtgtaggagggggaggcctggaggtctgggagacccatggtggctgctggccagctgtgtacatttctgttcatctgagagagcacggcccatgccctgccattaggcgacctcatagccccatctgatttgctgccccttgctctggccttttttgattcctgttgcccctcccctgacaccaggcttcactctcctccctgaaaagagaggttttgggcctgtgataattttagtctatttttctgagctgggagttccccaaggccaaggactatgttttgcacatttcagacactccagtaccctgctcagggcctcatccaaagcaggcacgaaatatacttttaaattgagttgagtagccttgtgtggcattttaatattccatgtgcttaatgtcaaagagcagagtcgataaagcgatcgccagcatccaccggcaaataaacggagcttttgccctctcaggtaactcctggggagatgtgaccattccaggctccctgaaagcacaccagagtcacaataatagctgccccctcccacaaacgatgagcaaggcacacataataggaacgagtccaggtttaattagagaagcaatgtcgagtgaacaagcccatgagcactggagtgtgtttctattgtgtcaagctccgagtcatccaggcagtgggcactgaggaataattaaatccactttctcctccattatggggtcccagggcagcaattttggatgaaagaaacaattaagtttgaaacaggttctgttgtccagtgatgagcaccagtgtgggcacagggaacgtggcttcagctagaagtcgctgggccgagggccgggagccgtggagtacgaagccaccctgggcacaaagggaagtgttcctttctcagtgggtggcgataaagccccgcagaccccccaggagtggtccgcaggtgtgccagggtcactgtgcatttctccatgggaagttttctaccaagtagccagagaaatgaaaaaacacctttccggactttttctaaagaaaaggatgataaataaaatgcagtaagagagtggccagaggccatggccaccttgccatcrccgcttttaccttgtgccctgcatagcaaagaggaagaatcaaaaagcctggttgatggggaaggcctgcccggtatgtcctcacagggatcctcacagggataggatgcggtctgcagcagcattggatgggccggcatggtaactgtttttaagatggggatgygctgccttcactcacgcatgcgaaggttttcaggtagaagtggagatcctggcttcttatgaaaaaatcagaggaccaggcgatttggggctttgaacatgtgacacctggctagactgtgtagggttagaggggccctttttacagctattgctatcttctcttagtctctctctctctctctgtatgtatgtgtatatatacatatatatacatatatacacatacatatatatacatatatgtatgtgtatacatatgtatacatatatgtatgtgtatacatatatatacatatatgtatgdgtatacatatatatacatatatgtatgtgtatatatacatatatacatatatgtatgtgtatatatacatatatacatatatgtatgtgtatatatacatatatacatatatgtatgtgtatatatacatatatacatatatgtatgtgtatatatacatatatacatatatacacacatatatatacatatatacatatatagtatgtgtatatatacatatatacacatatatagtatgtgtatatatacgtatatacacatatatgtatgtgtatatacgtatatacacatatatagtatgtgtatatacgtatatacacatatatagtatgtgtatatacgtatatacatatatagtatgtatatatatacatatatacatatatgtgtgtgtatatatatacatatatacatatatatgtgtgtgtatatatatacatacacacacttgtatatatcatagcgtatgtgtgtatatatactatatatatacacacacacgtataccctctctatgtctctctcctctgtctctgcatctctcctctgtctatctatcctctctctctgtctttctgaatctctctctttctcatcactatctctttttgtgtttctttttctctctccatttctctctctgtctctgtctctctgtctccccctccaccggctctctgtccctctctgactctctgtctctctctctccccccaccaactctctgtctctctctgatgctctctctttctctccccctcaactctctctatctctctctgactctctgtctctgtctctctctcttcccttaccaactctctgtctctctctcccccaccgactctctcgtctctctctgactctctctctctcccccgaccaactgcctctgtctgcctctctctatcactttctctctctctctctctccctcaccaccccaccctattcccagcccccagccctcctcattcatttgtgttacatgcctggcccctggaagagtggacaaaggtgcttgtcaggacatgtcactcctccacagtcacctagccctgagtaggtccctgctcagcaaatgccccaagatattcaggagccgacacccatcggtgaaatgtgcaggtgattcttccttagtsagaatgagttgttcacacttaaaagtgaaaggcctcctttgagctcccgggacctttgtttttttcaggaattggtggctttgtgtcttgcaatcacctaagaagcttcgagtattactcaagcagcgtcctcaaccctgatggcttcctgggctatccctgtgcctcctacgatgagtttcaggasgtaggttaccccaggaggctgaggaagatgttgctggccctgtttggggtgtttttgtgttcctgtggcttagaacagaasaaagagatgtaactctgcaactaatgcagggaggtaatggaaattctgcacctcacaaagccatcttcccccaggcagcagggtgggctggagggggaaggcacagacctgactgtgctgggcccttactagggtccccagttgttcatttagaaaaatttccaatttgcaaagaaggtgaaagaagaataatgatgaatactgtacacctgtcacttagatgcaccagttgctaatattttatatrtgtgtgtgtatgtatactttttctaaattatgtgaaagtaaattaaagacattatgacatgttacttataaaaactttagcctccatctcttaaaaacaagatccttctcctatagaataacattcaagaaatgtatctttgatacactaatattttctaatatatagtacatattcaagcttctccagttatccaaataatgccctctagagctgtatctgtttgcctgccttctttctttccttcccttcttcttctttttttttttttttttttcgcattgcaattattttgttgtctctttagtcacctttagtcaagaacagcttcccattttttcttggtctttgaagacttgccagttatgaggctttcagaccaggtatttggcaggatatctcactctctgaaattgtttgattttttaggcggtgcttcagtgagtaatagcaggtccttctcagtgtattacaactaaagagattcatttaatgttcwcttattatttgatgacataaattcattcattatttgatgacttaaactttaattacttggttaagatgtttaaactcacattttgtcctttcaaaactaattttaaccttgacattcttgggttgaactgaggtcaaaaggacatcgtatttgatctccaaggtctgtgagtgttcagtgagaaggcttcactgtgctagttcttgttgggtcatggataacaacatggcctccagtatttgtctgattcctaccaaatcacaaaacagctctacacatcatgcattttggatgtggcatgaggtcaaaaagcagaggacaatgacactgtggcataaagcaatcaaatccctgattcaaagacagcaagttgcctcctctgcgcctaattaaagaactatcatttgagaagcaacaaataagaatcaacaagtctggagaaataattcacattaaagtgaaaatggtcctggaccttcccttcctcacttcttttgaaataacttgccatctctcccacttctccctacatatattatatttcataccccattcatattttaattttactgcttcctggatatgacttgttttcccaactatattccaagtttttgaggcacttatttggatactctgcagggcctagcacagttctatgcacaattccaagggtggaagcatggatgcatgggtgcatgggtagatagatgcaggagtgcatgagtcagtgggtagatgagagaatggatggacacatggatgcatgggtgcatgggtagatagatgcaggaatggatggattagtggataggtatgagaatggatggatgggtagaygaaaggatggataagggatggatgagtagatggatggttgcataggtaaatgaaaggtggatggttgggtgggtgatgggtagataggtagatagacataggaaggaagctgaattgattgactaacagacaaattatgkttttttttttccactagagtaagtgtttcccttgtccagctgaaggatgccccaaaatggggcactatgctgaccaatttaaggggaaaacaagtgctgtggaacaaacctttttcctgaacacaggagagagtggtaactttactagtaagtttccattttactcacttcaaattcttgcgaataattttcaaaagtgtgccaaycttattagtcagtatccttggtaacaatggatagaaacttaactacaacaagcttaagttgtaatgaaaggacagtgaaatggaatttgtgttgggtctcacccctttaaccaatactcctgaccagcagagaaaagtacaatgattggcccaggctgggtcacatgttcacccacccctgttgctggaaggatgcatctattaacagaagagggcaacgtgaaagtcactgtaagtcaagaagtcagtgcagtaatgactatctattatattagtcctcctacatacacacactttgtggtgatgtcatttcgccctgcttcttattttaaaagtacaagatagtaaaattatcaagactcatttactgtgaataatagcacataatggctggaaaggagagcagttattttctaagagagtttcaaatttaaaaatttatatcagcactttacaaaacacttttcacatacagkatttcctgtaatcctcaaaatatttatcataaaagataagagtttggcagaatctataaaatcttatatgcacattcctttaacccagtaacttcacttctcagagtgtaccatagagaaatacttgcgtgtgtgcataagatgatgtgatcaaggatgctcgctctttatttttaagagcgaaagattgaggggaaaacctaaatgtccaccagttgtaaatgactaaatactatagattaaatactacatgtaaccattaaaaagaaggttatacctctgcgtactgaagagagaaaacctctaaggtgtattaagtaagaaggcaagtgacaaaacaacatgcaacacacccattgtcttcattggttcagactgctgtaatgtagtaccatagactgggtggcttataaatagtagaaawgtatttctcacagttctggaggatggaaatctgagaccagggtgccagcatgatcaggttctgctgcacattgctgtcttcttgctgtatactcccacgtggtggaaagaggaaaagagcactctctgtggtctcttttatgaggttactgatcccattcatgtgggctcttacycacatgaattcagtccattgtaccatgtatcagtcaaaatacacatgtgcagtatcagctgcccttcattcatccaagagcacataccttgctgtgttcataagggactgtgctgaactataatatttactgacccctgagtcccttgctcccacctagaacctaatgtacccttaattcctgggccccaggaattcaattaagtcacagtcctattgcctctcacccctggaggattcagagcttggaacaataatattttcatagatcattttttcaataagatgagttcattaaatgggttgtatttctttggacaggttgragatataagntatcagtcacactttctggaaaagagaaagtgaatgggtacatcaggattgctttgtatggaagtaatgaaaactcraaacaatatgagattttcaagtaagttcaatggtaatgtgaaatgatcatactttccataatagattattcaaamttgattgagtataaagtgctttataaatctaggcatctattatacagaaccactgaatcctagaatgtcagagctggaagaaagtctcaatgtctagttcaattgtcccattttacatatgagaagagtgaggcccagagagagggaactcactatttaaaatgagtcatgtgctaactccttttggaatgtcagtcacctgactagattgttttttctttttttgttattttattttattttagattcagggggtgmatgtgcagattcattacatgggtataytgtgtaatggtgaggtttggacttctagtgaacctattacccaaacggtgaacattgaacccaatggataaattttatcccttatccccatcccaacctctctccttttggagttcccagtgtctattctttccagttttatgtccatatgtacccattgtttataagtgagaacatgcagtatttgattttctgtttatgagttatttcgctgaagataatggccttcagcttcatccatgtagctacaaaagacatgatttcattcttttttatggctgcatagtattttatgttgtctatatgccaaattttatttatccaatyaaccactgatggacacttaggttgattccatgactttgctmttgtgaatattgctgtgatcaacatacaagtgcaggtatttttctgataaactattccttttcattygggtagatacccagtagtgcaattgctgggtcaaaatgaagttctatttttctatcaaggtatttgagaaatcttcatactgttttccataggggttgagctaactgacawccctaccaacagtgtataagcattcccttttctccatatccttgccaacatctgttattttttttttgactttttaataatagtcattctgactggtatgagattgtatctcactgtggttttaatttgcatttctctaataattagtgatgttgagaatttttttatatgtttgcttgatgtttgtatgtcttttgagaagttctttgcccactttttaatggggttgttagtttttttcttgytgatttaagttccttatagattctagatattaatcttttgtcagatgcatagtttgtaatattttctcccactctgtaggttgtctgtatactccgttgattgcttcttttaatgtgcagaagatctttagttcaattcagtcccatttgtctattcttgtttttgctgcatttgctttgaggtcttagtcataacttctttctttctttctttctttcttttttttttttgagatggagtttcactcttgttgyccaggctggagtgcaatggcaagatctcggctcactgcaacttccgcctcctgggtacaagcaattctcctgcctcagcctcccacgtagctgggattacaggcacctgccaccatgcctggctaatttttttgtatttttagcagagatggggtttcaccatgttggccaggctggtctcaaactcctttcctcaggtgatccacccacctcacctaagctaatgtacaggagagttttatcctatgttttcttctagaatttttatagtttcaggtctcacatttaagtctttcatccatcttgagttaatttttgcatatggtgaagaataggggtccagttttattcttctgcctatggctaaccagttatcctagcaccatttattgaataggtttattcaataaccctttcctcgttgtttattcttgttgactttgtcaaagatcagctagctgtagatgtatggctttatttctgggctttctattctgttccaatgatatatgtgtctatttttgtaccagtaccatgctgtttgggttagtgtagccttgtagtatagtttgaagtcaggtaatgttataccactggctttgttctttttgcttagattgctttggttattggggctctttcttattcatattctaaaacatgaattttagaattgttttttctaattctgtaaaaaatgacattgttaatctgataggaattgtgttgaatctgtagatcactttaatgatattgattcttcctgtccatgagcatgggatgtctttccatttgtttgtgtcatctacaatttctttcatcagtgtgtttatcgtgctccctgtagagttcatttgcctccttggctaaatgtatttctaggtatattttgtgtgtatggccattgtatatgagattgagttcttgatttggttctcaccttgagcatttttggtgtatagaaatgcaattgatttttgtgcaataatttgtattctgaaactttactaaagtgatttatcaggcctagcagacttttaggggaattgttaggattttctggatataaaatcatgtcatcagtaaacagagataagtagacttcttcttttccaattggatgccttttatttctttctcttgcctgattgctctggctagaacttacagtactgtgttgaataggagtaatgagagtggacatccttgtctagtcccagttcttagggtgaatgctttcaacttttctccattcgacatagggttagctgtgggattgtcatatatggcttttattattttgaggtatgtttctttgatgtctagttagttgagggctttttatcatgaagggacattagattttattaaaagctttttctgcatctattgagattattatatgttttttgtttttgattctgtttatatgttgaatcacatttgttgatttgcatatgtagaaccacccttgcattcctggaataaaacccacttcattgtgatgaattatctttttaacgtgctgttggatttggtttgcttgcattttgttggggatttttgtgtctgtgttcatcagggatattgcctatagttttctttctgacttggattttgtaaatatcaaaatctcttcaggcaaggcacatctgtatggcacatacccaacacacaccccatcctcacacacataggtacacatatgaagcctgtggccatctcatccatgctgtgtggcctcagcatctggcttctgctgggcatgtgaggtgcttggtaaatatgtgttagatgaatgcataacctgtacaataaagttaggttctgtttttgcactaacttttayataaaaatgtttgtgttgaattaaatgtccttgacaaattcctgtaatacacatgagatgctaacaaatggcacctgctgaaccacatgcatctttaaacataagacattgycccaaatagtcctgtaacaaacttagagcattmatatgccaccccaaatattcgacttagctgtaggtaaaaactaaaacagtggaaatctggagtccagtatttttaaaaggtgtgttctgcacaaatacttttatgttatggcagcccctggatgtgtatgaagtcatccaaggtgtttgcagaaaaccaacaacagcaactattgtttagagaagtgatagatygcaatcatgttatgtattcatatatccagctgatataacattttatgtctatattttcagaggatccctcaaaccagatgcaagtcacacgtgtgctattgatgtggattttaatgttggaaaaatacagaaagttaaattcctctggaacaaacrtgggataaatctatctgagcccaaactgggggcttcccaaatcacagtgcaaagtggtgaagatgggactgagtatgtattttttattgcatctaagtttggttatttatatttacatattgatctatctgtctaggcattcattcatccaattgcccacctactyatctatgtacccatctactcatccattcatctacccatctatccatttctctatccttttaaccacttagccacttacccattcacttattcctctacccatccacccagacacctatcttatcattcttctggccctctggccattatttgatcttccctccatccattcatcttcccagctgttcatctcaactctccatccatccatctgatttactttgaaaaaccaaacgttgttttccttaggcaaaattcaacttggcaggggcaaggcaatgattgtaggcacagattcaagaaacgggcaaatatgaatgrctattttatctcaaacaataaggaaaacacttgggaagcacatagtggaaatctctgagttaattccagttgatgtgcagttattaatgtaaacaggtttgtttggagactatagcattagagggatacacactgtgttgggaatctggctcatagtggcaagttcttccattctgagagaatagaatcctacttagtaggcattgggagagaatataactgtttttaaaatatggaaagaatgacacctcaaaagaggataattcaaaaacaatgggatattagagaataaaggaaacataaatgttgactctcaactgatcttgttttaagatgaggaagtaagatttggaaagtcaagtaacttgtctaaggtcatgtagggaatctaaagggaaaaatattgaacttcagaatgttttcaaaacacacaccaagacttagctcagctgcatgactcaactttgctggctgtaaaagtggcaataatcccaattactcagtatattattggaaggatcagatgtcacagtcagcgtgccatcactttgtgtacagtagacccccttacctggggggatgggtgatataatccaagaccccagttggatgcctcaaacctcaaatagtaccaatcctacatatactatgattttttttcctattcatacatactatatgaataggaaatatgctggacaaagggacacttcatgtcctgggtgggacagagctgaacagagcaagattttatcatgctactcagaatgatgtgtaatttaagcttatgaattgtttgtttctaaaatttcccatttcctattttgggacctcagttgaccatgggtaactgaaaccatggaaagcaaaactgcagataatggggggctactatgctcagttgtaaggcacaacaaggactgggacccaggtcttctgacagcccctccagtgttctttccactgtgcccatcaactcagccagctggatgtgaaactgagaagtccatatggtctggtagtgcaatgcaatgtgaaaatgtctggatttctcagtatttaagtgggggtggagttcctgttttaagtacaatatagaacacatactgtataatccaaacaccagagtccccagcccacatgagggctctctcaccaagaagctacattctgaagctaacccggagggaaggccagcttggccacactgttccccttgcatcaaagtcacctgcaagggaaggaagaggccagaagtggccagcttctcatgcttggtgcttgctccaacctgacttagttagtttstcacggttaataaccctccaggatcttttttatttttaagcaattttattgaaccataattcccataaaacacaattaacccatttaaagtgtgcaattcaatggcttttagaatattcacagagttgtgcaactatcactacaatgttaaaatcttttcatcaccttaaaaagaaaccccagacccattagccatcatccctccacccgcacatccctttttctcagccctaggcatccactaatctactttgcgtctctgtaggttttcttattctggatatttcatgtaaatggagtcatacagtatatagtccttcatgactggcttctttcatttagcataacgttttcaaggttcatccacgtagcatgtatcagtactgcattgttttttattgtcaaataatattctattatacgactatgccacattttatttattcatttatcagttggtcatttgggttgtctctacttgggggctattatgaataatgctgctatgaacattatgtacaagattttgttttcatcctcttgggtatatacctaggagtggaactgcttggccatatgataactctgtttaacctttagaggaattgccaaactgtttccaaagtggctgccacattttacatttccagagcagtgtatgaggggccctctctgattttaatttgacagagaaagtcccctctgtgctggctgggrcactcttggtccctggaactcattgctagacccaaagaggcagtcccatcagagtcccctcagttttgcagtttgcaaagcttcagtttgacatggctgattcactttccacccattcagagcccacatggggagaggagtgctctttgagcaggttttgttagtaagaattacttggactctgcctggtaaagcagaacttttyggtcaaggggagccgaatccagggggttgcccaaatgctgtttactcacctgaagtcacatttccacaagcaaaagagcctcatgctgacaatcttttcctccacaggtataatttttgtagcagcgacactgtggaagaaaacgtcttgcaatctctttacccttgttaaaaacgtggtgcrgctattgcggtaataaaatctttaatgcactcggtttgagggtgagctgttagtttgacattctctactttctgggttcgcatttcagaaatgatttgggggattggagccaagtttgccacaggtgatgcctggaacttctcacccacttacctctgccaccatctctctctttccaggcactttaggtggcccattccagcggattttatttccttagacaatgaacttctgtcctatttgtaaaggtcattgttgctctcgcttgctgcccaaccagcttttaacatcctagggacacaaggtagacaccacataagcattcagaaaatacaaagagaagaaaagcaaaaaaggagaatgaaacaaaaatcccgagatattgccgcattttgtggcaggtgtaactccaaactctgatgattttgattaaaatccacctgcggcatggagacagcggggctttttttaaaaaaaaaaaaaaagttaatgcatgcacatgttacaaaattcaaatgatacagaaaagtattcttatgaaaggagaatctctttcccccttgccttcaagtctctcagttcttcttcctagagacaacctgggttttttcaagaaatagtccatatatccttatggatatatctattttacacactcaaccctgccacaccctttttgtctaagcacagatgatagaatactgtacacactgttccacatcttgcatttttcactaacaataagttgcatattcgtctctaatggtacaggaagagtttctccattcttcatatagcttcatagattccactgagagatgtacatggtatgtatggttggactattttctattataaatattcatgcaattaatatcctttcatgatatattctacattatatagctgatcaataaatatttggaatatgtttattttgaccaatattgccaaattgctctctatagcgattgtatcaatttattcaacgaacaacatagtaggttgaaccataggcaattacagttttaaaggccagaaaagccaaatgttgacaatttcatgtgattcattctaatatgagagcgtttcacactcttaccaacatgggtattgtcaaatcttttgccaatttgataggtgaaagtgtgtttccttacattgtaatttgctttattttattatgagtgaggtttcagtatttaatgggctcttggtatttcttcctctgtgaattatccaaattctttgccaattttaggcatctttttaatacagttttcactttaaacagctctttaatattaggaaaactggaatattccatcatatgcgaatattttgctcaatctatcctctacccagggaggaaaaagaacggcagcaggagggcctggggcagctgctcacagggcctgtacctgtctgccctgtgcgcagctcatacttaaagggttctgcaggtccccatcaccccagtggcttcccggagggctccaaccacctgaactcacactggtcagaggcagatgaggcagccaggcctgggttttcatatctccttcctgagcctgatactggccaccagcctgtgtggtcttttttttgaggctatgcccagatttgggggggccaaggacctcctcaacaaagctgctggggcccgtgtggagcgcagccgtggaagcctggcctcctgaccatgcaccacttcccatttgcccccagcagaactgcctggggaccccagagagtaaatgggctggtgccaggtagagggtgttgctttcagggcctgggggttgtactgtaggtgcacccgttgcgccagggtggggttattcactgttcaattcttagaatcctgaaatggcttcatctagcagattgagaaaatggcatcatgacagcagtggctgttgcttcaggagaattgcacgtaattcttccttccactgagatttggagaataggggtaaaggagctctctcttccctttaaggggaggcctctaatgcaaacagaactgaagtccttgagttcaatgtcttgggatttttttgtttccttcgtcctttttgcttttattttctttgtattttctaaattctttttcttaaaaccctatacagcatttatttgtttttattttttatttttttggggatggagtctcgctctgtcacccaggctggagtgcagtggcgcgatctcggctcactgcatgcaacctccgcctcctggcttcacgcgattctcctgcctgtcagcttcccgagtaggcatccaccaccatgcccagctaatttttttatttttagtagagacagatttcaccatgttggccaggctggtcttgaactcctgacctcaagtgatccacccacctcggcctcccaaactcctgggattacaggtgtgagccactgtgcccggcccctatacagcatttaaaatcttagcctggtgcaatgaaataggtccttgtctgagacctaccagatgttttagatctcaataaaactacaaactgtagaagttatcagccctggccgtgtattagaattactgtggagctttaaaagaaacctgtaatcccagctactcaggaggctgagacgagaggatcacctgaagccaggaatttgagaccagcctgggcaacagagtgaggccccatctcttcaaaagaaagaaagaaaacaaaagcaaaagacaatcccatgtccaggatatatcctagaccaaccacaattttggggtgggtcaccggtattcttaaagctccctggacgatttacagccacagttcagaaccaccaggtatgatcccatctaagaggtggtaatgacactttctatctttactcatataaatccccatagtgtgatatagggcctaattgctcagctctgcagtaaagctgagctggccttgcattcattgcggcttcatttccttctacctggactccctgggctggctgcttaacttctctgacctcaacacttactggagaataatagtagccctgccatacagggtggctagtagaattacataagataagaaacgcaaagcgcttaggacagtgcttggcacataataaactgtcattaaatgaggaaggttgggaggctgaagcggctggatcatctgaggtcaggagttcgagacctggccaagacggtgaaaccctgtctctactaagaatacaaagaaaaaattagcggagcatggtggtgcacacctataatcccagctactcgggaggctgaggcaggagaatcacttgaacctggaaggcggaggctgcagtgagccgaggtcaagctactgcactccagcttgggcagcagagggagactcggtctaaaaaaaaaaaaagaagaagaaaaagaaggaagggctggctggcatgagttattctttaagagtaacagataccaatgacaaagagctaagacaggtcgtagcctcagagaagcaattttaagtggatgcaactaaagattcgtattcagaatacataaaaggacaacccaacagaaaaatggacagaggtcacaaacatgcaattcacacacaggaaaactgaatttaaaaagcttgagatttaacctcactagtaatcaggggaatacaaatgaaaccaacaaaataacattcacacttgtcagattatccaaaatatgccttcatcaatgaaaaagaatgaactaggatccatatgtatcaacatgtgtagatccccaaaatgtcctgttgaggacaaaagcaagtgtcaggaagatatatcatttagatacagaaattatgacttacgtacatttctatttacaaaatactattactcaccacctatgtgctacaagatatcaaaacatgacctacaaggccatttagaatccttcgtcatcctgggagcgagcatagtacctgatagatagtttttcaaccctccccactcttctccctcaagtagtccccagcgtctattgtttccatttttgtgtccatgtgtattcagcatttagctcctgcttataagtgagaacacacagtatttggttttctgtttctgtattcgttatcttattcgttattcgttaggataatggcccccaggtgcattgcattcatgttgcttcaaaggacatgatttcattcctttttatggctgcatagtattccatggtgtataggtaccacattttctttatccagtccaccactgatggacatctaggttgattccatgtctttgctattgtgaatagtgcagcaatgaacatatgagtgcatgtgtctttttggtaaaatgatttattttgggggggatatataccaaatactgggtcaaatggtaattctgttttaagttcctagaggaagctacacactgctttccacagtggctgaactaacttacattcctaccagcagtgtataagtgttcccttttctccacaacctcaccaatatctgttgttttttgactttttagtaatagcgattctgactggtgtgagatggtatttgactgtggtttttatttgcatttctgtaatgattagtgatggtgagcattttctcatatttttgttggccacatatatatcttctttggagaagtgtctgttcatgtcctttgcccattttttaaaatggggttatttggtttttgtttgttgaattgtttaggttacttatagattctgaatattagacctttgtcagatacatagtttgtgaatattttctccattccataggttgtctgtttactctcatgacagtttcttttactgtacagaagctctttaagttacccacttgtcagtttctgtttttgtcaaaaatgcttttagggacttagtcataaattatttgccaaggccaatgcccagaatggatttcctaggatttcttctagagtttttttttttaagttttagatcttgcatttaagtctttaatccatcttgagctaatttttgtgtatgctgaaaaaagggtgtccagtttcaatcttctgcctgtggctagccagttatcccagcaccatttattgagtagggagttctttccctacttcttgttgttgtcaattgttgaagatcaggtggttgtaggtgtgtggctttatttctgggttctccatcttgttccattggtctatatgtatgtttttgtaccagtaccatgctgtttgggttactgtagccttgtagtatggtttgaagtcaggtagtgtaatgcctccagcttttttctttttgcctaagattgctttggctctttaggccctttttcggttccatataaattttagaatcattttttctaattctttgaaaaatgacactgatagtttgataggaatagcattgaattgtaaattgctttggacagtataaccattttaacaatatcaattcatcctatccatgagcatggaatgtttttctgtttgtgtcatctcttatttctttcagcaatgttttgtaattcttgttgtagctatctttcaccttgttagttagctgtattcctaataactttattctttttctggctactgtaaatgagattgtggtcttgatttggctgtcaacatgggtgttattggagtatataaatgctactgattttcatacattgattttgtaacctgaaacttcactgaagttgtttatcagttgtaggagccttttggcagggtttatgggattttctaggtatagaatcatattgtctgtgaaaagagattgacttctcttcttatttgtatgccctttacttctttctcttgcctgatggctctgactaggacttcccgtaataattgaataggagtggtgagagagggcatccttggctttttccagttctcaaaagaaatgcttccagttttttgcccattcagtatgatgttggctgtgggtttgtcataggtggctcttattattttgaggtatgttcgtttgatgcctaatttgttgagagtttttaacatgaagggatgttgaattgt

SEQ ID NO: 94698 - DNA, 12378 bp, Homo sapiens
tacagttggacatatgacagattacgacatatctagtttgtcatctgctccacacccagtagagccagtagttaagaccataggtctggaaccagatcatagcaacattacacattttctcacagctttttctccaagtgaactcagttacctcatcagtaaaatccaggtaacaataacacctgcttcggatgtggtgcgataacacactgccaagcattcagtacagtgcccagctctagtaaatattgttattgttattatgattgtatccacaagtctgatggactcagaactttaatttcccactcaaaaggaagttaggtctgtgtttatgcagttgcctaaacccctttaactaaatgtagaacatggtatctcgatttttccaagtaacttggtacagccaaattgtcatattatactccagtttatagcagcttgccttttctcatgtggctagtctttgtccctttgaagtttgagactagagactacatcactgcataattaagagaacatggactgggtgtggtgtctcatgcctgtaatcccagcaccttgggaggccgaagtgggcagatcacttgacgttaggagctcgagaccaccctggccaacatggtgaaaccccatctctactaaaaatacaaaaattagccaggcatagtggcagatgcctataatctcagctacttgggaggctgaggcaggagactcgcttgaacccgggaggcagaggttgcagtgagcagagaacgtgccactgcactccagcctggacaacagagtgagactctatctcaaaaaaaaaaaaaaagagagagagagagaatatggagcacttcctttaatcaaaaaatttattttcatcagtacttaatatatttgggtttgtgtctcagctacaactagtggtaaaacattaagagggttttttaaaatataattttttatcaagatataatttatataccataaaattactcttttagtgtatgatgcagacatttttagtatattcacagagacatgcaacccttaccaaaatctacctaaagaacattttcatcactccccacagaacccatgcacattggcaacccttcccccagtctctagcaaccacagatcaactttctgtctctagatgtcccattctggacatttcataataaatgaaatcatacgatatatagttttttgtgtctgacttctttgccttctttgactttgaataacattttcaaggtccatccctattgtatcatgtatcagtacttcattcttttttatggctaaataatactccattatatgaatatcccacattgtgtttattcatctgttgatgggagtttgtgttgtttccactttttggctattatataatgcagctatgaacattcatgtgcacgtttttgtgtggacatatgttttcaattctcttgcctatatacctagaagtagaattgctgggtcatatggtaactgtgtttttaaccttttgaggaactgctatactgttttccaacgcaaatgcacaattttagattcccatcagcaatgcatgagggtccaaatttcaccacagcctcaccaacacttattaactttttaaaaattacagggctagggtgtggtggctcacacctgtaatcccagcactttgggaggccaaggcaggagaattgcttgagccaggaaagaccagcctgggcaacatagtgagaccctatctcttaaaaaaaaaaaaaaattataggcatcctagtaggtatgaagtagtatctcattgtgttttttaaaaaaaaatgttttaaatgttcagctcctatctgtaccagatcattgtggtcctaaagtagtttcttgatgactaataatgttgagcatttttcatgtgcttctggtcatttgtgtatatttttttgaaaaatgtccattcatatatcaactacttgggaggctgaggcaggaggatcacttgagcctgggaaatcagggctgcagtgagctataattatgccactgcactccagcctgggtgagaccctgtctcaagaaaaaaaaaaagtttttaattttgataaagttcaatttatttttttttatttttttatttttttagacagagtttcactcttgttgcccaggctgtagtgcaatggtgtgatctcagttcactgcaacctctgcctcccgggttcaagcaattctcctgcctcagcctcctgagcagctgggattacaggcatgtaccaccatgccctgctaattttgtatttttagtagagacggatttctccacattggtcaggctggtctcgaactcctgaccttaagtgatccacctgcctttgcctcccaaagtgctgggattacagtgtgagccaccatgcccggcctatttttaaaagttttgttgtttgtgcctttgccatcgtatctaagaaattattgtctaatccaaggtggtgaagatttacacctatgttttctcctaagagttttatagtttttgttgatccattttgagttaatacttatacatggtgtgaggtagtggaccaacattcttttgcatgtggatatccaattgtcccagcaacatttgttgaaaaaactattctttcttcatagaattgtctaagcatctttgtcaaaaatcaattggccatagatgtatgggtttatttctatactttcatgtcattgatctatatgtctgtctttatgccagtaccacactgtctgcgttactgaccctttgaagtaattttgaaatcaggaaatgtaagtccttcaactttgtgcttttttgcatcatttgtttttggctattctgggtcccttgaattagaatggattttagcatcagcttgtcaatttctctaaaaaaaaaaaaggagctggaatttaataaggattgccttgaatctgtagatcaatttggggagtatgacctccttaacaatattgtcttttaatccatgaacatgggatttctttttatttatttagcaggccttctttaatttctttcaacagcattttgtagttttcaacgtaacaaacttatgtactttttttgttaaacgtattcctatttgttttattctttctggtgttgttataagtggaattctttaatttcattttcaaattattgattgccagtttagaaatacacttgattttttgcatattgatattattatatcctgcaaccttgctgagctcatttattagctttaatatgtgtatgtgtgtgtattctctaggattttctgtatacaaagtcatgtcatctgcaaatagagatagttcttcctttccaatctagatgcctcttccttttctatcctggcagacatctttaggaactatcttggttcttctagggaaacgtgaaaaaactggtggccatttgggcattgggaatttcatttctatgctgttctccattattaccttaatctattttttgtccttttgccccacggttaatcttgattcctaaacagaaccttaacttccttataccttcccatatgaaacatatcaaaatcagggttcattactttgtccccctaagagctcttactctacaaatcaccctttcaggtaagctcatcacatgttccttctctgtcttgaattcagttgaccatgttgatcaactcttttccacctctctgatatatcttttttcttcttcctctttggaacttttgcagctaataataagaaaacagccccagatgaaataacagatatgcaaaatacagattcctggaggaagcatggaggtgtgtttaatcagagggagctcagccaattgtgaaataagaggaaataagaaagtagcaaaggccacatgtggtggtgtgcacctgtagtcccagttacttgggaggttgaggcaggaggatcgcttgatcccagtagttcaatgctgcagtgagccatgattgcaccactgcactccagcctgggtgacagaacaggacactgtctgaaacaaaagacaaaaacgaaacagaaagcagcaaagagaacagtgaggataaattgtataaattgaggctgggtgcagtggctcacatctataatcccagcagtttgggaggccgaggtgggtgaatcacctgaggtcaggagttcgagaccagcctggccaacttggcaaaaccccgtctctactaaaaatacaaaaattagctgggtgtggtggcgggcacctgtaatctcagctactcgggaggctgaggcacaagactcgcttgaacacaggaggcagaggttgcagtggggtgagatcgcaccactgcactccaggctgggtgacagagggggactccgtctcaaaaattaaaataaataaatacataaatatattggatcctagttaatgggagacaaagtagagacttggaagaaactgtgcagttacagaatggctgaaaaaatattctggcttgaatatgttaagaaaaagagggatagggactcatggcagaaaaccggatattgatgaaaatgtcaccattaaggtctagcaaggcctccatgtacatagacttttgagtttggatactctgaattactctgagggactcgtgcttcttgtccaaggtgagggcaaccttagattagaaagcaaggtgagctggagaactggctctggggagctcttagaaacccaggtattgctcaagatggctcctgatggaatatggagcttcttcaaactgtaaaagagtctgcccttcttttttccataaaaggattatcagataaaatatagtaaaagctaggctgggtgtggtggctcatgcctgtaatccgagcactttgggaggatcgcttgagcccaggagtttgagaccaccctgaccaacatagtgagaccggcctcttcaaaaataaaactaaaaaaaattagccaggcgtgatgatgcatgcctgtagtctcagctactcggaggctgaggcagaaggatcacttatgcccaggagtttgaggctacagtgagctgcaatcacaccactgcactccagcctgggcaacagaggaagacccggtttcaagaaaaataattttaaaagtattaaaagctaaaaggaaaaaccaaaaaccaaaaccgtttccactttgtgcacctgtgagcatgaagccctctgctccaggaacatacaagccgttccttggattggttttcctttcttccttctgctgtgcatatcagcattctcaagaagccattttattccctagaggtgactacttttcagaaacaggaaaaagctggactgcccagcctgggttgcaaggtaaagaactgcttttggctgggcgcagtggctcacacctgtaatcccagcactttgggaggccgaggcaggtggatcatctgaggtcaggagttcgagaccagcctgaccaacatggtgaaaccccatctctactaaaaatacataattagccggacatggtgacatgtgcctgtaatcccagctacttgggaggctgagtcaggagaatgcttgaatccaagaggcagaatttgcagtgagcccagatcacaccattgcactccagcctgggcaagagcaaaaaactgctttcccagggagcgcttctcctgctggtcttttcctctcccagtgtctttatcttaggtctatgtgaccgaccacgtgacacacccgagaaccctggcacttccccagggccaagttgccagctggtgttaatgtgtttgatttaatggcagcagactcctggcttcctgcgtcccagagtttaacctaaagttacctttaggacagcagggcaggttaatggggtatgagtcaaccattgtaacttctacttcttttatactcttaaaggtacagacatagatatgagccagagacaaatcccaagactttgaatcacagccaaaagaaactcccagacccagtgcaatcagattcacttcacttttattatgaacaaacacaatctcagattagtacaattagcttcagagttgatattaatagaaattattccaaaattattcttgtcacaagtaactactatatcccacataaaaagggaaaaaatcccacccaatcacagaaaaggcatcctctgtatgtttccgkggcaatgcgttgtttatgtattctcaaattttgtctggctagttatccaccgcttctccaatggattcattcagtttcttggagaaccatatagactaatgacagcatctgggrcacacggacgtatcaagttcatggtggacattcctattataaaaaatactcaggtcttgagaattcctgtgctgaaggatyccaaaatgctttctaaaaagcattagtcatgcctcaaaactgccctttgaggtaggtcagtattattatccccattttaacagaaggaaaactgaggcaccttatagttaagtgacttgcccagggtcacacagcaagtcagtggcacagtggttggagaggccctggccttaaccaccagcataacatggccacctcgcttttttaacctttcatgatgacctatttgagctacacttacagagaatacacccaagatactagcaaaccaaggagaaaattttccattttaaatgctacaaccatcttttaacccaaaaaaaaaaaaaaaacttataaatcaaatacattcaaattatttccaccctccatcaaatgtgggcacttaagaaaagcagccctaacaaaagtttccagaatgaagcccagaagggaatcctgcaaatcgtgatactgataatcctccactcaggcccctttttctaccagccacttcagtagggtctcaggtgcaaagggattctgcagagggagtgagggcaggctcatatgcaacactgtgattagaaaagatgtaaggcacctgagctaagttgtcagcacaccccccaaagcaaggactgttagaaatccggactcttgatcagatctgagtttatcattaatgtgtcacttgaattgagctttagaatcttgaaaatcgtgttccttactcagcagacacactcccacccacacccacagccacacatacattggggccctcagcctgaggtgccatccagccttatgtagggtcatggtacagatcagatccatggcacacgattacaataggaagaagtgaaagttgtttttattgtttatatattatcaagcaggcatctgatgacctgtggaattagaaataccagcagacatttccaaggggtaggtgcacaggtcaacagaactaaactacagtgatcttcccttagatccttttctactgaggtgaatagctcaaaagacaaggatgcctttagtccaggctaacccctgtagcctctacgcaattaacacagaagaaaggccttcctcccttccagcactggggctcaacagtggactgagtgtttggtagtgtacatttccaatcttaatagagcaaagccagacttctgctttgatgactgagctacagggacaggagtggtccaaggttctcaaattctgtttttgtttttttccagacttctatactattgtctgccctaggctgtagggaatgctggttagtttgctgaacagacactgtgttcagcagggtttgtggtatctcaaatcccaggtctcagccaaagctttgcagttcaccctgactccagggaacagggcctcctttcgaggtgaggcacttgggttcttgcccttgcttcttcccagtgagaactgtttcctcctacttctacaagcattgcactgccagctgagagcactgactcaggcggggcaccctcaccaagtaagcagggggcattcagcatgccctctggttctgacccagagagaggggactgaaaataaaccctcttttgctctgtggctggcccactggctcaacatgagcgcttggcttggctgtgcctcatgagagagggagggagagagaggctttctgggccagagatgtttctgggagggtttgccagccttgtcttgagccatcagtgtggcaggggagcacaggggtgtaggtggagacactgcggaggccacgtgaaagtggcagctagctctactttcaaaagagaagcagtggttcagtgaccctgagcattctgtgtgcaggagggagctgcctggacagcaagtcatcactgcctctgaatacacacaaaggaggctgcctgtccagggaaagaagaaaacgttcagggaagagaaagatctggtcaaagaaaagggacagacagggtagagccaggaatcaagaatcagggtagtgaagagattcctaaccctgccccccaggcagttgtatactttaggctagatgttaacagagacccccttctcctcaaaaaaaaatgagtgaaggggcacaacactgtggagagaagccttctagtttttactcatttcaaggagaaactggaactaattaatgaatggacctaatatctagtttattttattaagactcccaataactcactcagtaaccttctcaagcccctggcaacgtgttctcagatcccttcctatgtgaagttcgctcttagaagctgcctatagatcctgtccctcagcctctccatctcatgtccagcagtggagaggaaattggcatcccaactaattcctcctctccttcagagttttttccaaacatccctctttggaagggaaatactctaatagtttaacgttctaagcaatgtatatatgtatatatattttatttttgacccgacttcacctccttaaatccttccctttttttggatgtttggaaatgccacagccatcttattactatgaggggaagaaccaatatcctgaagatggcagagcagaaagaggaaagaactgtaatgagcagctcatggaatactcaaaattctatgagctgctgtttttaccaattctggaaacacccaacttcaagacttcttgatatatgaactaagaaatctccttgttattaaagaaaaaaagaaaagaaaacccttccccagcagagaccacttttactacaaacttaaaatgtcttttctttatcctcggcctcaactatatgttgcggcattgaattagcattgccaaacaccgcagccactttttaccccgagccaggagagaaaggaagcatgctatgtggtggggcttgaagtcctcattaggtaggcagctgtatgtctgatcatggcgagaggttcctcttgcttcgcttccctcatccttacattcatacatgctaactctctcccccgacaatttacctgctttagaagctttgtgtcaaatgaagttgcttttccattccatctagcaaaagcctgggctgaagataatcaacaggggactacccagaagattctgttttatctctagctcaagccacctacttcaaagctcacaacagctcaaggaaagagagttatctggagcaaagaccattcgttttaggctacagaaaggttgtctaggctttggaagctggacactgagcaaagactgaccagctgcttgcctgggaggcaataagggaaaggagggcgatagcaataaagtgaaaaggaggacaatgggcctagaagagagagaggataagagaagaaataatatcagcttagcatcataaaggcagagttgttggctttcaatacttttgaattttaaaagaatactgtactggaatgggttaacatcatcatctttagcatcctggtagcattattcagtagttaataaacagacattaaaacctctgcctggctggtttttgaaaaaggaacctgagggaccccaaactcagccactcttgtagtttccatctccggttcttttaatcctggccaagatggcggccttggagactttcttccggtcataggccagaccgagggcggccatgcaatcaatgaagaatgtggtgaagttgatgtgccagcggtactcactggcagagtagtcatagggaaaggagtggtggtagttgtggaagccctcacctgaaacaaaagcgagaagttatggagtgacggtgcattgaggttttcttgatttgtgcacaccagttagctagcagggtacctcacacctgggagaaactcgctattgttgaatggatgaattcagtctcttttaatatgaaccaaacagatcccctcagaggcatctttacttttattattttactttttttgtagagacggggtcttgccatgttgcaagcaaccctcccaccttgaccacccaaagtgctaggattacagtcatgagtcactgcgcccagccagtcaaaggcatcttaaggagtgattggagaccctggtcacccgtggctgtctgggagccttgtgggaggagaactgacagtttctcagaggataaaatgactagagagaagctcctacttttgggaatgggtatcaggttggaaaattccaaattcactcttggccctgccctcaaggctctgtgtgcatgtgcatgtgcacgtccttgcagaatgaagcactctggctatgactcttaaaaaaatgagtaaagaagcacacctttccccaccacactggaaccacctctaggggtgggaggttccaaaagagtgggccctgcagccaaagatcagaagaaaggccagcccaggggctggaatgtcctcagccactgcagttcccaggggctgctccaacttttttgagctttgaccctggtgtgggggaggtgctgataaaacagaagctctctgaggaagaaaaataccctgtaacctctgagattttgaggactcttgggatgaacatttcactttgctggagggaggaaaacaaacaaattctggattcacagcaatttctctaacgtgtaaagctttggaaactcgacagatagagagtttgccaacgcttggcaggactcttctttctgaaccacagccaaaaataatactgaccctaatcaggcatggataaagaatagctactaagagctaatatttggctctttgtagataacagtaccctcagacagaccagtcatgacattaatcagaagcaaggcaaggaagtcctgcaaagtaaatgacatcatctagggcatttcaaggtatgtcctctctctgtgacacctgatgatctgcagtgtgaactggggaggaggggggtagaatgccaggaataaaggtactgaggattattaatgtccattaatggttttgcagctgggctgtgtgtaagcactagccaggcctttggttaccagatttaaaatggaatcagatgcacacagagacaagggaggaaaaaaaaagaagagggtcaacgggtagaaagaagacaggactttgcaactggggcagcaagagacagcccaagaaaggctcaagggagaaggttaatttggcagagaagatgagcatgtgacagtgggggaggtaattcaagaaacaaaaagattagggtggcaggaaacagagctggaggagaacaaagggtgaggtgataagggaggaaagcagcaggcaaggaggagtgaatgataacaacaacagatcagatattggcagccactttgaactcatggccacccagaggctggaggtggggaaggtcattatagatccatttgcgatacaggaaacatctcatgccagaaactccattcctatgataatctcagatttatacagtgtatatgatttattttaatcatgggttaaagtaagaataggcacaatggtaagaaggtgcctgaaaagagatatgtgaaagttaaaaagagagaaaaaaaatgcttttatttttattatatatttttgagatggagtctctgtcacccaggctggagtgcagtggcacaatctcggctcattgcaacctctgcctcccgggttcaagcgattcttctgcctcagcctcctgagtagctgggactacaggcacgtgccaccatgcctggctaagttttttgtacttttttttttttttttttttaagtagagacagaggttcaccatattggcctggctgatctctaactcctgacctcaagtgaaccacccactttggcttcccaaagtgctgggattacaggtgtgagccaccacgcctagacaaataaatctttttttttttttttttttgagacggagtctcgctctgtcgcccaggccggactgcggactgcagtggcggaatctcggctcactgcaagctccgcttcccgggttcacgccattctcctgcctcagcctcccgagtagctgggactacaggcgcccgccaccgcgcctggctaatttttttgtatttttag

SEQ ID NO: 94699 - DNA, 20754 bp, Homo sapiens
acccatgtcctcttaggtgtccctcctttggctctgccacttcctcacagtgtaggagggacaagctttcccgggaaatcctcatcagcatttcagccccaacccaccatttccctgagaaccatggaccagcccctgctgcaaaggggaggctctggggtttccaggagcgtggaatttgttttctgattcacctcccctcctccctacacagatcattacaggggacctctctttgggtgttgagcttcattcaccgtaggtcattgtctcggtcgggccggtcctgaatcagccagaggaggtcaaaccgggagagcagtgcagcaggtagctgtatgttctgctccaggctgcggcgagggttgtagcgcccgtaggcagggttggcggcagccaggatggagcagcgrgcattgagtgtggtgagaatgcyrgccttggcaatggagatggtctgctgctccatgacctcrtggatggctgtgcggtcggcctcagccatcttgtcgaactcatcaatgcagcacacaccctggtcagccagcaccagggccccaccctctaaggtcagttctccactcacggagtctctcagcacagctgccgtaagccccactcctgaggagccccggcctgttgtgtactggcctggaagagaagaaataaggaaccatgagagagaaagaacaagaaagagaacaagcaaaagacaacaaacgggccagggaggcgaggcctgcgctgggatcattccactccctccaccaggccttcttgagatgcccgaggatctgtggggcactggcaatgtcccccttcccctcccactggttctcttcagaacacaactgtggctcactgaaaccttggctcctgggctcaagccatcctccggcctcagcctcccaagtaactgagactataggcactcactaccacacccaaccaatttttaaaactttttagtagaggccgggcgcagtggctaactcctctaatcccagcactttcggaggccgataacaaggcgggcagatcacgaggtcaggagttcgagaccagcctgcccaacacagtaaaccctgtctctactaaaaatacaaaaagtggccaagtgtggtggcacgcgcctgtagtcccagctactcgggaggccgaagcaggagaattgcttgaacctgggaggcagaggttgcagtgagccaagaccatgccattgcactccagtctgggtgactgagactccgtctcaaaaaaaacaaaaaacaaaacaatacccaaacaacaaaaaaaactttttaggccgggtgcggtggctcacgcctgtaatcccagcactttgggaggccgaggcgggcggatcacgaggtcaggatatcgagaccatctggctaacacggtgaaaccccgtctctattaaaaatacaaagaattagccaggcgtggtggcgggcgcctgtagtcccagctactcgggaggctgaggcaggagaatggcgtgaccccaggaggtggagcttgcagtgaaccgagatagcgccactgcactccggcctgggcgaaagagcaagcctctatctcaaaaaaaacaaaaacaaaaacaaaactttttagtagacatggaagcggtctcaaaatcctcgcctcaaatgattctcctgcctcagcctctcagagcattgggattacaggcgtgagcaaacatgcacccctactttttgaataaacactgtggtcctgtctgtcactatattcacctcccgcaaagcccaactacttactgcgaggcgccagtcgatcaatgtatgacaggagctgagacttggccacaccaggatcccccatcagacagatgttgatgttgcctggaggaagggaaggcagccctggaatgactcttctcccagtgcttggccaacaacagagcaattttgagttctgcctacccctaacacccagcactatttctaagccctccctgtgtccacgaaggcaagatgtccactcatactgtgacctacagggacacttgtcatccttttttcctcctaaatgacttcatccaccctgagcctctcccttgtttcttcttaccccggattttcatgcctcgaggagactggtccacacccccgactmgcaggagcagcagtgmcttcttcacatcttcatgcccgtatatttctggggcgattgaagctgccagcttttcgtagaaatcctcctctgtagagaagttaaggttgttttattttctgggggaaaagggagctaggatgtaaacggaatttcctctctctcccctgcccctcacctgcaatttgcctcagctcctccctggtgagctctccagccccagactcatcatcctcactcttgttcatcttcacaatccgatgggcttccaggtaggtttctgagagtaaacccttgggcaggaaaatgccaggatacagatgtaatcccttcaacttgcccatcactggattccctaacaatttcttgacaaatccctgggttctgttttgtttggggttttgctgctcttttctctgtgtgggtagaatgagtaggtgagggaaaaggggatgatccattcctcatgtcaaactcttccttacctgtaccacctgtcggaacccagtgcgcaggattggcaagaaaataccagtgacgctgacgtggtctccaggctgggcaatccttgtgttctctccttctaccagcaccgtgatactacgagggatatttcccacaggcacctgatcactctaggggagggaaaggcacataagactaggagaaatggacaaggacccaaccttccctccctaggcatcccactcaaaggctcccaggctacccagccacagacaagcccacagcaggggtgctgagacctcctttccccttcccaaggctcccaggaaattctagttccacctccctcctgcacttccctcttttgttcttctttcttcctgccattccacaagtgactacaggattcaagtggactcccgatccacctgcccagggccacgtaccccaaactcacatgttcttgcatcttcatctcctggaatttgatgaatctggagccccgtgtctgcagatacagccgccctcctgagcggttggtttggcactcctggcttgggcacatgatcagaggcatgaaagtgggagactggatctaggatgtgagaacagaaacaccaaaggaagtcagaaggaaaagagccccattgggtcggtcctttgaatcacattttctcttcatggcagacatcttgtaagtgtcaagaaccctctgaacttactctgggtcaacaacaaacacccagaaaataggtagaaagaccactacatacccaagaatgaaaggcgaacacacaggcaacttttacaaccaaataaaacaataggcatcacaggatcaaattaatctctacaaaacaactaatgggtaagtgctttcctgcttcttgctccacacgtaccggctggtaggtctctgccccacactggtcacaagtgtaagtggccaccaccatcttgggtttgacttcagagacacgagtgacgattccacgcacagttaccaacttccccacagagtcagcccgcacttcccggatcacacgaggcttgytgctgctagggccttgaaaatacagctcactaaggggagaaaacagtcacaaacaagatcctggagaaccaatccctacatctttcccgacagagaccactcacaatctgcgcatgagttcagcagggtactggttctgggggcttcggaccatcccagggtccygactccgctgctccatcattagccgatgctcaatgtaaacgtccaggacatctttatttaccacctaaaggagaagaacaaaaaaaaaaaaaaaaaagagcaacaggatggggaaaggagagcacagagaacaccaggcagaagtgcccctcctttctgcctgctcagaaaacatcagtatctgagcagcctctctacagaagcttaaacgcctcgccctttgtttgccattgttctctaaccactcacttccctctccttgtactgaggcagcagctcttgtacggcatcagcaaagagcttcgcgtagcgcctggcattctcacaaattgagtccaccaactcggggtcatcctcggctacgtcgtccaggtccacatacagagccacctgttcccgatgagccagccgaacctcaagtggggaagagacagaaacacctcagagccacattcactttgctcaccagtgttcatatgtgaaaatgcatcactgagaactcagcacaggctctgggcatccacaggggagaacgcagcgccacacagagcgatactcgcttttcagccctcaaaccctctaattgttatgtctttaataaaacaagccaagctgctgcttatggctccttaagcaccccgctccccattccctttacccaatcttagacttaccaactggttcccatacttgaactgcttcttcccgagttcatcatcctggtagaactcttgtaagaacttcttaaccttttctgtaacatgaaatgtaaaaccgtaagacacaaactttaagacaaatcttagatacccattttcgcttaaaacacgacctatgaactaattaataatatgagcatttaaataaacctaccgaagtctccccaaagtgggcataactctttttcacaagtctgtttctaaccagcgaagaataaagagcccgtggcagtgcacagggccatccaacatctccccaggggaattccggtccctactttagtttaaaattctagcgcccttccccgttggcccctcacactccggtctcaaggttctcagctttctttccacccctatgatcccccgccttctttgggtccccttagcccctgatttcaccgggacctccgccaccgcaccccgccaccgcaccccacccccgctcccgccatcgcttccgctcttagtaaacaaagaagcacatgggcccggattccagccgcttcacagctcgggattcctccgcccagggcgggagccagtccagccattggccatcacacccagagacaccgcgatcccagcccactgccgcctttcccgggcccgagcgaagctccggatcccaggcacgcccccccgggccgcagctctctccgcggccgccgcgcggaaggacactgtttacacgacactccctccagcctcctcgcgccacttccgcccggctccacttccgctcggagggcggcctcaaacggccaatcccggcgcgcagcggccccggcctgcccgcccccggggcctacgcgcgcctggggagggcgcgggaacctgggaatgcccaaaagcgcgaaggaaagcgggcacgggagcccagagcccttaagactctcctgaggtcctgggcgcgacttttccctgtgcagcccccagccgggttagcgcgcccccaagcccccaaccccacgaccctaacacctttaccaggtgggattactagcttttcttcaacatcgatggccccccgcacgcttcccaggccccgtgggccttagccaggccgcagctcgaccctgcctctggcctcgcgcaccccagaacccgccgaccccggtcccccaagaccccagctcacaccaacaggtgttccccgggaggctccccgcgcaggacgccctcccgggctcgtagacccgtacccttctctagcgcgtagtccttcagtgccatcgctgccgagggccgtgcggccgcgcttggcgggctcagaggtcttgctcctggggaagctgagaatctccgcgcggtggactgtggccggccaaccgaaattggcgcgaaacgtcgccccccacgtgaccggcgccactgcgtgcgggccaatcggacaaggcggccttcttcacctcccgctagccgcaagccaatcaccgtgcgggcctagaatgagtgacggggaggcggtgcgggcgtcggaagggwatctccgggcggggtagtgcaggcgccgggtttcccgcggtccgagctggcgcgggcggaggagaatcgctcttaaagggccagcgcacacgcgttcttttgttccggggccgcagggcggggcaggcccgactttcgccgtcttcttgtctactctccagaacggccatgatttcccaattcttcattctgtcctccaagggggacccgctcatctacaaagactgtatcctagacccttggggctgggaaggggcggaggggccrggcgggaggggcgcccagggccagcctgtgtcgcaggatccttcactgagtccttccacccgccagtccgcggggacagtggcggccgggatgtggccgagctcttctaccggaagctgacgggactgccaggagacgagtccccggttgtcatggtaaccagtggcgggaggcgggtgaggagcggggycccgtcgggccgggtgggcgccagctccctcccaggactggttcattggtagattccacttggggggtgcattccgccaaataaagctaacgtgaggcccggcgcggtggctcacgcctgtaatcccagcactttgggagaccgaggcgggcggatcacctgaggtcaggagttcgaaatcagcctggccaacatggtgaaactccgcctctactaaaaatacaaaaaaaaaaaaaacatagctgggcgtggtggcgggcgcctgtaatcccatctactcgggaagctgaggcttgagaatcgcttgaatccaagaggcagaggttgcagtgagccgagatccggacaccgcactccagcctgggagacagagcgagactccctctcggggtaggtgggggtggggaaaaaaaaaaaaagagtcaatcgggcgccagcaacacaccaggcccagctccctgcgtgactccatcctcagcaactcggggtagttagtgtaattaaccccctttccacattgggaagctgggcccaggcrtatgtcatgtatctcccaaaggcactgctgttgtgactagtaagaggcatcgggatccgagctcaggtctcctgggttctgatcactccacctccctttttttaacgcctctcttctccctgcctgtgtctcagcatcaccatggccgtcatttcattcacatcagacacagcggcctctatttggtggtcacaacttcagaaaacgtttctcccttcagcctcctagaactgctctccaggtgaggagggttgggctgggcacctggtagctaggaggggtctgagaggaggagaaaatacacgctccaagtgtttcctcaggttggccacccttctgggcgattactgtggctccctgggcgaggggaccatctcccgcaatgtggctctggtatacgaactcctggatgaagtgctggtgagaatcaacaatccccttctgtggcccctacccaattccyctgaagatacatctgctcttctactgtgggatgccgtggttaggaggccaagtctacctttttttttttttttttttttgcttttagagacagggtcttgctctgttgcccaggctggactgcagtggtgcagttatagctcactgcagcctggaactcctgggctcaagccgtcctcctgccccagcctcccctgtgcctagctaattgtttattttttgtagagactagagtctcrctgtgttgcccaggctggtcttgaactcatggcctcaagccattctcctacgtctcggccttccaaagcgctgagagtacaggagtgagtcaccatgcctggccccactccccctctttaccccttccctccactgatcactcagactgtccttcctttaccactaggactatggctatgtacagaccacatccacggagatgctgaggaatttcatccagacggaagctgtggtcagcaagcccttcagcctctttgacctcagcagcgttggcttggtcagtagagggaaagaggagggtgaggaaagaraagaggggttggctggggttgtcagacctgatgattgattgctttggatgctttacagtttggggctgagacacaacagagcaaagtggcccccagcagtgcagccagccgccccgtcctgtccagtcgctctgaccaggtgagggaaggatccatggggtcagacgctctggttttgctctgggatccgggagtccaagatcttaggtcgggcacagcggctcacgcctgtagtcccagcactttgggaggccgaggtgggcagatcacctgatgccaggagtttcagagcagcctggccaacatggtgaaaacctgtctctactaaaaatgcaaaaaaaaaaaaaaaaaaagaaaaagatcttggcacatctcccacccccccagatgtgggtggaggtgggagatgatcccttccatcacccatgtcctcaccctagagctgtagctttgactgtcctgtyctttctccctgtctgtccatttcagaacataggctattctgcttccaaccacccaaattctctctctttctcagagccaaaagaatgaagtttttttggatgtggtcgagagattgtctgtactgatagcatctaatgtaagtttgagctcccaaacctggagctgaggacagatgggacttgggaaacatggtggggtggctaagactcccagcaacggccgggcacagtggctcatgcttgtaatcccagtgctttgggaggccgaggtgggagaattacttggggccaggagtttgaaaccagcctgggcaacatagccagaccccgtctctacaaaaaatacaaataaacaaattacccagacatggtagtgtacacctgctgtcccagctacttgggaggctgagccaggaggatcacttgagcccaggaggttaaggctgcagtaagccaagatcgagtcactgcacgctagcccggatgacagagcaagaccctgtctcttaaaaaaaataaataagtaaaaaaggctgggcacagtggctcatgcctgtaatcccagcactttgagaggccgaggtgggtggatcacttaaggtcaggagtttgagaccagcctggccaacacagtgaaactccatctctactaaaaatacaaaaattagctacttatggtggcaggcatctgtaaccctagctacttgtgaggctgaggcaggagaatgtcttgaacctgggaggtggaggttgcagtgagccgagatcacgccactgccagcctgggcgacagagcgagaccgtctcaaaaaaagaaagaaaaaaagactctaaccttgacgcccctgcctctcagggatccctgctgaaggtggatgtgcagggagagattcggctcaagagcttccttcctagcggctctggtgaggcatctgcaggcaggaccaagggttggggttagggcgggttccttggtgtcttaaaccatggcattgctgagctctcctgatggtctctcctccgacagagatgcgcattggcttgacggaagagttttgtgtggggaagtcagagctgagaggtgaggagaaagtgggtctttctccccttggagtaggtcattgccagagttcatggagagaagtcagacagagcctcccctctccttgctcctctcccaaaacaggagtcaggagagaagtctctctctctctctttccaggttatgggccaggaatccgggtcgatgaagtctcgtttcacagctctgtgaatctggacgaatttgagtctcatcgaatcctccgcttgcaaccacctcagggcgaggtcagggttggggtggcctcataaattccgtccaccatggggaagggggcagtggggtcgtgagaccaaactaaccttgttgctctctggtctctcagctgactgtgatgcggtaccaactctccgatgacctcccctcaccgctccccttccggctcttcccctctgtgcagtgggaccgaggctcaggccggtgagacaatttcctgggttctagaactaccttggaacccaagccaagacctgtatgttcccaagactcactgcagagtgggggtggtggtagtggtgatggagtgcaaattggaaaaaggcttgggttgcggccggtggctcacacctgtaatcctagcactttgggaggctgaggcgggaggatcacttgagcccaggagttccagaccagcctgggcaacatagtgagaccccatctctctgaaaaaaaaaaaaggaaaaagctttggctaatggagttgggctgggcttcagcccttttccctcttgggagtacagcccacacccacacagccccacatggaggtccctggtggggaatggtgagatgccagtagaagatggcctgagtcgtggtgttttaccctctcatccaggctccaggtttatctaaagttgcgatgtgacctgctctcaaagaggtaagagtgaggctggcctggctgagttcagctctatgggacggaagacagggccagggcacctgctgcttctcccttcagatgcagctgccagcctcagaagccagttaaggtagaggctgtagaatttgggaaggtggggggcacctgtgctgaaatcctgttatgacattgaagaggaacaggacaagggactgtgccttcctggggctgactttgttcccgtctcctctgtagccaagccctcaatgtcaggctgcacctccccctgcctcgaggggtggtcaggtgagtgtgtgcacccaccacggggagattcctgrggagagagygagctcagcatgacgggtctgcctcaagaaggtgccaagcccagcaccttccctttccaaactccagcctgtctcaggagctgagcagcccagagcagaaggctgagctggcagagggagcccttcgctgggacctgcctcgggtgcaaggaggctctcaactctcaggccttttccaggtattcgctgtggacccccagcccctctcctcccacattcacttgcagcccccaccccaccctcccgaagcagctgctgcctggttcccccagcgtggtcagcttcttgccctccttcctctccctgcctctgcccctcacagatggacgtcccagggcccccaggacctcccagccatgggctctccacctcggcctctcctctggggctgggccctgccagtctctccttcgagcttccccggcacacgtgctctggcctccaggtccgattcctcaggctggccttcaggccatgcggcaatgccaacccccacaagtgggtgcgacacctaagccacagcgacgcctatgtcattcggatctgaggctccccaaacgaggacacgacggccaaggtggcagtttgtcccacgggaggacagtcgtttcttttccagcctcctggccttcggactctgaatctgggcaggaagagtcctcagtcccaagaccaggagggggcaatgggcccagcctttctgtggtatctgatgcaggaaggactgcagtggatcagaacttacaaaccaaacttttattctgagaaactggctgtacaatatctaaaaagaaagtgacatgaaggaagcaatctacaacttccttccgcttagcgwgcatgcatgtgtgtacgtgcacgtgtgtacrtgtctgcatgtgtgggaatccgggggctggcaggtggagcatcacggagcaggctgaggggagccggagttgggctgggagccattggcttttggagtccctggagctggagggggactgtccccagcctcctgcttccccccacaaagggcactgccgctgagtggggacggggacgatgccgggggaggaactggagaaggatgggaggtggggcctcctttgccctcccctgttgggggaagtgagaccacgatgtacttctggacactcccaggaccagagggagcagtgctggggggtgcggtggtggcggtggagaccaacttgacgatgggctgcacgctggggacggtggtggtgacgggcgaagtggtggtggaacctgagccgggggccgaggtgctgagggacaggacctggatagaaaggaaaggcaggccgcttgccctgtgccctccctgccccccagaggcctggcgaggacgcttcactcgctccctgcctgaacaagttgttcctgtagttcaccctgtagacagctatggctggagaccttgttcatgcagggcagctacagccctgcaggaccctggtgggcgcctcttccagctcttgacttggggcccagaggggactgtgctctactcctgggcctccccagggtgctctgaggtaacccaggccctccagatgctccctgtcccacagctctgcatacctgctgggtggatggggcgctggaggacgatgacattacaataaacttggttggaggaggggaaggctgtggtggggcagccgctcgtgcagacaccagtgtctggacaggaagtgcgatggagccaggaaccttcagcaagccaggggtgcgagggccaggctgtggggcctgcgagagggtcagcgtgggccggggctgcggggagaagaggaaagggggaagtggcaccatctactaagaagaggagtctgaagggagaggcctgggctcccctcgctcttcctcagtggctctcactagggctggggcatcctcactcagggcctggttgccctgagactactgactgagggcacatgtggctgtgtgcaagtgcctgtcccacacaggggttctcctctgcttcctcctattcctcctccccacccggccacggacctgcgtgatggtcagagtggtcctgttgacctgctgagcctgcagagcagcctgggcccgagccttgaccacctgggagcagaggaggggcccaagggacccgaattctgcccgataggcgtcctgattgtcaggcggtgggcgcagctttgccagaacaggagcacagtgtttctgcagaacagaaaaaaagccaggtagagggagggctggggaaaaaagccaggtagagggagggctggtgacactcttgagaagaaccttggggatggggtaaaaaaggacattccttatcatctcagtgcccctgttgraggccaaattatgctgaactattagtgtgtgtacagaacactgtgggctttctcataagaaaagatgggcacggggccaggtgcagcatcttaggcctgtatcccagcacttgggaggctgaggtgggtggatcacttgaggtcaagagcctggccaaaatggagaaacctcatctccactaaaaatacaaaaactagccaggcatggtggcacgcacctgtagtcccagctactggggaggttgaggtactagaatgcttgaacccaggtggtggaggctgcagtgagcagaggttgcatcagtgcactcccgcttgggtgacagagtgagactgtctcagaaaaaaaaaaaaaagaatggctgggtgtggtggttcatgcctgtaatcccagcactttgggaggctgaggctggcagatcacctgaggtcaggagctcaagaccagcctggccaatatggtgaaaccccgtctctactaaaaatacaaaaaattagccaggcatggtggcgcgtgcctgtggtcccagctacttgggaggctgagacatgagaattgcttgaacctgagaggcagaggttgcagtgagcctgagattgcaccactgcactccagcctgggttacagagtgagactccatctcaaaaaaaaaaaaagaaaagaaaaagaaaacatgggcactaatgtgtgaatgaacttgctaaatactgtggcaggatggttaatcaagagcgcatttgccttgtacagagaagaccacagagtaacaggagcattggggaaggatggtccaaatgccacaggctgagcgtgttaaacccttcttttttggggggcggtggtctccctctgtaacccaggctggagtgcagtggcacgatcatagctctctgtagccttgaactcctgggttcaagcaatcctcccacctcggcctccctagtagctgggaccacagacacatgtcaccactcccggctttttggtttttttttttgcaggtgggatctcgctacgttgtccaggctggcctcatactcctaggctcccagagtgctgggattacaggcagaagccatcatgcccagcccccttatttcttactcagtctaatctcagtctttccatctgtaaaatagtatcagactctgcaatgtcctctgaaaacatgaggcaaagatgggagtaagtgaataaaatatgccatatgcttgctaaacactgcctgtgtctcagtgggcaggtgtggggacaggggcttcagtcaccagcaggaggctctgcacatggtctgctccaatccggtcaatgttgctcagcacagggccgtccagcacactgcggatccgctccccttcctgctgcagccggggcagaatcagagtcttgataacctgttagaagggaaarggacaagcaaaagccggagggtcaccagggtctcccagatgggggtacagtgccctctataacctcatgactgtgtcccctcccccatttcttcctcccagaggcctaacatcgtgtcccagctcagccaagcctgcgatggagccataacgagtcgtccagggcgtcttctcgtccacccagctctgtaaggggaaggaaataaactaagatgaaggggtctgaaaggatgattgatagggacctaagtctttcatagacactttccttgtaaatcattaagacattacaatgaggccagacgtggtggctcacacctgtaatcccagcactttgggaggccgaggcaggcagatcacctgaggtcaggagttccagaccaccctagtcaacatggtgaaactctgtctctactaaaaatacaaaaattagccagttgtggccaggtgcagtggctcatacccgtaatcccagcactttgggaggccaaggcaggcagatcacctgaggtcgggagttctagagcagcctgaccaacatggagaaaccccgtctctactaaaaacacaaaattagctgggtgtggcggcacatgcctgtaatcccagctactcgggaggctgaggcaggagaatcattggaacccaggaggcggaggttgtggtaagccaagattgcaccattgcactccagcctgggcaagaagagcgaaactccatctcaaaaaaacaaaaacaaaaaaattagccagttgtggtggcaggtgcctgtaatcccaagtactcaagagtctgagggagaagaatcgcttgaacccaggaggcagagggtgcggtcagcagagattgcaccactgcactccagcctgggcaagagcgagactccatctcaaaaaaaaaaaaaaaaggtattacagacaagcctcaagacccttagacccccacaagttccagtccctcttccctctgcccccttgtttccagtgtgacttcccccaaccagaggtggccagtgatgaagcaaatgacgctcaagttttcctggctcaccttggtgaaggtcttggtgatccgggactggatgttgttagtggttgtgctaaaatgcttgcagatctgggccaccaggcgggcagcaaagtctcggagtgcccagtgattgtccacatctggtcgcaggcacaactgtctgctcacgatgcaggtcatcacagctggaatcagctcatggacctaagggagaaagggcgggacagctgattctggttttgtttgtctgcttgagataaagtcttgctctgtcacccaggctggtgtgcagggacacaatcatggctaactgcagcatcaatctcccgggctcaagcaattctcccatctcagcctcccaggtagctggggccacaggtgtgcaccaccatgcctggctaattttgttttggttaattttttttgtagagatagcagtctcactactgtcctcaggctgtcctcaaactcctgagctcaagcaatcctcccacttcggcctcccaaagttgctgggatttcaggtgtgagccactgctgaccactgacttcctgttggtggcagcagggtccctagtccctggaagggaggatgggcaggatcactcacgtatttttctagatagagcgtggggttgtccatcagcgctttcaccatacgcatcaggtagatgagtagggccaggttgttctgaaccacgttcacacggacctgtgggagggagaagtgctgggcatggggcagggagaccctcacaggagcttccactgccgtccctgcactgtggaacctcatgctctcaccccctccgagataaaggtactgaaccgtggcagcatctgatacagtccagggtccgtggcaatgctttgcagggcttcctgtgggaggagggaagccagtcaggtgggggtgggatgtggggagcaattcatagggcccccaggaggaggcgtctcagggccagggcaagctggtggggccctcaccgccctcttggcctcgcaggagcccacgcaggcctcggtgatctccttgtagtagagctgctgctccacagacaactcgtggatgctccggggcttcagtcgcaagggggccccctccagcaagggcggcgccttcttctctttccctgtgtgattggaaaggtgggtctgacaaagaaagctccagaagaaacctcagtaacagaagaaccttaaccctccacttcccctgagacccaggagacctggcttcttcttaggctcccccatcctttctggggctctggccctgacctcagccacttcaccaatggccacatggaggcctggcatggtggctcacacctgtaatcccagcactttgggaggccaaggcgggcggatcacatgaggctgagtttgaaaccagcctggccaacatagcaaaaccctgtctctactaaaaaaaattacaaaaattagccgggcgtggtggtgggcacctgtaagcccagctactcaggaggctgaggcaggagaatcgcttgaaccctggaggtggaggttgcagtgagctgagatcgtaccactacactccagcctgggtgacagagtgagactctgtctcaaaaacaaaaaaaaaggaaacaaaacaaacggccatgtggctttgggcaagagtccagagaggcctagcctaggaggactgacctttgccgtcggctgtggtggccccttgacctttgcccttcaggggtccgtcttcctcctggcctggcttggctgacttcaggggttctgtggcttcagccttctgttgctctttgggagctggtgggaaagcaggcacagcgggaggggtgatgagcatagtagaaaagtaaaaggtgggaggaggccggatgcggtggctcatgcctgtaatcccagcactttgggaggccaaggcgggtggatcacctcaggtcagaagttcgagaccagcctggccaacatggtgaaacctcgtgtctactaaaattacaaaaaattagccgggcgtggtggtgtgtgcttgtagtcccagctactcaggaggctgagacacaagaatcgcgtgaacccaggaggcacaggtttgcagtgagccaagattgagccactgcactccagcactcctgcactccagcacaggcaacagagtgagactctgtctcaaaaaaaaaaggtggaaggaaggggaaagggacccagagacccagagggtggggcatggaggttacctgggggcgggttctcggggatagctggctggcagccctcgatgctcagccaatgagctgcaaggaagrcaggtgtcaaggtgaattgccacgcatggacattggggagttgccccatgctatggaagcgtgtttccactcctgctccccttgcaactcaccagggatctcacactgagcttttcttctattgtgaggctcctcacacctacacacatctgtcctcctttccctcctccctgccaccctgctctcccctcccccaacctttgaggcagacgtccaggggcacccggggcagaggggtattgatgatgtcgctcagatcaacctccttctcctcatagaagtaaagctcccggcccccaccagaggcgaagcggaaaggaatgaactcctgggcgtggaagccatagagtggctgtggcaggagagaggggcatgggtaagaagggagccggaggagacctggctgaaggatggcgtctcacccccccccgcctgtctccccaaatcacctcgacattctttagcttcaaggcgtagtcaatgtcactggtggtgagcttctgccgcttccccatgtgcatgaacttcaaggcatcctggggtcggtgacagaacagacatcagcccaaaatcctaaggacggggccctgggtgacatggacccaatgtagagctggacagaagggccgggtcacctgtgcgatctctttgatgcggtagctgacctcatccgttagcagctggcaggtctcctcctgaatctgggcgatgcccatggattcagccaccaccttcatggactccgagggcagcacagtgttgctaagcttcagcttcttctcctcagccattctggagtccctcttctcctccctggaaggatgaagcccccggtggagagacggagaccctggcagaggaacggggcaggcagaagaaaaagaaacgtgagacacagggagagggccaacaaagggaggacagtggagacaggggaggaactccgagtgtcttatgtccatccccacgtgagtcagccctgaggtgtaacagagaaagatacaaatctgggctggggccaggttcagtggctcacgcctgtaatcccaccagcactttgggaggacgaggcgggcggatcacttgaggtcaggaattcgagaccagcctggccaacatggagaaaccccatctctactaaaaatacaaaaattagcagggcgtggtagtgcacacctgtaatcccagctactagggagactaaggcacgagaatcacttgaaaccagagggcagaggttgcagtgagccgagatcacgccactgcactccagccagggtgactccgtctcaggaaaaaaaaaaaaaaaatctggactgggcctagtggctcatgcctgtaattccaacactctgggagcccaaggtaggaggatcgcttgagcccagcagttcacgaccagcctggacaacacagtgagaccccatctgtacaaaaaatacaaaaattagctgggtatgcaggcacagggctgttgttctagctactcaggaggcagaggtgggaaaactgatagagcccaggagctcctaggctcaagcaatcctcacacctcagcctcccaagtagctgggactataggtgtgtaccactacacacagccaattttttgcaggggcaggggcagagacagagtctcactatgttgtccaggctggtcttgaactgctgggctcacgcagtcctcctgcttcggcctcccaaagtgttggaattacaggcctgagccaccaggcccagcccagatttttatctttttctgttacacctcagggcttcaatcccaccactttgaagttttgggctcaagcaatcctccagcgttggcctctcaaagtgttggaattaaaggcgtgagccgaagtgtctggcccaggctcagctttccttatcttcatagcaatgccatccatccagacacttgttctttatctgagccttcacatcaaatccaccaggtaggccaggtgcggtggctcacgtctgtaattccagcaatttgggaggccaaggtgggtggatcacttcaggtcaggagttcgagaccagcctgagcaacatggtaaaaccctttctctactaaaaatacaaaaattagctgggcatggtggcgcgtgcctgtaatcccagctacttgggaggctgaggcaggagaatcacttgagcctcggcagtagagtttgcagtgagttgagattgcgccattgcactccagcctcagtgacagatggactctgtctcaaaaaaaaaaaaaaggtaaaaaaataaatccggtcgggcgcgttggctcacacctgtaatcccagcactttgggaggccgaggcggacggatcaccaggtcaagagatggagaccatcctggccaacatggtgaaatcccatctctactaaaaatacaaaaactagcttggcgtggtggcacgcacctgtagtcccagctactcgggaggctgaggcaagagaatcacttgaacctgggaagtggaggttgcagtgagccaagatcgtgccactggactccagcctggcgacagagcgagactctgtctcaaaaatcaatcaatccaccaggtagtccaacctgactcctctgctcccactgcttggcccaggtcaccatcatctatccactgggtaactccaaaaacctcctaacaatgtcaaccggagtctacccttgcctttctctacatctattcctaacgttgcagccaaaatgcttctgtcaaactgtaaagcagattgtcatttctttgctcaaaccctcataatggctctccacttgccataaagtaaaacctgaaatccttataatgggcaggtgcagtggctcagctcatgcctgtaatc

SEQ ID NO: 94700 - DNA, 125796 bp, Homo sapiens
  misc_feature (1)...(125796): n = A,T,C or G
aaagaactgaggaattggattttattaaaattaatgttctttccatcaaaatatatcattaaaagactgtaaaaacaagacactgagaaactagaagaaaacattcacaagatatgcatctaacaaatgatcgatatccaaattatatacagaatttctgcaaatcaacaattaaaagaaaaacaagttggtcggttttggtggctcatgtctgtaattccagcatttgggaggctgaggcgggtggatcatttgaggctgggaatttgagaccagcttggccaacatggtgaaaccccattgctactaagaatacaaaaattagccaggcatggtggtgcatgcctgtaatcgcagctacttaggaggctgaagcaggagaatcacttgaacccaaagagcaagaggttgaagtgagctaaggttgtgccactgcacttcagcctggacaacagagtaagtgagactctgtctgaaaaaaaaaaaaaaaaaaaaaaaaaaagaagaataaaaataaagaaagaaaaagaaaaataagtcaacacaattggccaaaagttttgaacagggacttcgctaagaggataactaaatgctcagtaagtatgttaaatgtttctcattgtttctcactggtcaggagttcaagaccagcctgaccaacatggtgaaaccttgtgtctactaaaaatacaaaaaaatagctgggtgtagtggcgggcgcctataatcccaactacttgggaggccgaggcaggagaatcactggaacccaggaggcggaggttgcagtgagccaagatcgcaccattgcactccagcctgggtgacaagagcaaaactctgtctcaaaaaaaaaaagaagtctcccattatttatcaagaaaggcaaagtaaaactacaatgaaataccacttcacatccaccagaattgctacaaattaaaagaatgataatattaagtgttggtgagtctatggaatattggaactcccatttattgctggagggggtgtaagtttgcataaccactctggaaaactgtgtggcaagatcttctaaaggcagatgtagacctatcctaaggaaccagcaattccattcctagaaaaatacccagtagaaaagtaaacgtatgtccatcagaaaccatgtatagaatggttataacagctttaccgataagtgccaataagctggaagcaacccaaatatctataaatggaagactagatgaattgtattaactaagtttatgcaattgaaaattatggagctacaaaaaagaatgaactgttgatatatggaataacatggatgaagttcagagaaataaagctgagcaaaagtagccagacacaagagtacatattgtgtaattctttttataaggagtttaatacgggcaaaactaatccatgactatataatcagaaaattgctttcttcctggaggtgagggagatatgaatctggaagagaaacaaaagatccttttagggtgttggaaagtttcatatctggatctgagtggcagttactccagtgtctacaggtacacaaagtaatcaaaatgtgcacttaagatgtatacagtacactttattatgtatatattatgcttcaaagaaaaataaattttaaaacactacatctgtcctcagcatacttgacctcttagtaacactgaaaccagttagccacactattttaaaccctttcctctcttgagagtaccaagtttgtctattttcagtcttttgggctgctccttgtcagttctctttagtgggaatcttagttctctaagtattgtagtgtctcagagctcaatctagggccactttctcttctctttctaaaatctctccctgggtcagtggttctcagcactcaagaatgggtcagaattaatctaacggcttcttttttaatattcatgtccaactaacaccctagggcttcttattcaattgatcagggctgggatttggcatctgtatttaaaagttccccaggggaatctagtacgtagtcaaaattgagagctacttccctaagtgattttatcccattgcaaggcttagataccatttgtgtactaattacagtcacatgtgtttccaatacaaatgtttccttaaacacaatagtattatgaaaaatatctatttcatattttcatctatgagtcaaaatatccaaaatggatttcctgactttctacctcccactcccatctgctccttcctgaggcttccctgtgtaattaaccatccaatctaccatccacccagctggttaaagcagaaacctatgaatcattcttatttctccttttttttctcccaccctgacctctcctgaatccaacgttagtaaattctatcagactaacacccagaagataccttgaatcagctcttattaccttttctgctacgattctgatcaaagctgtatcatctttcagctgaaacactgaaaaagctcctaactgccattcctgtttccattctttcctttctttcttcatctttatacagtctccaggttgatttttaaaaaaacatacagcatatcactaccctgcttcaaacccttcagtgcattctattcctcttaaaatgaattcaaagctccttatcttgagccttatgatctgcacctggcttattttccaacattaccttataccattctcaccctcactccctgtgcctcagccatatcctggcctcttttctgttcactgaagatgacaagtcatttcccacttcatgctctttgaacttggcctggaatgcatttcactggctcttcacaaggctggttccttcctgtcatttaggtcccagttgcttcctgagagaagccttccatggctacttcatcctaagtgatccacctctgcttattctctttcatataactctgtttcttcacagtgcttttcaaggtctgtttaagatttttgtccctttcttcattgtttgtctctctgtactgtaatatgtaagctcctacaggacaggaatctcttttgcctttttaataagtatttctaccttctgaaacagtgttgaacacgcaataggcacttgataaatatttgttctcaatgaatgaatgaggtcttgagaaattagtaaatttattcataataaaaataaaaagtaccatttactgagcatctatactatgccttttgctaagtatattaagaattatctcacttaattaattatctcatttaatttttaacaacaacaatctgagaggtaggcaatgttatcccaatcttataaaagaaggaagtgagagactgaagttgacataaattcatacaggaagcaagtggtagtgcaaaaatttgagcttaatcagtttaaccccagagctcatgcttttgtgcttatgctattcttctccctgtcagaaaaaaaaaggtaaataaattttcacagtatataaagggcagcatctgcttatgaacaggctggggcactcttgtggatcttgctatgtttcttcagtgaggccaacatgaaacactattgataatactgtcttatatttatgtcccgagttctttaaattttctaaagtatgcgctattttattaacttctttggtctctactcatgtgctaatttattatatataacatataatatataaatatatataatatgtataatatatatatatattctatccaccctttcattcgttatacacagtctagataggaaacagacagcttatatttaaagcacaaaaactgtgagaagtgtggtatgcatgaagacctaggacaaccaggggaagaatgaactaactctgttggacaattcagagaagtcctcatcatggagatgacatttgaagtgaaacttaaatcttgaatcatgagtaaaacgtaccaagcaaaaaacagacaatttgatctttgacgaacctgacacaagcaatggggaaaggattctctatttaattaatggtgttgggaaaactggctagccataggcagaaaactgaaaccagaccccttccttataccttatacaaaaattaactcaagatggattaaagacttaaaataagacctaaaaccataaaaaccctagaagaaaacctaggcaataccattcaggacataggcatgggcaaagtcttcatgtttaaaacaccaaaagcaacggcagcaaaagccaaaattgacaaatgggatctaattaaactaaagagcttctatgcagcaaacgaagctatcagagtgaataggcaacctaaagaatgggagaaatttttacaatctatccatttgacgaagggctaatatccagaatctacaaggaacttaaacaaatttacaagaaaaaaacaaccccatcaaaaagtggttgaaggatatgaacagacatttctcaaaagaagacagttatgccaccaacaaacatatgaaagaaaagctcatcatcactggtcattagagaaatgcaaatcaaaaccacaatgagataccatctcactccagttagaatggcgatcattaaaaagtcaggaaataacagatgctggagaggatgtggagaaataggaacgctttttcactgttggtgggagtgtaaattagttcaaccattgtggaagacagtgtggcaattcctcaaggatctagaaccagaaataccatttgacccagcaatcccattactgggtatataccccaaggattgtaaatcattccactgtagggaacacatgcacacatatgtttattgcagcactattcacaatagcaaagacttggaaccaacccaaatgcccatcaataatagactggataaagaaaatgtggcacatatacaccatggaatactatgcagccatgaaaaaggatgagttcatgtccttcacagggacatggataaagctggaaagcatcattctcagcaaactaacacaggaagagaaaaccaaacaccgcatgttctcattcataagtgggagttgaacaatgagaacacatggacacagggaagggamcgtcacacaccagggcctgccaggggctaggggacaatgggagggatagcactaggagaaatacctaatgtagatgatgggtggattggtgcagcaaaccaccatggcgcatgtatactatgcagcaaacctgcacattccgcacatgtatcccacgagcaacagatgctcatgatggttgtaaaggatcaactgtattttaaaacataatttaatatatacttttaataaacacattcatattgttcaaactataacccatagatttttttgtttccttttttttaacttttattttaagtttaggggtacaagtgcaggtttgttacataggtaaacctgtgtcctggagatttgttgtacagattgtttcatcgtccaggtattaagcctagatttcttagaaggaaaaagacaccaaaaatatgttcttaaaggtcaagggctgggttttgtatgatagctagaccattatctgtaggatttgagaccctggtcaaagaccataataaaatattaatctttgctgaacacattcacttatctaaccatctagtcaaaatagcttatgcgctgcatttttaaagaataacaggtggccttttgtcattttatgcctctctatctgagccaaactatataatcatttgcattatacctttggctcaaaaacgtttatatgtttaggctatcaaggattatttttaatggttcctaaatcattttaatcctcagaactactttggccaatatttgtctttgttaaaagttaaaggtgagcactcagtattatgtgaaaatgaatgcaatatttaatttttagttttgtcctgttaacattagatgatgcccagatagtaagtctttttggtaatgtaatcagtggatgaggaatctgaccattgttgaaggttttgtatataagaagtcaatacaacattgaccaaaatactaaccagccagagaaacagaatcctaactatttctgaggaaactgtaagtagaacttctgctgaacaaaattgttatttgaattattagattttttctttatcccaagtgatgcatttttaaaggcttagatatttgttgcatattcacctgcataaatgtatctgtttaaattatggcttattcctctaggatttgatttattttattcttttttttgtatggacatgagactcttaattatggaatgacaaatttgtttattattgcaattagtgcctaatgtgaaagtctcataatttcttaactattgaattacaaatttgtttattaagttcctaatgtgaaagtctagtctctgtgactcttctttttgagaaggaatagatcagtaatctagtgacatataattggctgtattaatatgytatgtttaatatttaatatcatccaaatcaactgctgttgaattgatcattattaatacgattgtgaaaccttataggctattaaaacatttatttaaattataaacttttcaaaacagaagtctagaccaaattatataaatctccctggggatgtccctataaaagctggcccagggtcatactgaaggagtattacagtggggaagaacatagcctttggaaatagactagtttaaaatatgggctccactactttctatatatttggttgggcgagtcctcttttagccttaccttgcttatttgtaaaatggataatataatgctacctacttcatagagttgctatgagaattaaatgagataatagtcataataactatatttaactaacgtttatgagatgcccagcatgttaagaactttacttttgttatcataatgarttcccctaacatagagaaatgtactattacaggccctgttttatagatgagaacactgtcttagcaagatagttcatttcacgtataccatgttgaacacacagtacagcacacagtgagtcctctgtatgtgttaattactggtattttcctaggacttggcaacaagcattttgagaaatttattctgcccttgaacatctttgagcccattgagatgttctccaacgcaaacagtaggttaagygtcctcactttacaatggcaaatcacttaatggaggtcatgtgggttcctgaaatgtttgatgaaagcctctggtttgaatgttacaacactactggttagtctttatatattagtttatctcttcctaaaatatcacggtaaaaacaaggcttagttaaaaactgatttttttttttttttttttttttttgagacggagtctcacactgtctcctgggctggagtgcaatggtgcgatctccgctcactgcaacctccgcctcctcggttcaaggactcttgcgtctcagcctcccaagtagctgaaattacaggcgcgcacacccggctaatttttttgtatttttagtagagacgtggtttcaccgtgttagccaggatggcctcgatctcctgacctcctgatccgcccgcctcggcctcccaaagtgctgggtttgcaggcatgagctaccgcgctctgccaaaaactgatttttaagagatacccttaaatctaatcctatactaaaccagtgggcaaactattagaccagagggtcagatttaggccttgagagttctggtctggttttactgtaaatcaggaactatgctatgtgctctgcatgaattactataaacgggttttcttgaaatattatcagcaactgggaagtcaccacttttcaaagaattccacttgaatccaaagatccaaatattacacattcttcactgtattcaagtcaaatatttctacatatgatctcgaagtattgctcctaacatacaatttctcaataaatatttattgaataatttatttctgacacactaaaaatgaagtgatttaaaactgtcctctacatggcttcccttcaaatatttgaggacaatatcacttctctattgaagctttttcaccagcttaatatctgaagattctcaaacttataatcagtgactacaacatagaaggaagttcaggtgttgtgggcctaataccaaatattgtctataaggctaggtgtggtggcttatgtctataatcccagtgctttgggaagcccaggcgggaagataccttgaggccaggagttcgagaccagtctgagtaatgtagaaacacmctatctctaaaaaaaagaaaaawaattagccagatgaacacctgtagtcccagctaccctggaagcagaggtgggaaaatcacataataacctcaaatcagtaaatgtttatggaataactattataaacaacatttaaaatcaccatgattactttgaacacacgttatayagagattggatatagagaagtcaaaggcccacacatccctcacccaaatctgggctctcaaaataagcaggcaaaagtcttaaacacaaagcataataaggacacattgttatgccaattagaggctttttttttttgccaattaagattaattcagtatggcttgaaaccaagtggaaaatgttcttaaacaaaaggaatcaaacagtgaaaacaagttaagcattaaaagcttaaacatgttaagcattaaaacatgttaagcattaagttacctgtgctgacatccatatgtctcattttattgcccaatggaatataatcaaacccaagcattcctctacttagcacaaaggtaaaattggcataaaatataagcattatgaaagtataatggattaaccatggcacgggttattcttttctttcaggcaggtccaaaatgtggctgcttttaacaatggcaagtttgatatctgtactggggactacacatggtttgtttggaaaattacatcctggaagccctgaagtgactatgaacattgtaagttactctgsggaaaaactctataaaactaaaagatgctattatttaaaatcataatgagttaaagattttatatgaccaattaaaaataaacagtaatattcatttattagatatatctaaaaatcaactaaaatttaaacttttgggtttgcttcctcagagtcagatgattacttattggggatacccaaatgaagaatatgaagttgtgactgaagatggttatattcttgaagtcaatagaattccttatgggaagaaaaattcagggaatacaggtatatataagcttcttttcttccttcctttctctcttttttcctttccttctttcttcttccttccctctctcctttcttcctccaacttttccttcttttgttcttccctttttcctccttttatttcttgctaaaaatgtaatgtcttgctcattctggaaatgcaaaaataagctatattttcagtcttcaaggagatcatcatcaagccaatgaaatagataagtaaatgagtgattataataatatgtgataagctcaagctacaactgtacataggatattaaactgaaggttttaataaaattacctaactcagctaagggagtcaaggaaagctcactctcagaaacagtaactggatgaagatctaaggatcaggaagagttagccagggtgtgtgttgcagaggggaagatggggaaccaattcaaggctcatttcctaaacacatacaggctaattttcactagtactattaaaaatttaccttttactcattgtagaaatgttatgaagtacaaaaagaaaaaaaaaagattactcgtaattttaccactcacagtttaccaaatttaacattgtgctgaattacctgagaatataattttttcaatagttttattgagatgtaactggcatataataagctgctcatatttaaggtgtgcagtttcataagttttggcatctgagaaatcaactccctgagaaatcatcaccacaattacgataagatattcaaaaataatcaactcaatcaggcaaatgtatttagtgctagtcatatggaagactgtttctagcctcacatttatcctagaataaggaatacatttataaagtttataaacattttcttccttaggccagagacctgttgtgtttttgcagcatggtttgcttgcatcagccacaaactggatttccaacctgccgaacaacagccttgccttcattctggcagatgctggttatgatgtgtggctgggcaacagcagaggaaacacctgggccagaagaaacttgtactattcaccagattcagttgaattctgggctttcaggtaaacaaaagggacaattaaaaataaacactgggctttaaaagcataggcatttgccccttctaatccagtcccattttaacaaattacactccaagtaggaggataaacaagtcattttcattctaatccattcttggattcttccrtgtacctcattcctagggtagcttttccttcaaacttttgtgatctcaggagtctccattagggatttccagaaagtgattttccaaatggaatgaacaatatggctgaagcaaggaaactcacagcccctggaaaattccaaaggaatgtccatatggattcaagagagaagtaaaaacccatttaggggtaggagaacagcaatctgaatcatcatcaataggaggggtggggagagtgaaattcagatatcatggagagattatcatgggcttctctcactggtcttcttgtgccttattcctggaaattactgatggaggtagagaacagaacaaaacctggctgctgatgctaaggcatgaaagtgttycaagagttctaggagctgaaaggaaacctgtgtgtcccaggtgtagcgggaaaagggaaaatgacatgagtgaagactgaggtgcagatggggcagtagtggtgatagtgagagccttgggcctcattctgagtgcactgagaagttttaaaaagaggagtggcataatacagttttcattttcaaaatatcatgttggctgatttgtgaaaaataaaatagagaaagayaggatttatattaaatgacatggaacacagcatacacattattattaaatctgacatttcatttcagggatagaaataattcccacctacagatactatcttgtttggattcaattgtggctgcaatgctgcgcttcagaaatgatgtcagttgtttataagaagctgccccaaagggcacctgacatccactgatggtctataagcatcaatgtttagagaatccagttttctgtatcccaaagggatcattagctataaatgcttgaattttagaaacaatagcaaggaaatgtattcactttcattttgtctttttcctttcagctttgatgaaatggctaaatatgaccttccagccacaatcgacttcattgtaaagaaanctggacagaagcagctacactatgttggccattcccagggcaccaccattggtaagtaatggcagtcaaggccaagtggtttacttctcataaacacttycccagtggttatggtaggcatgttagcaaccacactaattgctttccattcatttaatgcctccaacaacacaatgacatagggacaattataattcctattatatgggaaaacaaaacaaggggatacagttcgtgcaaggttacatggattattaccaatagggtagctcaggcagtctgactcccaagcacatactctgaagcattataccatacagccactgacctaagtttattctattcatttgaccatatttatggggcaggctcctatgatgtatcaaaagaatacagaaataaataaaatagatgaaaacttctgcctttgtaccatttatactctagagataggaggcagagaaaataaaaaaggttaaaaagtaaaatgtaatatattttagataatgctaaagctatggagagaaaataacccagggaattacattagagagcaccagaggggttcacagaaattgtagattggtaacacaagcactctttgggtaaagtcatgatgaaggtcagagagtgagtcatgtgcctacctagtaggcatcagatgttccaggaagacagaatagcaagtgagaagaatctgaagctggagcacacctagtttgttcaaggaacagcagtgaggctatgccttgtgtggatgaatcaaattgagaaagagacagagagagtgagagatgagatcacagatgttggggaggaaagactgttcggggctctttggctgttgtagggattttagctttcactctgataaaaaaagaaaactgcagaataattttgaatcgaagagttacatgattcataacaggatcccttttgttgccaggggcaaagagscaggagcagagaaccaattagaggactcttatagtacccatgcaggagatggtggtgacctggatgaagggtgttcttggaaaaaccattcttccacaaatagaaccagactacatattatatagttgtctatatctgaaagggttttttttaggccattcttgagtatcatcgatatgtcattattgacagtgggagggccttgcctatgtagctatactgcagcgttaaacttgataactacttgatcacatcctcatctgccagtatactactgcttacaaaattaattcattactgaatgtatttactatgtatagatatttgaattctcttgggtccttatttatcaagcatttactatgtgccaagaatcatgataaattctttctttacatgatttacttcctttagttcctaacaatctaatgaagcactcaccactatccttgtatttcagagagggaaacagtggttcttagagattaggtggcttgtccaaggtcacaaagctaataaaccacagagccaggattcaaattgagtttggtcatatttaaatttctactcttaacctttccacttatatactctactcatattaagtgttaattaattatctcattgtaatgagatacatttaaattcataaaaaatataaattcataaagaaattcataaaaaaattttttgtaaccatatgagtatcctaaatttggtctattttctaaggtcagataaaggtttatgataacttttaaaacgttccagcctcatgtccccatagaaaaatctatgaaaataaaacaaatataccaaaatctaatcactgagccagcagagatgccaatttctcaggctgtctcaaacaccatccttagtaagtccaaaataatgtcacacttataaaaacaaacaaaacaacaacaacaacacacacacacacctttttcaccagttccttgttctttttcaggttttattgccttttccaccaatcccagcctggctaaaagaatcaaaaccttctatgctctagctcctgttgccactgtgaagtatacaaaaagccttataaacaaacttagatttgttcctcaatccctcttcaaggtatgcaattctctttaattaagtgaatctaagacccttgattgcccatggattttaaagttatagaaagagaacagagttataaaaagagaacaatcatttttatatccaaaaatggaactgttcgcatctgtattatttcttccatagcactgaccatgtttgaatctccttacagcctgcgagatccccctttctttctttgttcttcatgtgagtcagcaatgcctgggagtagttttgctttttcacagatggtttgtttattaagcactctacacagttgtgtcaaggctgtgattccactccaggaggagggaagatgaaataaaaacaaaacaaaatagtcaaatgagaagactaacccacttgggccagagagactggaaagaggagggaaaggaaggggagggaaagggagaaaaggaggaaataaatcagtgattgagtgaggcaaacaccttgagatctctcatggctttcccttttggctttcctaagagctccttcatctttaaatgggcgatctcataagtcagtggtgtggatttcaataaattataaatattaagtgccttatgcagtaggcacacatgttatggaattaatcgttttgtttgacaatgcttaataccctaattctctcacccagtaaaaccaacacacacacacacacacacacacacacacacacacacacamwctctctctctctctctctctttcctttaggggaacggtttagcctcaggttataaaatataaggattccatttccttctatggttttgtactattcatctcttttcattctgtattaatatgtatgtctaaagcctaagagaacttacctataggcaaactacatttggaaaacttttattaaaatctaaaattttttgatggcccagaaatatttattggctacattgattgagaacttatttcctactcatactcagattttctgataggcaatgcagacgtagattaaaatttagaaaagcaatagacctcaagttagaggcttgggtaaggattctaggtataatcgagctctaattagcccaagaccctaactcatgttaacctcatgtttcctcgtgtataaaatagagatgacaaaatatctgccttcctcaaagagagttggggcaaactctttcaattcttatactgagcctcattgcctctgtaaaggctttgctgaaaatatggccaagtcaccatttctcctcccaaacttttcacaatttattgctgaaatctcacatcttggcacttcattatgacagtctgtcatgtgtttttaagattttatcccacaactcctatcaccccaactagattgtaactctttgtgtcttatacttcctctcagcagccagtacagttctcagtgccacaatagatacctagtattgatatctgtgctgcccatttcacaactttattagggaattaactaaatgaaagtattggaaattcctaaaacaacatgtaagaataagaatatatcatcatcctcatcacacatgtataagtagattagataaactagtgagtcttttctgcagcttgattgctacaaccctctaatagtgcctttatttttcagwttatatttggtgacaaaatattctacccacacaacttctttgatcaatttcttgctactgaagtgtgctcccgtgagatgytgaatctcctttgcagcaatgccttatttataatttgtggatttgacagtaagaactttaacacggttagtatgcatttcaatttctatattttgagcaacatctttgattacttgtttcattgccacttagaagtggtactttatgagaactaggagtaggttcagaactgcgatatcctgataaacatgagagaaatcacaaatcattgctcccaatttaatcacttccagcatccttccatcaccccagttgcccctaaaccaaataaacaacatgaagaaaaaacacaattcactactcacttatgaccacctaaatactaggtgttacatttaaattctgtaagagaaaggactgaaccatatattttagcaggctcctttgtgagaaaaatgtctagatattgaataaatgttttcaataaatatttctaatgctgacagtcattttgataaatcttacagactatatttctgagcaactatttatgtaagactttgcccatattctttttttgagatagagtctcgctgtcacccaggctggagtgcagtggcgcratctsggctcatagcaagctccgcctcttgggttcacgccattctcctgcctcagcctcccgagtagctggaactacaggcgcccgccaccacgcccggctaattttttgtatttttagtacagtcggggtttcatcgcgttagccaggatggtctcaatttcctgacctcatgatccacacgcctcagcttcccaaagtgctgggattacaggcgtgagccaccacgcccggctgactttgcccatattctttatctaccttttcattcactttgtattgagttggagtttcaaaacatatggacaaaatacactatcatagttaagagtatggatttagatcagtttaaattcaaaccctacatttggaactgacttaaacgtctctgtcttgatttcctcatccacaaaatgggttatygggaagatcaaatgagctagtatgtttaaagcatatagaacattgtacaaagcatatagcacatagtaatagcatataaggttttctactactattcatagacaactatctcccctccaaattgtcactttagttatatacccttgaacacctaagaaaattacatctattgataagaaggtataattctatgaagtgttgtggttacttgtcattccatatgtggagtttaacagagagtagcctgtcctcatcacacgaacaaaaggcagaacaaattactgtattccattagtgagagtcttataagaaaaataatagtaaaataagacaaaggaaacaaaggaaattagagatttcatcttctgcgtaataatttgcagaagaccatcttcagtctccaatgaagatggccaatttgtttcactatggccacagtccgctatattaatggcattaagagtcactatgaagtggccttctgcaactggagaaaggaacttcagtttgttgcttggggttctgcaaagcaagaggcctgtgtgtgaatatttaacctacagcactctagcactgggtagagaagcataaaagctgagaatttagactcagagacccaaattaaagtatctgtctccattctgtgtggatcttggacatttctttaaacttctttgtgccccaattttcatgttgataaaatggaactaataagttctcctcattaggcagctacaaattaaatgggttaacacatgcaattgcactttgcaaattctgaagtgacatacaaatgtgttgttcatatccttccagtaaatgctacctttaaacacttgacctgaatcagaaaacataaatctttactktttttaagaaactgagtatgtgtcttagtatgtatataatatgtgtgtctgttgatttctagagtcgcttggatgtgtatctatcacataatccagcaggaacttctgttcaaaacatgttccattggacccaggtattcttttccaaatgctgttaaaatgtattttgtgagtctcaacccttttcactttacctaaacacattcttaaaatatcctgctgagtacacctggaaggtaatttttctggcactgactaccatacaaaaataactatgaatttatttcaaagaagaaaatgctttttawtttattttattattattatactttaagttttaaggtacatgtgtacaacgtgcaggtttgttacatatgtatacatgtgccatgttggtgtgctgcacccactaactcgtcatttagcattaggtatatctcctaatgctatccctccccccagcaaatgctttttatgacttggtatgcaagaaaaattattttgagtgaagctgcatttaaacttacataaataccttgtcctagattattaataatcttttggaatgagaaaaatgtttcttaataattgtttaaattgaaaataaactgcttggaaatgtttgaattttatttttcacaatataataatttttatttgtttgcttttaatttctctatgttaggctgttaagtctgggaaattccaagcttatgactggggaagcccagttcagaataggatgcactatgatcaggtaagcttcttaaagatggaattattcacattttgaacaacaatactaactatttaaatgttaaagaagaaattatgttaactgcgcatctgttttccaaaggaatgttgatgttctgtctctcattctcccacatgactatgcattcctgctctggtggctaygctcatttaaagaggtttacaaagctgccctcaaagtactacacccctgtgtgtgagagacttcccaggacttaccactacccattgccattacacagacctgtcccatatcccagatccccagcacactgtcctctcctttctgaagtactaatacctgatataataagctaataattctaactgttcatggmatttctggtcttcttaaacaataccctttcctttgttgacagccagaggagtgatttcaatgggatatattcccaaatagaagaaaaagatgccgtgcttgcaggtcaaggctggaaatattttacaataggcagaggcctttggcataggcagacatattaagcagtcctcacacttgctgtaataagaatccagactttggagcttatcttatctgcagtcaatatgagtttgggcagtcatttcttcatctctccacccaggctcaggaagttgttgacaggatttagtgctataatatctataagctcttagctcagggtaagctctcgggttatcactgactatttttgaacaagggaagcaccctatagtattttgtaaccttctcttcttccttttcaccacatccaatttttccatccaagtagtagctgaacaactctactaattttcatttgtttccatgacttaaaatttagaaggaatttatatgttttaacaacaatgtcttatgtgtagagaaggtgccccccaaccttgattttgcatttttgatatctttaaagttttcagaatagcatgagatcaaacttttgttgaaaacattttttcctccaccatcactttctcaaatctccaaaacacacaggcttgctttgagtctctctttctactggactctaatactcataatcagaggacttcatcttagaggaacaagaaacccagtccccaagtccacccttcttccaactaaaccaataatataccaggttggtctttaactaactgaagcaatgacactaatttaagagccagggccagcatctagaaaactctttgaataataggatgtaagtaaaataarctgggtttataattatgaatattctccacacactcccttttctctaatatttaggaaatataatagaaatcatgaaaatattagggaaaattacatatcataaaatattttgctatggcaagttggctattacacaaaatgtgagaatacagaaacttttagtatattggattactattcttgaaactatgatctaaaaaaatctaacaaaattctctctgggcagcaagaaaatttgagataattctcttattcctttttctgctttgtaaacctctttaaaatctatgtgtgaattgtgattttcgagaaacaggacatggggatgataataccctttctcagaatttgaagcaacattttgtaaatactcaggtaagtattcaacaattacagctccataactgaaacaactgacctatcccctgaccataactgggaagtcaatacaaagccaaaataaatgactcaggayattttgagatcatattttagagtgtttgggtagaaacaacctattaacaattagaatctaatcaaatccatttcccttagcttgagttgcaatctatgttcttaatttgtaagacttactgtccaaagccttgctattcagagcatggtttggagccaatggcatcagcatcacctatgaatgcagaatctcaggctgttccccagatctactgaaacagaatttttacttcaacaagatcttcaggtrattcacaggcccattagaatttgacaagcacttatctaaaacatattgcattcacyttgctctgtggataaaggtggttttctctgtgcaatcattgctagaattcacttataaaaccgccagttaatgttatacactctacttgaatagtaagtactgggtttaaagtgtggttacctaaactctggttctttctcttgtgttttctagtcccarcctccctactacaatgtgacagccatgaatgtaccaattgcagtgtggaacggtggcaaggacctgttggctgacccccaagatgttggccttttgcttccaaaactccccaatcttatttaccacaaggagattcctttttayaatcacttggactttatctgggcaatggatgcccctcaagaagtttacaatgacattgtttctatgatatcagaagataaaaagtagttctggatttaaagaattatccgtttgtttttccaaaatactttattctctcatacayagtattttcataatgtttgacatgcagtgcttctttctgtaattttgactttagaaatatattggcatcaacaaacttccatttgtcattttgaatttttttaatttaaagaaatttgatttttcacctggaaatttatctagaaatacttgagagaatatatttctggggaggtgaaacttctcattttcccattcagtttctcttctgaactcacttatatatgagctgtgagccataagtgtttctaaaggacagtgttggcttcatattcgctctgcttatgtacacttgatactgagtatattgctttctattgttgatgaagctaagtctttccatctgtgtagtggggcctatcacttgctattttgcatatttaaccccatggaaaggccaattgggatataaactgaatcaactcactttcacttcccagggagtggagagcaagggtagtttgggaagcagcagatgaagtcaaccctgagtcaggaatttgggaagaaaagggtatgctctattattattattattattattgttctgccctcatgtttttgggtcttgaccaccaaataggcaccaactaaccaaactatttttgaaatctctgccacagtgctggaaaccacaggatccagaaacatccccattgatatatcaattaggatgtacaactgccatcagtaacaacaaaaaaaaaggctcacccaaactttcaaaatttctaaacacacacagccttaccttggaaattttattaaccccacaaatttgtgacctcatattttatgcaattaagttattcagatcacacctattatactatgttacggtttgatgtataaaatataaatgagataaggaatatcttgtacccagcatagtgtataaaacatagtgagtattcacaaaaacctrttaacaatgtttattatattgtcacatccctcaacctttgttaggaagccccaaacttaatttgttttaagcaagaaattgctaaaagaagataacttgggagactttatttcaatatttcagtgaactttgttgttagactttactaaactgacatgaacatgtcggtgactagttacaaatgttcatggtggtggaagcagttgaggactcagatgttttatcaactctacttcctcgagaaaagaacaatcattagattcttgcagtctcctatgctattccagctaactgcctttcttttagtcggtactcagcagatacaggaagttttggtttggattttgaacacaattaaatactatcttattgctcctacagcagctttgctatctcccatttgttaatttgaactgtcaatttatcagctaattttcaagagtttatttctatctgcctgctgtaatcacaattttcaagtgtttatttctatctgcctgctgtaatcactccttgggcaacctcctgccatgtcaaactcaatcatttcaaactcaaattcatcatccccacatctctgagccaaataagtgtcaagttaatgaagttctcccagtaaccagggagtgagactctggaatcaactttgaataccgcctctcctctagttatcctttccctttgtaaaatagaaactgttaaacatagataattttagacagaacagtttaataatcccctttgtatgcattactcggtttcaactattatcaatacatagccttctttcataatctggttttatctgtatctctagccacttctctcatcttaatttgaagcaaatctcaagcatcacatatttcatccatgaggatttcaggatgaattactaaaagataaagyctctgttttaacataataatactgttcttacatctaaaattttaaaaatatctagccagtgctcagatttccaattatttcattaataatgtttatttatgaaatgttttatastttgtttagattgaaattcaaataaggcctttatcttttattacttgatgttgtctcatgtttctttagatatacaggtccatttgcccttgccctttttttttttttttcttgagacggagtcttgctctgtcacccaggtaggagtgcagtggcatgatctcagctcactgcaacctttgcctctggggttcaaaggattctcccgcctcagcctccccagtagctgggattacaggygcacaccaccacgcccagctaattttgtatttttagtagagatgtggtttcaccatgttggccaggctggtctcaaaatcttgaccttgtgatccacccgcctcagcctcccagagtgctgggattacaggggtgagttagtacacctggccttgttgttgtttttgttgttgaagaaactgtggtttgtgttgtagtttcataccataggaattttgctgattatattccacattcctcgcctttcatatttcctgtgactcaagcgttcttaacctcaacactattgatatttttggtaaggtcattttttccctaattgaatattcttttctaattatttttatagattcagggagtacaagtgcagttctgttacgtggatatattatgcagcagtgaagtctgagcttttagtgcacccatcacccaaatagtgaactttgtacccaataggtgatttttcaaccttcaaggtaatttttttattattggagttgtcctgagtattggaggatgtttagcagtatctctagctagatcccagcagcacacacatcccaagttgtaacagtcaactatgtctcctgacattgccaaatatcatcttgatggcaaaatgcccaccctactaagttaagaaccagtactgtaaattataaccttaataagattaagatttwaaaaaaaaaatattttatagaccgtatggtgttctactataatgaggctgacaatgcacagctgtttctcttttttagaatgtcagagactactgcttttcaatacacaaacccaagagttaattaggagattaaaaatggtggcattccaatttgatcagttcttcrtttattaactgaatacttccataaagaggaattgttgtcacatatatttaagttatccaaaatccatgattctttccctttatttatgaatttccaaaattggtttttcttcgtttagtattataataaatatatggttctatgcatatttgatgtttcaaatctgtaaggattattatccttactgatattaaaattataccctctgtttcttgtgagagcttctataagttggctccaaagttcttttaccaaacctgtcatcctgaatgtttgctgcttctgctcagttatttccctaagaggtcccrattcctttttaatgtggaattttacaagatcatattctataagtgaggatgatcattgttattaggtcgttatttgtaggacttttcaatgcagagacctaggaaatttttttgagataagatatgccagtacttcatatttatttatttgtcagttaaaaaaaaaaacctcagctcttcatctccttctccatcatgatagctgtcaacacacaatgtttgaactgttaaagtagcatcttaaatggtctacctttctcttgcctctgcttaacattccaaattgattcctaaaatcctcttcattgttccacctaagttcaaattggtcaacctaccatgtaaaatcctcataaagctggttacttacatatactatctcttttccaactaccttaactagtagccgcccttccagtcaagttttctctttattatgcctcaaatacacctctaaacttgtatcatcatattgttgttcacgtttccctccaaaattctgtctaacactgtcttgaggctgcaggtagttttctatgcttttgtgcataactcacatgaaaaccaatacatatgaaccgagaaccgtgttgcaatctaaaacccactagaaataacatgactcatatttttaaaaatcatggtattttagaatttgaagagatctaagcagttatctagtctaatcctattattttccaagtgaggatattaaagttaatagaagttcagcactttgataaaggtcatacagttggcagtgttagagatggaatcaacatctcctaatccaagtattcttctccttttgctgcacaaggctgatatgaaaagctctgttacagtgtcagatatttccagagttgtctgcgggagaaaatggaagggggattgctaagggttttagcaagtattattcagggtaatactgagtatctcagcttctagagtgtacacagaaatctggtgaaagaaaaatgccagttgaatgtaagctttctctgaaagtgtgagagaaagtgagaagtagcagttagatattagaaggaaaaagcaggaatggaggcaagaaggaggtaaagaaaggaagatattagaagacatagaaagggacttgagcttccaggtgcaaacattacctgcatatctcagttgkccattatcctagccctactggaaaaattctaaaagctatatataatctaagccaaaccagaaaaagtatttaaagcatacaaggaggatgccactctagaattttcttttgaaagtaacattctgaaaaacaaataaaaatacagatgaggccaggtgtggtggctcacgcttgtaatcccagaactttgggaggctgaggtgggtggatcacctgagatcaagagtttgagatcagcctggccaatgtggtaaaaccctatctctactaaaaaaacaaaaattagtagggtgtggyggcacatgcctgtaatcctagctacttgggaggctgaggcatgagaatcacttgaacccaggaggcagatgttgcagtgagccaagatggtgccacagcactccagcctgggcaacagagactgtgtctcaaaataaataaataaataaataaataaaaataaaaatacagatgagattaactatttgctgaaataacccaccctgcgaagtagtttacaagtgggttgctgatgataaccgtgagtccaaaatttcaaggattttaaattatcactaaaataaactattaaacaatgcaaagtatcataacaaggtaatcccataataaaatctatagtaggtatggataaatgaaagcctaaaacagagtattctagccagtgtgaaggtggagaagaatacatacattttcaagcaacccgtttaacaaaattgttataaacacggagagtcagagtgacctggattcgagttcctggccagccatttaataaatgggaaaagttattaacttcatgagctttaatttccttcactgaaaatagtgagtgtatacctcccagagttgtgaggatttttgtgtttatttcttgaacaaatatctattgaatggcttcttyatattgagcattttaatataattagcgtatgatccgtggtattgcttaattaatattacccaccattattggttttataactgcaaggtattacttattaggattattattcctttgctcttacatattagacaatcttcttataataacttataggctattataagttattataacttatagtaggtgagtcaagatagactcatctactaaatgggaaattggtagagcagcctatataagtatctgattacagaacaatggataatttctccgctcacataaaacattgatactctggcttatcaggtcttctttgtggttttgkttcatataaatcagttcctagaagtctgattacctttcagtaacctaataaaagcatattcataagtgtgcaaagcaaagcttacatacaattattgaaccaaataaggccaaatctcagaaaccagccagcttccatttaataattttattttaatatttacattttgtcacttagtaaattatatttctctgaattttaaccttcttgtgtacttacttcaaggtttgttttcaagaccaagagcatgtgaaaaattttgtcgtcctgtattcatttggtttctctgctcattctgcccaggttctcttctcatctgtttatatcatccagttatatctgtgagtttaatatttaacttacagatatggttgatctggagagccagctggatgatatgaattgccatatctgtgagttcaatatttaagaaaaacatctatgcttttctaaatttcctcaaaggtcttcctataagtgctaagaatyccttgttctttattggagtaaacccaattcatgtgtgccagtagattacctgacttactatcttactgttcaatttatgtcactgtagctaagtcagtacctactaattggaaaggtatgatccaagaacatttactgggagttgggtggctctgctttgtgaatccttatctcaaatattttagttaaggttataagacactgaagataaagaacatatgctcattatgtgagtgtatatacgtgtgtgtgtatacactatatatttgtaaatacacatttacaaataaatatacttctactgagaatgtgtgtatccagatataggcacacagaaaaagaattacatttctttcaataaatattttgacaaataatttcaatcatctaagctttaatattccttttctgagagcttcattaatgtacattctagtgaatttagaattctgtgcttcatgccttcattttgcagcacctcacagcaagtacttactattctttagaattccaaaagctacttgaattcaaaacaggtcaaatcagcaaaggaggttaaaagattagaagatctgcaaatggtttggctctaaagcaagttcaaaccaaaaatgagctaagaaggcactggaaattgtatatcctggggctatttaatatgccttctgccagatgcatgtcaaggcaatgatacaaaatgtgactgaacttactaacaaaacaggccaaaaattgatctgattaaatttaaaataaaaaaatgcttcttggcctattaaatctgcactgcttgggaaagatatattcatttgataaatttaaatcatatatattatattgatatttgtttaatatttatgtctaatgaatatttatcaaaacaaacagtgttctttttgttctaggaacaaaagacaaaccccttgacctgacagagcttacattttagtggtggaggttgataattataatcagatatattattatattaggtaagaataattgctgataaaatacagtaggttatggagtagaaatgaatgacaaaaggcactatttgttttttcttttttgaattattatgggtacataataattgtatatacttatggggtacatgtgatgttttgatacaggcataaaatgtgtaatgattcaaatcagggtaattagagtatctgtcacccaagcattgatcatttctctgtgttagtaacaatccagttctaattttaaagttattttaaatagacagtagattattgttaattatatcaccctattgtgctacagaatattagatcttattcactctatcgagctgtatttttgtgcccattaaccatttccaatgtatccttacctccccactacccttcacatcgtctggtaaccatcattgtactcccttcatctccatgagttcaatatttttcatttttagctcctacaaataagtgaaaatgtgagaaatcygttcttctgtgcaagatactattttaaatagagtggtcagaaaaagctcccctgggaaatgacacctgagcagagaagtggctaaagtgagaaagatccattttaattgagtgttctggtcctgtagttctaaactgcaaaggaccccaaagagtcttataggctaacaaagtagcctgccacaatttcacagatgctggcaggagacaggaaactcttgggtcaaagacaaaggacttgtatcacagcggacctcatcaccttcacgttctccttgttccacaagtccatagagaagatgcagaagtggacccaggtggatgttgcacatacaataagcctatgtcacagtgaagaattccaagtttaggaacctcccaatcttataaaggggctgccagcaaaactgtccaatctttgccccatatgaagacatctttattatactggttaggaacaaatctaccctctacactggagggagacggtcttctgtctttcaaggcttttcactaaacacacatcattgaaaagatagtctgggacaaaaactgatctgagatatgaagaaatgccctggagaatagtctcctaacatcaacttttagcatacaccagaatcacctggagttcgccawtctccagtgttcctgctttagtaggtctaggccctgtctaagaatttgcatttcaaacaagttcccagctaatgctgataccactggtcaggaatttctactttgagaactactgttttgagtcttaaacagatcacattttgttgcactatcgttgatttgctttcatttggctgtgctttataatcagcaacccacaattctagattacttaggcctattattttctttgatttcattaaatatagtgaataacatatctcttattagagacaactctcatatcttacaatgtggttgagcttattgacacatatatttcttccccaaacaaacctttgctagtatcaacttcagattatccagatgtgaaacaaaggagacaattgaaataatagagaaaaaaaatcctgcttctgagggtatcataataattgtaatattaaccttgtatctaacgttagtattgatgacattctggtctatagctacaaaatgcaccgattgaagcacagatgatgtgtatcatttaaagagtgttgataattttgttttttctctgtcattaktttctatccctataacatattcagtttcttcatctttaaaaagcttttgaagtcaaaattgagtttaaataaccaaatagcatttagacttctcaaattaacacaggcccagaaatctataccattaataaggaaattatgctttgtgattacatcagaattgctgcaaatctagcagtgttttgttaccacagctctaaaatttaactcctttttgaaattagttctgtaagtgaccaaacaaggacatgcagccaataaccctatgaaaaaaaacacttactgttatttaaaataacatttttacattcacaatctattttcacagaatttgatagaactatgcagttatccagatttgccactagagggtagggtagatttggaggctgcttgtgtttttcctcctaatccaggggcatttactctatttaatcaatagatgatgcctgtactcattttacttagcatrtcagcccctttattaaaaattgtgaaaaaaaagactacctaaataagcaaaacccaatcaggaattaaattttagagaagttcccagatggaagataggaaaagctaacattctgctaagtactttatatatggaaaaacaattaatacccacaaaagtactataaaattggtaatattatgccaattttatgttaattatacaaatatatacataatataaatatataatattggcayagtgtgccaattttttattataacatgtaaagtagggagatgtagaatgaattatatgtgcaaaktctcatgaaaaatagtgaattcaggtcttcctgactcaaaaatccaaatctgtccaatataccacattaacagatcaaatcaagccttaatataaataaatctctcacatgatcccctgctaaacagtacatttgttacctttgctatcaatcttacttctttgttttctatagttggagtacgtgtgatgtgtttttatcattgcttctagatttatgaactctgtaaattcgggtaacccatgttgcacctcatgatatgtcctctactgcatggcaaccatccacatgggagctcttctttaattattggagcttattattatgtgcctatataataaatgccttatgagcaaataatttaacaactaattgtttttctctctgttgataatctgttttgttctttactgtgtcagattactttttaaaattatatttaaatagcaaatatacttgagattggcttaatcattacaaaatgtagtcccagatccacggttctagaaaggcagagcaagatggaaagccagagcaaatagatgcctctactgattgtcaaagcaaaagaacaaatagaagcccccaccagtcatcctccccacaagaacaccaaatttgacaactatctacataaaaaagcgccttcatcaggagcaaaaatcagcttaggtgccaacttgaccaccgtggggtagagtaccaaacaggcacttgagtccccaattccaggccttgggtcttggatggcatttctggatctgggttggaccagaggagagcccactctcctgaaaggtgagtcccagggctggaagcattcaccacaagcygactgaagagccactgggcctcgagtgagtttggcggtagcctggcaatactcaccacaggcctggggtggtggtggccatggggagagactcctctgtttatggaagggtgaagggagagtgggaaggattttgacttgtggtttgggtgccagctcagctgcagtagaataaggcaccaggcrgattcctaagatatccaactccaggctctgactcctggatgacatcgctggacccgcttggggctgagggtaactcaccaccttgaaaggaaggacacaaggctggctggcttcatcatctgctaatcgtagagccctagggccatgaataaacataggcggcagccaggtartggttacagcaggccttgggcgagactcagtgctgtgctggcttcaggtctgacccagcacagtcccagtggcagtggctacagggtagtgcttgtattacccacccctcaacttcaggaagctcagcacagagacagaccctccatttgtttaggggaaagtaagggaaaagaacaagatactctgcctggtaatccagagaattcttctggatcttatccaaaaccaccaagrtggtacctctataagtctgcaagagctacagtgttactgggctaagggtgcctcctaacgcagatatggctgcagtgaccaagaacttagatcacagcactcaagtccctttgaatacctagaaagccttccaataagggtgggtacaaacaagcccagactgtgaagactacaacaaatacataactcttaaatgcccagacactgacaaacrtctgcaaacatcaagaccgtctaggaaaatatgacctcaccaagtaaactaaataagccaccagggaccaaccccagagagacagagaaatgtgacctttcagatataaacttcagaatagctgttttgaggaaactcacagaaattcaagacaacacagagaaggaattcaggactctatcagataaatttaacaaagagattgaaataattacaaagaatcaagcagaaattctggaattgaaaaatgcaatcgacatactgaagaatgcatgagagtctcttagcagaattgaacaagcagtagaaagaattagtaagcttgaagacaggctatttgaaaatgcagccagagggtggagcatggtggctcacgcctgtaatccaagcactttgcctgactaacatggtgaaaccccatctctactaaaagaaatacaaaaaaattagccaagcgtagtggcgggtgcctgtaatcccagctactcaggaggctgaggcaggagaatcgcttgaacctgggaggcggaggttgcaatgagctgagatcatgccactgcactccaacctgggcgacagagcaagactccgtctcaaaaaaaaaaaaaaaagaaagaaagaaagaaaatacagtcagagwaaaaagaatgaaaaagaacaaagcacaaaagcacacctacaaaatctagaaaatagcttcaaagcgcaaatataagagtcactggccgtaaaaaggaggtagagagagagataggggtagaaagtttattcaaagggatataagagaacttcccaaagctagagacagttatcaatgttcatgtacaagaagcctatagaataccaagcagacttatcccaaagaagacttaataatcaaactcccaaaggtytaggataaagaaaggatcctaaaagcagtaaragagggagggagagagggagagagaaagagagagagagagagaacattcaagggagctccagtatgtctggcagaagacttttcagtggaaacctttcaggtcgggagaaagtggcatgacatatttaaagcgctgaaggaaaaaaaaaaaaaaaacaccttttaccctagaatagtatatctggtgaaaatatccttcaaacatgtaggagaaataaagactttcccagacaaacaaaagctgaggcatttcattaacagcagacctgtcctataagaaatgctaaagagagttcttcaatttgaaagaaaaggacattaatgagcaataagaaatctgaaggtacaaaactcactggtaatagtaagtacacagaaaaacagaatattataatactgtaattgtggtgtgtaaactgttcacaagtagaaaggctaaaagaaccaatcaaaaataataacgacaagtaattttcaagaaatatacagtacaataagatataaatagaaacaactaaaagtttaaaagcgggatgaagttaaagtgtagaatttttgttagttttctctttgcttgtttatgcaatcagtgttaagttgtcatcagttgaaaataatgggttatattatttgcaagcgtcgtagaaacctcaaataaaaaaacatacaacagttccacaaacaataaaaaagcaatacattggctgggtgtgatggctcaataatcccagcactttaggaggctgaggcaggaggattacttgaggtcagaagttcaagatcagcctggccaaaatggtgaaacctatctctactaaaaatacaaaaattagccaggtgtggtgatgagtgcctgtaatcccagctacttgggaggctgaggcaggagaatcgattgaacctgggaggtggaggttgcaggttgcagtgagtygagatggtgccactgcaccactcaagcctgggtgacagattgagactccatctcaaaaaaaaaagcaatagattaatacatatcaccagagaaaatcattaaaaggaagacaggaaggaaggaaacaaggaagagaagaccacaaaacaatcagaaaacaactaacaaaatagcaggagtaagtcttcacttatcaataataacattgaatgtaaatggactagactctccaatcaaaaacagagagtagctaatcttgtcatttgcaacaacctggatggaattggatgtcatgtcataagtgaaataagccagacacagaaagataaacttctcatgttctcacttgtttgtgggagctaaaaattaaaacaactgaattcatggagatagagactagaatgttggttaccagagtctgggaagggttttttttgtgttgcgggggaggggagtgaagtggagatgcttactgggcacaaatatagaataaataagatagagtatttgatagcacaatagaattactagtcaatgataatttaatgtacatttaaaaataactaaaagtgtatagttgaattgcttgtaacacaaaggatcaatgcttgaggggatagatacctcatttaccctgatatgattattactcatttatgcctgcatcaaaatatctcatgtactccatatatacacctactatgtacccacaaaattaaaaataaaaaagtattcccaaacttaatacaaaacttttagttctctgagtttgatttacttcatcttcattgttatttcttttgtaactttatattataaagattttcaaacacacaagaattaagaaaatagtataacccgaagcgcccattttctagcctcaataattattagcatatggtcaatttcattttatctataccctaacacagctggcaataaaatattttaaagaaaacttccagacacatatcatttcctttgaaaatattttataaggtaattttaaaacataggagattttaaaaataatcacaatacacaaacatcatgcctaaaaaccaagcagatcaaaaatcttttaataatataaaatatgcaggcaatcrttcaaatttccatgattatctcataaatgtgtgttttttaaaaaacaaatttgtccaaatcaggatataaatagtgccaggcatcatatttgatttataggtatcacaagaytcactctatactagctctttcctcctgttttatttttaaccatttatttattgatgctattcctcagtcctgataatatgatccatctttgagaatactttacacaaatttgtttttgccaagggcaattcttttgctttaagactatcasttctaatttatatttccattttagcttttaacattcaactttttttcccaaaagggcctctttaaattcagtctatacaaatacttacatccccaataaaattttactccctctttccatcatctcctcccatataacatcaaaagtataaggctcccatcttcaactttatatatgagagctggaatgtctaagccttagtgttgtcgtgccatctctactcgtcaaatccaaaacagtctctcacacttgcagtttttgatttaaccaagagagggcttaattcctaaattaatatcaagtttatttctgagtttctcttaaatggtctttttcagtcatgatatgataggttatatgattataaatatccttatatttttaagaagttgttatcatttcctggatttccactctcctatcaaaatatcaaagtatgccttcaagaataattagtatgtgatggggaggtttttcttgctcgacttgtttgcttcctcgttaacaactaaaagctctttctgaaatctctattatatcctgtgaatgagcagtatggtggaatcagaaaaacatttgggtccagaggagctctgatcacaaaggacagagtaaggcagttgcttgagaaccaccagcacaaagtcattcttatttgttcctaagatgttaaagttaatctctttattcaaaagaatgtcttggaayctcactgcaaatggctcaaaatataactttccctgtattagaaacccaaagtcaatacacagcacagttagggaatttatttagtctgattactgagcaattaattcaggtaattgcactgtcagtctgaagtaattgagatgaaaaaaaattgaaaatcctattagcacagcaaagatttgaaatcataaaagaatcctgatcattaaaatattttaaaatacttgttgatcttaaagtcttagtttatatagaagatataaatataggctgaataaaagacacctcccaccccccaccacttattccttatctttttttctcctgtattccaaggcagagtagtggaacacaggctttaaatagagctcagtctgaatccagtttgcaatttataactaatggtgtcaattttgaaaatcatctcaaatttgaaaatgttttatatttattcmttcctgctagatgcaacacatttgctctaagaccacaaaaacctatcaaatttattttccaatttaacatttatctttaacattagtcttttctcttctgctgatgtatactctttattatataatatgcgatatattatattttgctattttttaattggttgtgacctttctttttcacttttgtagatctgtggtcaattcttgctctatgacacacttttaaaatgtttagctttaaaattcattttaaaactttattgccacaaggtacagtggctcaagcctcttatcccagcactttgggaggctaaagcaggaggagcacttgaggtcaggatttgaggccagtctgggtaacatggtaagaccctgtctctaccttaaaaaatataaatatatatattatataytattatatatacaatatattatatatatataatttatttagtcagattactgagcaattaattcaggtaattgcactgtcagtctgaagtaattgagatgaaaaaaaccaaaaatcctattaacacagcaaagatttgaaatcataaaagaatcctgatcattaaaatattttaaaatacatatttaatattaatatttaaaatatataatatatatagggtaagtagataatagataaggtaagtagatagataaatacacttactatatatatacacacacacatatatattttatatctatctacttaccatatatacataaatatatatataaaatattatatatattttatatatattatatattgtatatatatatgtaatatatatatacatatatatttattacatatacatatatatttatgtatatatatatatacataaatatatatataaaaaatagttgggtaagcatgtgtgtgtatgtgtatgtgtgtgtgtatacatatatatatagtaagtgtatttatctatctacttaccctatctatttatctacttaccctatatatatagtaagtatatatatttaccatatatatatatatgtatggtaagtagatatatatatatccacttactacagatttatatatatagggtaaatatatatacttactatatatatatayggtatatatatctgtatatctctatatatctactatatatatctataatatatataggatatatatatagagaatatatatatagggtaagtaaattgatagttgggtgtgtatatatatagtaaatttgtgtgtgtctgtgtgtgtgtgtgtgtgtgtgtgtgtacttggttaagtcctatcttgttattctgctttaaatcaatattcttaaatatttttgccgttttcttctcaakaaaattatgttttcaacaagtttgaaaaaaattcaccagaattttaattgaaattgcattaagcctttttaataatttaagagttgaacaattttcaaagctcatactccttcaaaacattgaatggcttactttttttttaatctatgtccctcagtaaaactgtgctgttttctacatataggtcaccctcattttttattcaaggtatttctagagattttgtaatatcgttgctaacataaagtacattttttagcatatatcctagctagttattgcttgtttataactgtgactatcaacagaggagtttcataattatcagtgggtttattcaaactgtattcatatcaccctcagagattctgatacatcttctagaagagagcctgtattagttctcacactgctataaagaatatccgagactgggtaatttgtgaggaaaaggtttaatgggctcacagttccacatggctggggaggcctcaggaaacttagagtcatggcaggtgaaagggaagcaaggcatatcttcacacggcagcaggagagagacagagagcaaagggagaagtgctacacactttcaaacaaccagatctcatgagaactcactgactatcatgagaacagcaaggggaaagtctgcccccatgattcaataacctcccaccaggttggtctctcctccaacacatgggcttacaattcgacatgaggtttgggtggggacacagaaccaaaccatatcagagctgtacccacccttactgataatatgtcaccctcaggattggagagaaaagcaatgttaagttgcactgaagcaaaacaaggctattgggttaaatttttttcatagaatcattttaatatttttattacctctaggagtttytttaaaaatacagaacaatttgttttctaaaacaaaactcaagcatttccttgaaaasgaaaaaaaatcacctctattaatcaattagcactcaatctactatgtgcaaaaaaccgtgccaaaagcttttggaatacgcaatcctatagatctgaactttgcctttggtcagtcaggtttgggtaggaagtggcacttgagagtgggttaattgagctaagctgaaaatagagcacaacatacataagaatgtgtatttttattaaccttatcaacagtctgtccttctgaatacaggcaacatataagtgaaaatacgattgccgaagtagcgtgttggggcaggaataaacctaaattctaaaaatttcagccaaactttagcttttctgcataagtgtacctttttctgttctcacaaatcaggtgcgtgtgggaaccttatgttggccaaggatgtacaaatgaatcatggtcttaagggtggaagacactggaaagagaggttttactatctgatgtactccttggagacagtgtcaatagccctctactcattttcataaagtcagccatgcctgcacttaataatgggttgtctataaatgtgttaacttctaaawtgctactctgaaacttgcaacacattttgctatgaaaatggtgctgtaggtcagagcttttcagactttaccatgcccagaaatctcctggagatcttggtgaaacacagagacccaagtccagagaccctgattcagtgtatttgtagtgcaacccaaggaaatcgcattttaacaagctcctgctgctgctggtgctatgtccacagaccacaatttgagtagcactgctctatacaatggctgaatttctacatyakctcacctaagtctatttaaatcatcatatactactatgtcatattaatggaatctaaatctgcactagaactacaacagaaaactccaggaacatatatcctttccaactgcagtctcagttataatccccaatgaaaacacacactcctacaccatcacgtgaagcatttcctccacttcacaaggcttcaatcaactatcaaaagaggcagcaaagaccctgatagtgacggctactgggcmcgagtaggaaaaaaggattttggcaacaggagaagtttaagaaatatgtattaggtggaggaggtgtcagcagctgccttactgaaggattaggcaggagaggaaagactcttggattagggcttcttttggtgactatcaggttccatgggactctaacggtgagagaatgtggccaccaatcacaatgaaccctcagacaagtgaagtggacctagaaggaaggagaaatataggatttcatgatattggctttccagagtaccgctctcccatttcttgtcaactcagcgtgtcatcttttcctaccatagttaaatatgtaacctagatcttgcctaaagaggaaagggractgatatttatttaatatctactaaacatcatgcactgtgttaagcacattgtatgcatcatcgcattcacattttgtctacattttacaaatgaaaacctacygtggaaagagcaagagcagtttcctccctgacctggatgagtgactttaaataaagtgcttaatctctccaagcacgggttcttcatttataagtgagggcaactattcatactttgtaggcttgtactaaggactaaaacatataggtcaaatccttagctcagtgcctggcccatagttgatgttcaataaatggtagctacatcactacaattaccataattgtttttatttcaaaaattgccagagaagcttccaaaagctcaactactttgtaagcaactgagtcaaaattcaaatctaggtgctttttcccaaacttcaactcaagaataatctgcgtatttgagtgtgtatgtgttcacagttatatatatatgtgtgtacctatacaaatgcaatgttctttatgacttttggttaaagaacacagtaatgtagtaaaattaatactgggcaggaaatcagttctaaccttagttctgctacaaaccttcagtcaatcttaatttcttaaagtgcaagcttcctttaaataaagcaatatgaatacataatctctaaggaccccaggagctctaaaattccataattctatgaggaaatttcatggagcaactgaagagatacagacaaagaggggaataagtgaaaatttaatataattatcaactgaattcattgcttttgaagtgttcttatgacacttatggaattgtaaaactattgaaagttttatatagtttaatctattaatgatttattgtcatgaattctgccttaggtatcatatttagaaagccttttctcattctaatataaaaatatgtacctacattttctttgggttttgatattgttctgtttgatatttaaatccttaatttacttgtaaattctttggtatttcaaatggggtatttagctttattttgtttcaaatatttagtcaattttctaatgttatccaaaaaataattcatcctttacccacaaatcyttcatttaaaaaaaatttttttaagagacaggatcttggagcttctatatagctgaatatctggacgttcctagagactggggcacaagggagggcttggaaactctgtaccccttctccctgcatacctttttatcttcatgtgatgtgccaggcatgggacacagtgattgaaaagttgacatagagcttatattcaaataagggagagagaccatgaataagtaaactgatgatgtctgaaatgaaaatcctatgaatagctgaccagaactcttactggtcagctggtcagggcccaaaagaaataggctttctcatccaccatgcaggcccatgtggacatggtagtgcaaaagagaaataaggggctggagtcccttggcaaagcagataaatacctgcaaactaccttttcaaaatggaagccagactgtgacggtgccttttttgaatgtggaaaagcagggcttccaagcaagctggcatgatgttgaaggagatgcagaaacaaccagtctgcgtgatgtatcgagaaaacagcacccctgacccagcaacctcagaagtggtggagcaagctggaaagctcatagaaaatgtagatccagaaaaggctgtacwattgtatcaataaacagcaatgtgtttgaaaatgtgcaatgcctcaacaggcagttgaacacttaggaaaagcttcaggactgctagtgtaargatgcaggattgatgrgggagcactttctattcagaaagaaaaatatttttaaggaaatggagaattattcaactggttataagaaaagagtcgctcaagtcttatttcacttacacagtaatgactatgcagctgggacagtggtggcaggagagctccggcatagcaggagtccatggaggtgatggctgagctgtactggatcagctcccagaagggtttgcccagcaagaccaagctgcatttcagaggtctgcaactctccacttttcaagcatattggcaatgattatgctagccccagcctgagtttaggggttccagaatgggacatcaataaatcatcaggaatggtttgcacagccacatgaatgtacttaatgacacattaagtgtacacttaaagggggttaaaatgatttattttatgttgtgtgtattttaccatagtaaaaaaaattaagaagaaggaataagaggaagaagaggagttggagagaagaagaagaggaggaggaaaaagaagagttagaagaaaaaagaggagaaacagaaggaaaagaggaggaggaaaatgggggaaaattagcaacaccagtcatggctggtggcatcacctccatggctgctgttaaggaagacaaatattcaggactatgctagtattttgctttgcaaataaataaataatacatagataacagaaaaagtatcacatggcgtttcagggacttggaatttgtttaagagtattccatacttcattgtagccacggtttgaatgctaatactctaatttttagttattaattccccaaattaaaaaaaaagccagagacagacctcactctattacttatcctgtaatgcagtggcaccatcatagttcactatagcctccaactcctgggtttatgcaatcctcccactttagcctcttgaatagctgaggttacagacatgcaccaccatgccatgcaccaccactccaagcctagataactttctttttttgtatcttttttttttttggtagaaatggaggtcttgctatattgcccaggctaatcttgaacacgtggactcaagcagttctcccattttggccttccaaagtgctgggactataggcatgagccaccacacccggcctacccacaaatcttaaccaacctttattgtgttctaaagtcttggcattaaaacgcattttatattggaagatttcattatattattctacctttgcacagctagaatgagccctacttggtggattatatttgctaatacttagcaataatgcatcacaatttataagtaagcatggtctgtagttgtttctaaccttctaaattttttaatatcaggattattctagcctgtcaggtgcattagaaaatttcatttttaaatccccctgtaatagattagatagcataagaattgtctattccttgatgacttgatagaactataatctataacccctttaagcatgaatttttcatgaagagatgttttattgtcttttaaactcaatgatttcttcaggttttttttatgacctctggagttaatgttgatcatttattatttcccaataaagccttccatttcatccagagcgtttgtaaagctgatatgcattaagaatctctaagagcacaaagtagtttttttaaacttttttgttcaagaatatgttgcygtttaattcattcttttgtacaaatatttttctaagttaggcactttgaaaaatgctaacacactgtcttaaagcattctcttaaatttgttttcaaattatctctgcacaaagaattaaattccttttcttagtctgaatcttgtatattactttttctgttataattgttagtatttatccaaagaattatctcttgaacatatgtattaattcttctattttcctagatattttttcttttaaaatatgaattcttaaagacaggcattatagacaaccagtctgtggagaaaatattttgagaggaggaggaattttattttgcctccttccattttataggaggaacagatttataccctgtttacacatgtagcttattggataataacatgaacgaataatatygacttagaaactttatttggactaagttataaattgtatttcttattatacaataatgggaatataatttctacattccaaaacatgtacaggtagccatttggactatgagacctacaacaaaatatcaagtatctacatagtacggcaaccaggcatttggtgctctatgaattaaaggtctcaatgaagggctatacattatattatttagacttcatctgcaggttctctaagcatgttataatttctatgaatttcagtttccatacctgtaaaatggagattatacacctactgtgcaaagtttgggtaacaattagagttaacagataacctgtctcaagacccttttcccagtagctgtggcctcttaaagcccctacaaaatttgaagaagagatctttgggccttgcaaaatcctaggtaatttcactttatcaaaagccaaagcatgtgagtgttttaactcatctgaatcataaaataaatcattacgaagagttaacagtccttggattagaataaactacctttcattgatttcaaagtgcatttttgttttacatttttgtatctctactcagaatgctccttaaaattgatgatgtcttaaaaatataactgacattgcttttcttgtctaggagtatgtaatacaatggtacattttacaaatgaggacatcttagggtaaaaacatactgtaataccttcctcagttgttttccaatttaccacccccttcctaggaaaatccacacgccttaatgaattgctayagtcattagcaaagggagtaagttttgatgtttgtcttgtctgtgggccttgtttccctctgactcataagctctaatatactccagccattcaaaataccaggtccacatacataggtgcacttacaaaaggtcctcattgcacaccattgaagaatcacataccctaaattcgagattttaaacctcagatacagatagcctaggtccctaccaacagtctcacaaaaaatgcaaacctcaggggatggtactccaaagtaattaaccaaaacaagagtagttgttatgcaaataccaaggaatttaatctccttaagaaaacaataaattcctggttcagacctaaaggcacaaattttaaaatgtgtgtagattacagactcagctcagctccattctaaaagatgcattctctataagacctccctaacacctggaatasaagcagctgggtaaacatcctggccatgcagtatgggcagcatgagtcagttagagggcaaggttctttctcttgatccgcccacataccttgggggtgttagaagccttgatggaagtaggagatgaagtgtttcatggaaaaacacctacttccgcatgataaggcaaggagagggagtgaaagagaagatgggccctacccttctgcagggccctaaagccactaccaagacaggagaagggaaagcccctttattttgtgtcctgggattggagaaataattttttaaagaccctaaaatcataaatattactatacaagtatgtgtgtaaacagagatggatttctgttcaatgaattaaatcataaatgaaaagagaaatggctaggcatggtggctcatgcctgtaatcccagaactttgggaggccaaggcaggtggatcacttgaggttaggagtttgagaccagcctggccaacatagtgaaaccctgtctctaccaaacagaaaaattagccgggcatggtggtgcacacctgtagtcccagctacttgggaggctgaggcagaagagtcacttgagtcccggaggcagaggttgcagtgagctgagatcgcaccactgcactccagcctgggccacagagcaaaactacgttaaaaaaaaaaaaaaaaaaaaaaaaaaaaaaccgaaaaagaaaagagaaatgacagattgacagaaatagactagcaaactgagtgggaaatgaatactcagcactgttgatggaagtgcatagcctatttctggaataatcyggaaatatatagtaaaattgatcaaccatatgacctatgaccaaaaaattctcattcctagatgtatggcatgcacactattccatcgtggggcatataaatgctgacatatttaatggtgcagaatttaagggaatgaaattatcggtcattggggaataggacagtttaaaggtggaggttttacagtaagaagyaacaaacaacatatgcttaatgcaacatgttggattctcacaagccaggcctgctttatagatgtgtgaaatatgcaactctagaggattagaaggtgtggttagaaggccctcacacttagacactttgttgtcatcatctttaaattattattcataagaagtcccatatttaaaatttggcactgggccccacaaattatggagacaatccagttcacaggcataatgtacagtaagaaaagtaggaaacaatgagatttataataaaataatatatgaaaatctcatatatgctatatactttacagtgatatggtcactctttaggataaactagagattgaatgaaagtagggatcagggacaaaggtcaaaataaattaaataaaatttataaaagaataaacaaagcagtaaagggtccttatatggatgaataacccattcagtgtaaaagtgccccaaactacaatgatttggatttcctgtgggtaggaatgcattgcagaaaatgtttggcaaaatagttcaagatcaactatgtaataattgaaaaktccatcgtttcttttcttttttccccaagaatatctgtgttttctagtatagaaatgtttgtatttgctagcatagactagattccagcagtttgtatattgccaaaacatgaactatctttccagttgctatgttttatttcagagactcaaattggcatgccagtagaatgtactacattttaagtggaattatacattaaaaatataagaatataaaacgtttctcataaatcaagtaaatctgtaaataattaagtggttgaaactattatagtaatggaagcaaagccaattccaactacaatttccaatcaaactgactctaatggaacctaattagtaactgacacaatccaaagaaacttraaggtatttaaactaacctcatgccactaagtcctacctgactaaaatgcacgttctgatacaagtgtgtttgcaattctttcctatgctctgcgtgtatatagacatgtctgaaccaatgatgaaaattcaggaaataattcaggaatactcttcctcttcagattactttgaagcatggaaaatattagttttgagatcattttagaaatttggttgttttaatttacccaaactggacttgtaattacccttgtaattttcgataatataaatgcccactactgaaaatagagctctatgcagttctggaattccagattatctgatttcaaactttcatggagtgcagacacaagacagcttacatggcaagaaagagattggttggagagtagaaaaaaaaagccagttttgtttttgtttatttgcctttagctagctagagatcttgaaagaattggatatactatttcctaccaattctaatgcccaatttacataccaaggtaaaagaaattcagaaaagccaaagcaataattgrcaatgtggtagcattagaagtgatgcagctggatgaggcaggaggatgtggcattttacagagatgctcgtatgactggggtcatttcatccacccttggtggaaattattttctaagtagagagtctcagattctgctgagaatcttccaattcatctgacccttgaggcatggaacatgaggattggcttggcaggagtgagaattttagtctcaatcacattctttttcatcactggctaagaactcacctaacaagtttaccttagtagcatctgttatatttgaaaccatgattaatctgcttccagttgagaaatttctagttgcgccatcttttgagctgtttaaaacagagcatgttccactgacagttgcctctggaaggatctggaatgcacctgaagctcccaggacttgaagacagacctccaaagacttggatcaggtaatgacttttcatctatttgcagagcctggatcatagtgtattagtgagacataggaaaccttcagagggacagaactttacatgttgatgatgaatattgtattttgattctatcaggttaagcaagatacagcaagagtataatgtgacaacttcagatggagagtcttctaggtatgttatgacaagttttccctttcagaaagctgcagcatctagaaagcagacatcactatatttgaacctcagtgagaggaggtatcacaagtctacacttggaaaaatctagcaataaataattttatgaacctctcttttgagtcttgcatctaggggtttgggaaataatgtttggataatgttctcaaaaccatttaccattttttaggaagccctttatgttctcattccaatggccttgagtatgaatattcttttttatgatcagggtcatctgcagggkaatatgaagcaaagtgactgtcaagagtgacacaactgcttatgaaatcaatcatttgtggaggacacaccattctctttttctgctgctttgtaataaatagtttgactgggagaggagtgaaaatgtggttcacattaatgtagatgatatttaagagtatcatgctcctgtcaccctttaaattgcagacctgattggaagctagaaagatgaagatgagtcaactggatggactaatattccctctagacatagagagattaaataattattctttaattctatgtgtcaaagccaaactgttattttttgtttgtttttacaaaatagttatcctttgttttctttttctagaaataagaaagcagtttttaccaggctttcttygtgtctgaaaacagaaaccaactcaaatatatagcaccttggcatacttagcacttcaggctgtaaatatgagagtatggaactgagttttggaataacaatatgaagttaaagtgccattttactctaaaatkacttggtttcatattccttcactggactatcctgtctctcccttactttgtaaggacattgagggaaaaattatttccttcactgctcttcctttgtggtttattttatttaatttttgcctttaatttgaaggaacaatctttcagaccctattttaccaggcaggacaagtgttttgtccttcatattatcgaagacatgtgaaatataatgctctttaaatgtttgttattcatttttttctgccttggcattttatttcccatttatcccaagactcttgttcttttctgcttgcctctaggcttagagcacagagctactggcctcttaacctatttgaaaattccatcaaagttgcctagtctttcttcctgattcaaatgtgctaggtgtttaattctcaaatctacaatttttaggactggatatcctattaggtaaagatttcctttcattcacttgttaatagtctcctcagtcttcctgattcattgtctttcaccctgtgggtgggggaaaaacagggaagcaatttaaatctagtttctgactaacctgaccactaatagttgtgagtcactctgttttggtaagaggttaaaagtattagagctttatgaaggatgctgaggtaggagcaagacagatcctaaatctctgtaaacacccagtgggtttttagatttaaaatgtcagataaaaaggaaaaatgtggcagatgcaaaaacattctaattgataaacaacagtcttctggcaaacccagtcatttgtatggctgccaagaatcttttaataaacaaaaactatgcgatactgctgaaatgattattacaagatggaagtactaaaacttctgaactttgcccctaagaagacatctaggacatttactcacaggtcattgagtttaaatttatacataattatttctaaatgtcataacctttgctattattataaggatgattcaagctaataaattcatcaagaaaaatatataaccaataagtaaattagtggaagagrgaaaatgtttattcccwgtgaccaaatataaccattttcattttggagtaattcttctagtcttttgaagaccatacttttttgtttatttgttttagaagtttaaaaacaataaaaatttaaaaatatataacagttgcttaaatattatttttgcttctatagtcccaaagtttgcaaaactctgtaagtgactgcaaatttttaggttggcatataaaatttatgtcatatttttaaatcattgctaaggtgcactttatggcacattgtaaatattaatagtttaaaattaaattgctacacaattttcaaaatgaatccaatagaataatgatttgatgcctaatatcatccatttaaaaattcccttaatgaatttaaagttttacatcttttatttttctctttctattcatattctcattccagtcatttctacagatgttttacatattcctacaaatatattttaatataacatatttgtgttattatttcttttattgatcagtagattattctctgcaactaaaaggtccatatacattaaaacttaaattgttttcatttcctgtgaccataaggttgcattttgtaaaaagtttttaatgatgtgtgattttaatttttctttgtatataattgtccaaaggatcataacacattaaaagtttaatgaaaaatgattaagcattaggagtaaaactttattggtgatgcttttcttaatgacgtaaatagatctttgccttttaaattctgcatccattgatgatgattatttattgacagaatgaaacaaaattcatcatcaattctttttcattttttgaatagatgtgagtgctgagaaaccatgtttacataatgccacaattttttgaactctttatgaagctctgtgtcacaaatcacatagtgatgcatcaacaaaaattattttatttttttattatactttaagttctgggatacatgtgcagaatgtgtaggtttgttacataggtatacatgtgccacggtggtttgctgcacctatcaacccgtcatctacattaggtatttctcctaatgctatccttctccttgtcccccaccccccgacaggccccagtgtgtgatgttcccctccctgtgttctcattgttcaactctcacctatgagtgagaacatgcggtgtttggatttttgttcctgttagctggctgagaatgatggcttccagccaagacacaaaaattattttttatgatctatctactaaccactcaagtgcatcctctttctatttttttttttttaagcaaagaattcgaaaccgacttgcagaagttaaatgcccttggaaagggactgctattttattaaggtcagttcctttcccaataccaatgtcaatattgtcaattattctcttgttagggagtctcagccatttatacagcctagaacaattcacatcgtaagattcaggaaaggagagggttgggcttttcctttgcaaagttagaaaaggagaccctgcttcaaaccagaaattctcaggccaaattagtattacaaaagagtgtagatgagagtcaaaggtctagaatttcattcttttaaaactaggtatgtgcctatgtatttcttgaaagttattgtatactctatagactattggtatatacaattcttttgcccaacaactttttcctctatttaacataatgttataagtatgctttcatgtttttatatagtctttaaaataattkaatggacttatctacaagattaaattaatatattatagtttattttaaaattctcttgtaattgaaaacatgtttttaatttttattacaaataacaagaattaaagcaatcttgtacaaaaagatccctctccaagttgagaatttatctttttagcatgtatttattgagtggaactactgggatataaaatgtggatgttctttaaaattcctagtaattacagcaatatgtcaaataagttttactagtttacaccagcactagtaaatgttgaaaacacctgctttgcaacagtttccagtttccttttaattgtggtataattacattcagtaaaatgcacagatctgaattgtacagtttgatgaatcttagcaattaccccagtcaaaatttgccctagaaccaagcaaacactrttgtgatttctattcctatgaattagttttatctgtttttgacctttacagaaattcaaccgcagagtatgcactcctttgygcttttttcattcggcataacgtttgtgatatttatccaggctgttgaatgtgtcgatgagtagtaagcattccattacataaatataacatgattatgtgtccattctactactaatggacatttgtattattttcaataatttgctatttgtgaataaatcttcagcgaacaatcttgcaaaccaatattttcttttattttaagcaactacctaaaggcagaattgctatctcacaggattttcagaaactgttagagtttctgagagtcactgtgatattataaactataaatatatatcccatcatcaatatatggaaaggtccagtagctcctcatcttccccaacatttggtgcagttgatgttagctagtctagtgagtatgcagtagtatctctctagggtttaactttgcatttctttctgatgactaacaatgttgaacatcttttcttgtgtttattgaccttccatctattctcttttgtttactgtctgtccaagtattttgtccattttttaaatttaatttttttgttgttatttatttctggagttcttgaaatttcctagagtcctttatcaaatatctgttgcaaatattttccttttgtctgtgaattgtctttttattttattattgcatatattttaatgtgaataacgtgatgttttgctatatatatatgtagtgaaatggttactatagtcaaacaaattaacgtatcaataatcttacctagttaccctttgtgtgcgtggcaagagcgcttaaaatgtactcttttagccaaaattccaagtacaatacaataaactatagccctcaagttgtacattagctgttttgtttcttctcttttcctttgctttttgagacagtctcaytctatcacccaggctggagtgcagtggcacaatctcggctcactgcaacctccacctcctgggttcaagtgattatcatatctcagcctcctatgagtagctgggattacaagcatgcaccaacatgcctggttaatttttgaatttttagtagagatggggttttaccatgttggccaggtgggtcttgagctcctggcctcaagtgatccacctgccttggcttcccaaagtactgggattacaagcgtgagccactgtgtccggcctatttttttgatgatgtttttgaagaacagaagttttttattttaataattttttaatcttttttttgyttatggttagttgtctaccmcaaayktgtaaagatattattctttgttatcttctaacaactttgtacttaagcttttagttttagatttgcaatctgaggtatatttttgtatctggtttgggaaatgtatcaaggttacttttttcaaaattgatttccaattgttcctgcaggaataattgttgaaaatactttctcattgaaatacattgaaacctatgtcaaaagttattaaacaacatataatttaatctgttgagtctgttgatgtataaacaaagtatatctctctatgtatttggatttgttttgtaattttcagtgtaaagattttacagatcttctgctcaatgtatttctcattattttgatttttgttagcatagcaagtgtagtgcaatgatgactctgaactctctcagttgaaatcatattttaccactttttaatagataaaattttacaatgtttcagtaatttttttagctaaaaagaactaaaactagctatgacagcaacaataaaaatgactggtaacaatgcaagtaagcttcatttacctacttactattcatgcacttattcagcaaatccatactgtggacctaccataatgtggacctaacatttacctgttaatggcctaaattctcatacatgctgaacagataaggtgtctattgtaaatatagtactgctccctcccatattctttgtgaaagtcatatccttgttccagataatgtttttttttmttaattccaggctccatactctgaatcatctgagccacttctcattaacacatacatcagcttagcctaattatagcttttgcagggatttatctgagctgatgtatctgtactgtttccatttacttttctgcttattttcttcagagaacwgtcctatttaaaatgaaaatgctagtgtgattcttactgttaccatgggaagaagagagagaaagagaaagctttgaaatagtgcattgcaatagtccataatttctttctcttgaataaagagttttattttgtttttaaccagagggtcagatataaggaaactgaaagaaaagatgaccaacttcttttgaataagattttcagcctgtaactctatattagctataggttactggaatttcatgaaatgtatgcatcctggtagtcatttaaagaaatgaaatacatgggatactccatcatcacacaggagacacagtatagagaggtggttacatctgtagactctgggatcaaaccaatcagatacaaatatcgctatagcaatttctagctatgtgaatttagctaacctacttaccctctctttgcatgagttccactttctgtacaacaaaccaacaaaaagaggataatagagataataatagtagcacctaccaatagagttgtttgtaacttaattcttataaatcactttttaaagtyaacgccatatagttatttccaattgttattatatgtgatagataccaaaaattatagctgttattgtcctaattgcattttgattttttgttgtaagtattaccataacagtgtttttatttctggcgactagaaaaaaagagggataaactttcaaagcaagaaaatacgttctgaaagaagcatagttttatgaactatctactttatcagcataagaaaaaacaattgctttttaaatattagctttgtatcttaatacttttctctgtattcatctattagatatagtgggttttgtgtagactagttaggattttctatgtgcatcaccacaccatgtaaaaataaatttaggctgggcgtggtggctcacacctgtaatcccagcactttgggaggccgaggtgggcggattacctgaggtcaggtgtttgaaaccagcctggccaacatggtgaaaccccatctctactaaaaatacaaaaattagccaggcgcagtggtgggcacctgtaatcccagctacttgcagggcagaggcaggagaatcacttgaacccaggagaggctcactgcagaggttgcagtgagccaagaccatgccattgcactccagcctgggtgtcagagcaagactctgtctcaaaaaaataaaaataaaaataaaataaaataaaataaatttagtgttgtttctactttcccatctttgttgttgttgttgttttctctttcgatttattttatttaatagcacctccagtatcacggtaaatggaggtgataagaaagacatgctttctcttgtttcattcttaaggtgaaagtattcaatatgttagcattaattataattgyacctggaggatattttatagaattccttcatctgattgagttccttttcatttctattttcctaaaaattttttattataaagtggtgttgagttttgtcaaaygtacttcccaattttaaaactgatcattttaaactatttgctcctttgattaatttccatattattctaataaccttggctccaatttatccatcagaacactaagaatagtttgtcaagaagggttgtatgctaacaacttcagggacacatgaacaacttcagtgttataactctgtaaaatcgtcgatgagtgtaataatttcttccgcatattagataggatgctcaccaatgaaactatgtggatctgtaatttttgtccatgcacgtggaaatattttataaaacaaattcaacttttaaagtagatatagaaatgttctttttcttctggaaatggttttttaagttgtgtttttcaaggaatttgtctagttaatataatttatcaaatttatttgcagttttcagaatattctcttattttattgtttgtattgttaatgatatgtactattttatttctgatattggcacatattgtagctctatttttccttgattagttttgttagggttacttgatttttattaattttttccaaggaccaacttttggctttattaattttctctaatatgtttatttattttattatttcctctttattattcctctcctcatactactttgatattaatttgattctctttttctaactttttatggtagaaactcagataattgattataaacttttttctaacactggcagttaaatcactaaatttatttctaagcagtactttggctgtatgtcaaattttgatatgtcatgttttattatcatttagttgcaaatatcttctawtttccatttttattgcttcagtttctatgggttctttaggcatgttctgcaaatgtcaattataacaaattggttaatagtgctgttcaggttttctatatttctatattatttctgtctaatttttctgccaattattgaaagagatatgttgaaacatacagctatgaaactgaataattacctgtatctctatcagtttgatcttctcatattctgaagttctattattggatgcctacatatttagggttgttttatcttcctgatgaattgacttttgtcttctagatgaattaacattatgaaatatctcactttgactctgataatgttcattgtcttgaagcctactttgtctgttataaatttgacagctttcttattcttactgcttgtatgatatatttatttcttttactttcaacccattttcctttacatttaaagtgtgcttttgttgaaagtacatagttgggccccgctttttttatacatattatagtctgacaatatttgcctttttttagagtattttctgtattagcatttaatgtaatttttggtacagttttgtttaaatctgccattctgatctttcactatttgttttccacttgtcctctttcttccttttctttcttttttctttctttctgtttctctttctttctttctttcctttctttctctctctctttctttctccttccttccttcctgctttccttccttcctwgcctgttttctgccttattctaggataataaaatattagcattctgtcatgattcctctattgagtttttaaaatatgcctacctcaagattgcaaatttgtaccctattatctgatgactgaaaacaattgacttgtatrtttgatctagtgagagaactagtcttgtatgagttacaccaccatatttggaagtggaagtttttcattatggtttctcaaatggatatttaatatgataaaatgattttgtaaaaattaatcttttggcaacatacataaygattcgactcataaagactcaaaaatgaaaaaccaggcaggagaccagtataatgatataagatattaggaattagatactagactagataggtaatagtaataattgaaaactttttaaaaagaatgacagagaaaagagataattgagcaaagttttgaaaaggagtttgaaaatatttgaaagaatatcactatttattaagagattggcaatagagtttgaggaaatcagagaattcaggaaaatttctttttttttttttttttttttgagacagagtctcattctgtcattcaggtgggagtgcagtggcccgatctcggttcactgcaacctctgcctctcgggttcaagtgattctcctgcctcagcctccgagtagctgggactacaggcrtgtgccaccacaactggctaatttttgtattttcagtagagacagatttcaccatgttagccaggctggtctggaactcctggcctcaggtgatccacacgcctcggcctcccaaagtgctgggattacaggcatgagccactgagcctggccagaatataggaaaatttcagtttccagctttcaagattgggaggatacagattctggaattgaaataaaagaggaattgaaaaagaaaaagagaataattctatttgaggggatactggattaaagactgcaaaaagaaatcaaagtggaagtatcctgaaggcttgagggaatatggaattagaggttcacatgtgggatgtatggatttggatttttttttctcacctagggaatatatgaaagtatgtgattagtgagagatacttgagagaatgagtttggggagaaagaaagagtgagcagcagacagatgataagatgctgttggatcaaggagaatggggaaagagaccagtgcatgtagctagcaaagggtggagctgggagtcagaacaccagagrtgaagaagcggatgggtgactaggagacagcaggagagatcccacatgtttgattccaggatttgtctgttttgtcatccagttcatttaaatagtaaacatagggatgagctctcaaaccatctgctaaatacctggttgtgaataccagattcctttggaatrtctctctgctcccttctagatcttttcattcaaatgattgtaaaggaaaggttcgtcttggtccttaactttgcttgagttattttagaaacatagcagaagatattcaccttctactcttgggtttttctgtaaagaagatgcatcctgccttatattccggtattttctatttttttatgatttagttatgctgtctttagcattatttctttggaactttgcaacaacctcatgaggaaggtggcataggcatttttaaggtccacgtgttttcccagataggaaaagaaaggcccacactataggtcttctgtttttcggactctttttctagaattctttcattaactcccagtaactctcctaattgtgcattgtgatagagaagaggataataaacttttcctcctcagcacacagttgggaaataatgatgtaccatctgatctacagacaaaaataagctgaatgcacaattgccataaaattcctgctaatatctcatctggaaatatatagaaatatattactcaagaccagccattccattgtttaccaacaactgaacatgtaaaaattgctcaaacatagcttattaagatamgaagtgaaaaaacatcactcaggttgcctaaacttgtattatttaatgtttttttttttctgatttatttcttccccactctctttttctttgccttcctggctcctttctttaacttttctcattttctgtctctctcttggggcaggaaagaggctctttcagttttttgtttagccttcttaagatcatataggtaatatcgattcattataaatatggaccttttatccttttgtccaaataatgatctgttatataattgctttcttcctcccatgcattctacattcccacatttcttttccatatctttcttagctcactaatcaagaaaagatgaaacaaaaaatgtatgccataactgatgacaggcaagatatggtttcatgtctttcactaatattatacttggcttccttctatatatatacatacatattatttaggaaattttatatatatagatctatatatatagaaggaagccaagtataatataggatgaaaattttatatatatactttagaaaattatatattatatatataaatttttatcccatttgtcatgtcttccttgggctgtgagaatgtcatacattttgcttacattttattgtgcatgttgacatcagctttgttttgtgtcttttatttgtttaccaggtaacctgcatatacaagaaattttctattttcatttttctgggccctatcctattttttactttgtcactcataagaattttatactcaaatttgttaagacaaaattgttcctctcttgtaatcttccaatgagttacactgttcccaaactatcttcataaggggtagtaagacccagtgaaaagaaattgagtaaaacagatattgttcaaattctaaaytgacatttacgtttgctagcgatggaaaaataatgattataatgattaagcatatagatgctcagtccatggtatataaattatagattaaataggtaaagtactctatacagtgaaaaatgaatattattaatagaattaataagtaaacagaaattcttggctgctcttattctatttgagaagtgttggtacaaaatatgttgttatttttcataagtcaattgaaataattgtgccatattcagtatgagcaaaactagagacacagaagatttaaaaagttataaataygaagtatttgtatttataatataaagtataatatgtggttcttgtccttaagaagcttatgaactagttgaagaaccaagacatacatctgaaataatcacagaagtagaagacatggtataacaagagctaccatttactgagagtcaagcattgttagatgttttatagacattatttatcatcttatttatcacatctttatcatcttaagccaaccctacacgtaggtgttattatcctcaccatacagataagaaaattaagtttcagagaagtttaattgcctagcaatcacacaactaataataaaaacagtaatagtcaatagttaggaagtgtctacaatgtgcggcttcactgggaagctagtgatggagttgagacacaggagctgtggctcatagccagttttgctccctgcagttgaagctctgacagctgcattctcatggctgccatatcttctgaaggacagagttagaattttaactcagaattctccacaaagcattcagggattcatcattagctttattttaccattgatcaaactgaaattcwtctgtagaaactgacccctttgcattttttaaacttaagagttttccaaacttagagcttagagttttctgtggggtctttgtacctgcacactctggccaattctcacctccatttacgaatacagtgaagaattagggtggggactggttaagaatgctctccaagcattgccataagttgttattaagtgtttgcttgatgagcctgatagttcctattatkgggcaatgagaaaaatggaattaaggtctctattacttctgatattcttttgttgagaaattgctatccttgatttcaccatcaatgtatttgtcagtgcaaaatgcattacttatgagagctgcctacatataatccacatgcatttgatatacaatatgtaaacccartataaaatcaaacatgcatcaaggcaatattctcttgaaagtctcatatttcctactgactgcagtagctagaggggttgggggcagggagcggacaaaaagcaactattggagaaagggagattttgagcatgggaagagggtcttgcaagtaatgtacctttttccaaccaaatttgagtaaaagtagcagctgtctccactgtcatgtagagcatctgcctgaagaaacttttgaaagagacatttccaatttttgcccacttattttagcctttccttcattatatagatttttttggtatagtaaatagagaaagaaatattaaatcagcatttaataattcatggacacaaagaggggaacgacagacactggggcctacttgagggtggagggtaggaggaggaagaggatcagaaaaagtaactatttggtactaggtttagtacctgggcaacgaaatactctgtgcaaccaacctccatgacacaagtttacgtatataacaaacctgcacatctacccctgaatccaaaataaaatttttaaaaaagacggcagaaaagtaggttaaataaagttaaatagagtcttgactgcaggactatagtgaaccttaattataaactaaggctctccaaataagtgatgtttatagcatttatataagtgtatccagatacatgtgtgtgtatgtgtgtgtgtagtctgaatatccaagcaagttttatgcacacacacacacacacacacagtctataagtctccaaggaagtcatatatataatatgtacacatacatatatagttgaacatatatttgcccatggcctctttatacaaatagcattttatgggagtcatgttttgtaggatggcaatgtgaaaagctgatttacagtgataaatcaataaaatctattatagattatatctataataaaatatacaataaatataatctattgtgatttaatctgagtacttgcaaccaagggtcacatctttaaaaactgagaatcccctgaatttatcatgtctgcttttttcttagtctaaaatccttatatgcattagcatatccttagtctaatatccttatatttmttagtctaatatctttatatttcttagtctaaggatatatgtctaaggatatatgaaacaggatataaggatatatgatattatatagaatataaggatatatgaaccagcagaatgtcgatgtgggacacatgagaaggcaatattcatcagggagctgtcacagaaacaggtcaaagaaataaaaaaactcagagtattattaagagaggttcctgaatcaagcacccttacccaacaattatagttaatgctataaagcttggataggcaaagcaggtaagaacatcccttgtaagaggtgctggaagacaggctgtttagattggacttgacactccttcctaaatggaacacgtatagactyctcttgctgcggtgtgtcatccttctatatccagatccatataacacaggggaacaaaacaaaggcagctgatgggctgtatgtcatggttacaaaaggcaatctgtcatggctagtatatccttgtgccatcccttggggctggctcccagctcttcctataagcagcacattgtgctagctcacagccctcttcccctgcaacattacaacaccgacaggattagccatttcagaagagagctggatctgctccaacacaaggaccccaggtttacttactggtgattttgattcagaggcctcaaaacgccagccactcagcagaaatgagaccatgttaactgtcaaagccttgagagagaagaccaatttttacacatttccctactactttgccataaaatataatcctgaggtaaggacctgatcaacattcraagcttactctcagtgaggaatgatgaagtggaataaaatcaaaccagtgaagcaatatgtaatataaaatagtgagtcaatttggcatagtcattaagattaaataacatggccaggtgcggtggctcactcctgtaatcccagcactttgggaggccaaggtgggtggatcagcaggagtcaggagttcgagaccagcctgaccaaaatggtgaaaccccgtctctactaaaactacaaaaaattaggtgtggcggcacgcgcctgtaatcccagctattccgggggctggggcaagagaatcccttgaacccagaagacggatgttgcagtgagccggggtcgcaccattatactccagcctgggcaacaagagcaaaactccgtctcaggaaaaaaaagattaaataacatattcatgtactccttcatccatccattttattggcatttataaaaacctgcatgctaggtctcagataaacagaaacaagaatgaagtagtttatcttctgaaagaatccaaccagtctggctgttttttaaactttagaatgcatatgaaccacttgtaatgatggtttaaaatgcagattgctgggccaagccccctcaatagattctccttcagctaggcggtggtgaggtctaagggttttcagtgtgatgtctaagagtcttcagtgtttttcatggtgattatgatgcctgtggtctatgggccatacttagaaaaacactaattagacacacagaagccagagggcccctgtaaaactagtctgaatggacggagtggttaagagcacagtcttcatttgcatttcctagagtcaggcaacctgagttcagattctgcctccatgaccatctgtttgatgttgggcaaattacttgactttgtaagacccagttttattttaaataaaatgaggacaatatttcccatccttttttaaattgtttttcttcttttcttttttyttttttttttttttttttttttgacagggtttcactctgtcaccgaggctggcgttcagtggtggtgctattacagctcactggagtctcaaactcctgggcccaggtgatcctctcacctcagccccatgagtagctgggactacaggtgcatgccaccatggctggctaattttttgtatttgttttagaaacagggttttccgtgttgcccaggctggtctcgtactcctggactgaagtgatcagcccgtctcagccttccaaagtgctgggattacaggcatgagccatcatgcccagcccaatatttcctaccctttagaattattttgagaataaaataaaatcatatatgtccggcacattatttggtacataataggtgctcaatacatagttataagagcagttatgacagcaataataattattgcttctgaaggtgatattattattgctgccatagagttgcaccagaatcaagctatattaayctgtattaatttatatgtcaatatattatattactatacaatagcaaaacagattagcagggagggtgtattttctaacataatttgaagatctgtattttataagtaactgtaaaaggaagccctcytgaaaaatgttccccttggttgtttttgcaaagttgttctttgctttaaacttaagtagtttcaaagacaaatgagaaatactcataatctttttctctccacaatgttcacaattttaaaaaaagtttaaataataatgtttttcctatgataaagtaatactggatatagaaaatttagaaagtgtgaaaaacactttaaaaatgagaaaataatcatccaamtattcaccatctagatataactataattaaaatttgatgtttaggytttttttttctattatggtttgtgtcatcattgaactcaaaatatatgcacaatttgaagtctgtttttccctaygtattatgtagtaggaattttcacatatcacacataagcataatatttgatgactgaataattccattttttctcacccataatttaggtcaacagtctcttacttygggaaattttactgtcttaagayatataataagaaataattttatacccagtgtttatatasacgtcatttttcttttagatagattcctgaaaacaaaattactgagtgaaggttatgaatacttttaaatttacaagacatgttaacaaatttttttcataaaggttttgccaatgattaactctaccatcagaaaaaagtaccaaccaatctantaactagagataccaaatgtgctttgattaatttattggccattatatttcttttcnacacattatctattccctcttttgtccagttatctactggaaacttgattgattggtttctctgttcctttccattcattccctcttttcttctttccttgtgccttttcttttcttactaaaaagtcattttagatttttcatggaatgaatgttgtataattcagtattctactggttaaagcacagcctagaagtatgtttctgctctctctcatagcagtgttataaaaagattacaccaaatttcacttngtagaatttatctttgatgacaaatatattaaatttcctttcctaggcagatcccaaatgtggcagcttttagcagcagcatgctggatgcttcttcttggatctatgtatggttatgacaagaaaggaaacaatgcaaaccctgaagctaatatgaatattgtaagtcatttattmagaaaaaatgctaaaataaggaattattcatatttcagcattttagatacaactggtgtgccttcttagttttcagcaattcctccagtgactaagtctgtgcttcctctcctgtttcttgatatggctaactaatccaagaattaaaagatctgacccaagttggggcagtaatagtccatctcctggtggtttgaactaccatccagtggtggcttcctaaagagaagtttcatgacttaatacagatgatctctatagagtayctttgagwtttccccgagatttttgatagagcagtttctttgattttgtgagctatcccaataygcttttttggtttcataagccagtgttggtttctgttgtttattaccaaagtattttaacattcaggaattcatatcagaagtggaatggaatagtgttaggcaaagaaaaaaaggccaaatgacaaatatctactacagaattcattcagataatatactccattctcctatataaacggcgcacaattgctgtcctgtaccatacgcaagttgtatcagaaccataaaaagaacgaaactgccaaagttttttttcattagtatctcttcttgttcctctctccaaagtatccagcaagtacccttgatctcctaccamactgttgaactcacataatttttctctctctagcatgagggatttttagcttttaawccttctataatgataagaacaatcatctataaagcatttatgttargcattattctacacatattacatataatcctcacaatgtcacagtctgtctccagagcctgggctcttcaccattgctctgtgtagcccacaatttatacatgcatctctgtgtctgacttgggaaaatgcataatcctttgattaaggcataagctttggagttaaacttactttagcattaatctttttatctcttcctggtatataatcttggataaattgttaatctacctgaacataagttctctcaactgtaaatggtacaattccatctcaaaggcctcttataagtttaatgagaaaaggaatgtaaacctctacgcagaagataccagtaatcactaattcccctcttctttgtatatctgcaggtggggtatcttttctgacccctctaggctcactctctgttctttaacacctttctctctgcccaagaggctgaactgtaaggacaggtcaacaagctcccttgacttttggttttcakttcaattcagccaatggaaatggtgagcaggagatggaaagaaataggccagtaaggtttcattttttattgccctggcttcctccctgtgaagtcaacttagacaagctgtcttcctcaatttggttatctcagcttaactttctccttcgggcttccagtaactgcttcctccccctcttctttcaagtctgtttggtaatagatcacttgttattagccacagggtactccacaattccctgtggtttccctcattagatgaccatataattttcatcaaagcaaactagggtgctttaataataccaggccagcaggcaaaaccagagtgtcctgagcaaacaagaatgtagggtcaccccacccagacttacctatgcctctttatgtaactcctagaaatccctcttaaattatcctcataggaatattacatgccgtcacggcacatagagtgataaacagtaggtgcaatttaaagtactacattgtggccaggcagggaggctcacacctataatcctagcactttgggaggctaaggcaggggaacgaatgccttgagctgaggagtttaagaccagcctgggcaacatggtgaaaccccatctctacaaaaacatacaaaaartgtagctggccaytgggrcaggtgcctttagttccagctacttggaagactgaggtgggaggatagcttgagccgaggaggcgaaggctgcagtgagccaagatcacaccactgcactccagcccagggaacacagtgagacccrtctcaaacaaacaaacaaacagacaaataaagtactatgttgtaattcatgtgtaaaaattaagagattataacatgaaggtatatatttcctttcctctttttagagccagattatttcttactggggttatccttatgaagagtatgatgttacaacaaaagatggttatatccttggaatttataggattccacatggaagaggatgcccagggaggacaggtattatttattttgttatgaaaggaaaaatacttaaagcagaggtacttagatgtcctgggagaagtcaagcagtttttgttctgaaattcttaacagtcctttccattaaaggagaaaaatkatcgccccccatctctctgtttaatttgtgtaactttgaagttttaagtcacttttacatacactgtttatctggtcactccttttcttcatgactttgtcttcctaccaagcaaacacaaaaacacatcgtgttcttaccctagtgatacctctgtcccgttttgaaaatcagaaatctaggggttattcttgataccaactctccctcaccttctacatgcaacctatcatcgccatctatcaattttgccttctaaatttctccctaatctgacaactttcagcttcaataatcwttcaaatccaggtttggatataatgtcttcaactactacaatgcctyctcactggtattaaactatttgtagtcagttctggacccaagtctgtgtgatttcatggtttaaagtaaatattaccctattagctcccacctagcaacagcatctcagcttgtcaaatcaccatctagtttagcctacctrccttcactccagcctccaccatgtccatcagggtgacccagaactccgccttcagcagytgttggtacaggagcatacccagtgcttgtatcagawcctcaagcttmttccaggtaggtagcagctttctgggtggcctgggcaccagcatgggtctgggtgaggtctatgctggggctggtgatatgggaggcatcacaattttcactgtgacccagagtctgctgagctccctaaargtggaggtggatcccaacatccatgctgtgaacacccaggagaagaagcagatcaagaccctgaacaagtttgcctccttcattgacaaagtgtggttcctggagcagcagaacaagatgctggagaccatgtggagcytgcagcagcagaagacagctgggagaacgtggacaacatggagagctgcatcaacaacttkctgcggcagctggacacatgggaccagaagctgaaggtggaggtggagcttgacaacatgcaggggctggtggaggacttcaagagtaagtaccaggatgagatcaacaagcatatagagatggagaatgaattttcctcatcaagaaggatgtggttaaagcttacatgaacaacrtagaataagyagtctcgcctaaaagggctgccccaggagaagagaagatccgtgagctgcagtcccagatctcggccacatctctggtcctatccttggacaacagccgagtcctggacatggatggcatcatctcgacgtctccgcccagtaccaggagatcgccagccgcagctgggccaaggccgagagcatgcaccaccaggtcgagtatgaggygctgcaggccttggctgggaaggctgagaatgagctgtgtcgcaggaagaggatcttccaggtgaaccgaaacatcagccggctccassatgagactgaaggcctcaaaggccagagaacgcagagcagcgtggggagtccgccattaaggactcaacgctgagcctgcagagctggaggccgccctatagcggaccaaacaggagagggcgccgtagcttcaccggaacctggagctgatgaatgtcaagctggccttgggcatcgagagcgccacctacaggaagctgctggagggcgaggagagcccgctggagtctgggacgcagagcaggtgtatgcataggargacaagcagtggctacccaggtgggctgggctcggcctcacaagctctgccctcagctatggcctggactycttccagtccagctttgactgtggyggggactccggctctttcagccgcaccagctcctgcagggccatagttgtgaagaagattgacccctgcaatgggaagctggtatccgagtcctctgatgtcctgcccaagtgaatgtccacggcagcacttcttagcttacccttcctgtggctgtcccacatccygctggggaggcagctgtgcaggggagcatgggcaactggagacccatctgacgctcagccctagytctcagcccaccctacagggatagtttgctgcctagggtacacctcttgcccttgcctccarctgaaaaaacaagtctattttttttttctgaaacagagcctcaggtatcctcaggaatctctgcaaaaaagaccctattagttcctatcagttctgtgcttaaacttcattaaagagccaattctagctccccgcaatgcaggtggctatctgttggggggggggggggggcgggggaagagcaattcatttcccagaaactatttgctcttgctttcttctctctcttcttagttcattttatactttgacatgtcgaataacaaaacttctcaatatcagaaagwctatttatttaaagaaaaactctagatttctaaaaagagaggaagatataatggtgttgctggctttacagagccaattatttcccaaaataactccataattacaaataactttgtaaatactcaagagaacttttaagtctctccaaacttttctcttgtcatttctatcacgtagctgccaaaattcatgagacaaaaagctgtacaatgagaaactctytttctaatctgagatccctgtgatttgtctcagactcagatcaaagaggcctgatggtacttgactatttaatggtacttaactttggcagagttagtaacaccwcttctttccctctattccaaatggtggaaaaatggacatagactcttagttccttggtcccgatggctgaaggctctctgagagtacaacttactcactctcaggaagccactctagttccaaaagtgacctgaggtagagtcctgagataacaacacagcatcacaaaccacttataaagcacaggaaaartctagtcacttcttccctctcttctctctttttccacactttctcacttctttctttttcctttctcttttttagttgaaatgttcctattttacattgggaataggatttttgtatcatattaacaattttaaactgtaaatttctacttacaaccttgttttttgctttctaacaattcaaatgaaatgaagcagtgcctataaaacttagcatagtgcttgacattcaatgagcattcaacaaatggcattttaattattgtttttattattttgaaaaaaatttaagtttttaatcagatgaatcttgaaaaatataatgctattaatataagtaacagtaatagagctaatatatatttactgtgccagacagcttttttttgttttgttttattttgttttgagacggagtcttgctctgtcgcccaggctggagtgcagtgtggcgatctcggctcactgcaagctccgcctcccgggttcacgccattttcctgcctcagcctcccgagtagctgggactacaacgcccgccaccatgcccggctagtttttttgtattttttagtagagatggggtttcactgtgttagccaggatggcctcgatctcctgacctcgtgatctgcccgcctcagctcccaaagtgctgagattataggcgtgagccaccgcrcctggcaaccagacagccttttacatgttttagttctcatcgaattcttataaataccctaggagatagcatttattattatttcccattatacagataggttaactgaggcacaaaggagttcatgcgtatcgaagggattttgaactagggcaaactaacttccacacttacataatacaatacattgtatataatcccttacaaatgagaaaacaagacagagaacttaaataacttacccaagtaagtagctcagaagggactagatcccaggtttgcctggcaycaaattttatctcttaacctttcttttatactacagaaattcaggaatgagatttttcttgtagacactgagaaagttcaaatatgaaattcttgttgccygtgttttgcagctccaaagcctgctgtgtatttgcagcatggcttaattgcatctgccagtaactggatttgcaacctgcccaacaacagtttggctttccttctggcagatagtggttatgacgtgtggttggggaacagccgaggaaacacttggtccagaaaacaccttaaattgtcaccgaaatcaccrgaatactgggccttcaggtaaagagaaacctattaatgaataaaatgtgtactttcctcatgcatatgtatgaacacctagtgatttttttcctgttttgtgtccaaatgcacccaatggaatccacaagaaggaaacaaacctttctttctctacccaaactttcttcacaggctctaaagaactgccattattattgcatggctgttttagaactcctgcctccgtcctggtgtctgcgtgtgagtgagtgtgtgtgtgtatgttctgggggaagtaagaagaaagcctgattacagaatagctaagcaacagtgctgccagcagcagcgcctgagggtgctgtctacttcagaagccacgcctacccggtcacaggagcaaactgatgcactggcataggagctaagaaccatgccttggaggtcatgaaaatcctgtgttccttggcctcgttgcctgccttctttctggaaaccactrggatttcctaattctatgccatagtccattgcacccttgcaaatgactagaaaattccctaggtaagtatttcttaaactatacataggatcagaagtaactgaggtcattgttaaatatgcagattactgggtctcttcccaggaaattctgattcagtcagtctgggctgaggtctgcaaatctgtttgctttattattctctcctttagataagcattccaggtaattgctcttttcagaggagcttggtaaatctgttatagaattaagtgaatacgactarccttgcaagaaaagcatcagtaggcctcgacaaatcaaatttttctgatttcagtttcttaaaaatgttgacttgcaatcaaggtgacacccttaaaagttgcatagttgcctaatatcatatatcgacactagtcttatatttaacaaaatcaaagtatttatgtcttcactgaaygtgtttaaatgttctaggcctaacaatgagatgacttttctaatttgttattccttctttttgatagtttggatgagatggctaaatatgaccttccagccacaatcaattttatcatagagaaaactggacagaagcgactctactacgtgggccactcacaaggcaccaccataggtgtgtttggggcagatgtgatcagagaatgtcaggggctcttcttccatatggctacatttactacaacttaaaatgaacaaataattatctgaaaactatgaactactgtcttcttccatttcagcttttatagcattttctacaaacccagaactggctaaaaagattaagatatttttkgcactggctccagttgtcacagttaaatacacccaaagtcctatgaaaaaactaacaaccctttccaggcgagtagttaaggtatgtgacttcccaagttttaatctgaaataactaaaagtagctctrtttccattgatttcaacagaagaccaatgacattttacaaacttctgagaaaataataggtattcaagatatccatgtaagttcactgatgatgtatgcaatcttattagcagagttcagggaactccccctgttgctaatctgccctactttcttcatctatgtctagaaacgtgtctgctgcgccattcctcaaccacagatagagagaacttatttgattgattggtttgttgaatttagtagattgaatttttctagtgatccctaattttttaggggcagtggtggttgagttcacagcatggaatcagatggtgtgtgtttgaatgttatttctatgatttgcaagctgggtaaatttggtcaagaccttaagttctcttcatctgtaatgtggggataataatagttcttactcatagggctaccctgaggactaagtaaattaatacagcatatcctctaaaacaatgtattgcatattgtaaacctttaataaatgttaacaattgtttttgttatcattagttttatagaatgtaccctcctccatcactaaatgcccaaccttgtttcatttcctgacactttacaggctgtcattttgacaattcccaaaacccaggcaaaactctaggcctcctaatctcctctagttgacagctaactaatctgatcatttatctagtccaggtaaattgcattgcatgggttggtgtgttttcttcttgtattttaacatgggcttctcccatggtaataactcccatggtggtgattgcacggttcagtgatttcaatgagagcagatgaaagtgaaacaattctgacagaagcctgaagatttaccgaagattctcattgttgagagctaagcaaattagcctatggtgattgaagttcatatctatacatcccagaaagacaggtagcagaaaaaccacctgaaaataacaaaacatgcttacattgcctgttggtacttgggcctcttataccattgagatttcactctggcctgctcctactattaagtaaacaatgtcagactttttgcttaattatttcagtattcccacacaattaagagatattttgggatggtgagatctttccattcctcttcatttgcacagctctcttcaaacttctgcataccctgacgtgtgtaggaygtggtgcaattcaagttaattcagccaaaagatatctaggagctactacttcaaggccctggcattaggaaacagctatgtctacaaggaaactttccagcttgttggtatgagtaaaaactagggtgtatgtgagagtagaatgggattcaactaaggaggtattagggggcaatggaaggaagtggtgtcatgtctaggagtttagactttgttctgttaatgaagggaggccattgaagaatattaaatagaaaagtggcttgatcaaatctataactttagaatgattgccctttctaaattataactccaatagaggaactatagtaccaatagaagaactgccacatatgacctactaattcctagtagaaattccagtattataatgacagagtaaaaacattgctaggcaaactcagagaaaagaaaaatactgctagctgttggaatcacaaaatactttttggataagatggcattttagtttgggcttaaggatatgatttcattatagagtgtggtatagaaaggctttctgaaacaagagagaaacatgagcaacattgaagtggtgaagctcaggccatggagaaccacacataactcactttactggagatttatrttagtatttgtgaaggagagtatgagaaatcatgttggaaatgtagaggcagatgataaagggatttgagcgccaaattaatgaatttggaatgtattatataagtaattggggagcatggaaatatttgcacagrggaatgacacgcataatgcccctttttagaaagattcccctgggaaccaaatgtaagcagatgagggtaaaggacatcaagaagggtgaaagattaggagaatcattatggagttattgttaacacatcagytgatagatgttggggattrgacaagagttgtgcactgatgagaagaatgattatggggttattgttaacacatcagctgatagatattggggattggaacaagagttgtgcaacaaaaaataatctgtaagatatgacaawgaaatgatagacaacgtttaggtatatttttgactttttgaggaacgggctttctttctcctctcctctcccatcagccagatgctcgcaggcatgcttggtgaaaggcttccttttttatgggagcttctggactragacaaccttttttctctctctgattagcacttccttttcattgatgctgccagttctttcaattgctccatttctattacattcaactcagttcatgagagttgaactgaattgagtataaagcrtaaagacttaagtcagacagaactgggttcacattctgcccctgcctcctgcctattgtaaccttggacaagttatttaaccatgctaagcctcaattttcacattgatagaatgagtagagttcgtcaagttgagaaattcattcatccattcccccttcctcacctcccattttgcccctggacatttatgcgtttgtgttcttgtcattctactttctttctgacctatagattgctttgatcctttgcttttgacgtgtctctacaacattaaagattgttagtactgtctccatttcttaaaagaagaacttgaggctcagagarcctaagcagcctgtcccgagtcacccagctaatggacggcagagcgagaatttgaacccagatctgaccaggcaacccatggtcaacagtcttttttataggtggaaaaaaaagtctttttccactttttcaatgccaacctgaagaagttagtgaacaagggtgaccagctcagtgggttgttgaggactgaaaccagcccatgttctgctttggcaagccatatgccctggcatggggccatgttgccagaaagaggggtgccttttctaattctcacacataccaaaagagctactagaaggagcctggctccctgctgttatgtgacaaatatgcctcctccagagccaacttggaattatatctacaagttggcatgtttgctactctgtatatgggtgctatactgctggctggcctgcattaatatcctctcttttagcttagggtaaaggagaaattattcacctttgagtaaatgcatagtaattttgctgagtcacaggatattgaggtagaatggagtcagagaatgtcctgctaatttactccgtatttgggaaagctaactccaggtttcagaacagagattatcttgtatagtcagatataatctttatttmatggaatatttgatattccatggaatattaatggaataaaagaagtaccaagatttcatactcctcttcctgtccaagagaggaagagagggatggagscagggaaaaaggaagggaaggagggagagggagagggagagaagacagaaggaagaggaggaggaagaagaggaggaagaagaaaaagggaagggaaaggaaggacaacaatatgttaaactagttcaaaccatacttctcaattctttaggtctggaaagtaataataagccttgtacatattatctgattgattccagactcttcattttatctcaatcactaggacacttagataataccctagataattaaacttgccaaattgtaattcttccagtgtaaatgtccccataataatttaataatagtagcagcatacactcataaaatgagcttctcttttaaaattatgttgacatttacttcatgttttcaagtgtgacaatttaaatagattgtcacacaaataaataattaaagtaaaaggcaggatctgactttaaccsgtaaacaaatttattttttatttatcaataacttgctttatttatcaatccatgcttggcaaaacaaatccatgtgaaagaaaatagccasttcataaaataatcaacaattaaaatacggtgttaagaaacaggtgacatctaccataatggattcttggttctctgttctgaaacctggagttggcttttccaaatacrgagtaargatcttaaagtgaattagatcttaaatgaataaatgctagttrttactgttctttagttgtaatttctggttaataaagaattctagaagaaatgtgtgtttatttttactgtaaataggtgtttccaaagttttaagaactaaaaaatgtctttttacctttatatctagtttattatgccaagattataaaactagtagctgtgaagcaaagaaactcacttgcaacactgcctgaaattacactagtaaagattcatttatgtgggttaagcttttgtcatagaattcattgaaggattctggaaggaatggctcaagtctgtattagtcactaattatgatagtaataataattacattaatttatactttaattaaataatactttgcatgtgcgctagatgctaggaactgcactaattgtcttttaaacatgacctactaacttcacaacagccctacccaktagaaaatttttccattttatagatgagaaaattcataataatagaaatttaaaactctcctaaggtatagaacgtgtttgaatccagaatgaaacacatgtatgcctcactccaaagtcttactaatttcctgtgggaactagtttctcaaggggcattctaaaaaccaccccaattaaagatttttgggaaaagccattaagaggtgcattggaaggattacaaagctaataacaagcctcatgatttcactaaggaccaacactgagcagatgtcacctaatactgtgcagtccttctttgaactatctctttctccacttttgatatccacgcctgtaagatttgatggtgttttaaattatcttgtaggtgttgtttggtgacaaaatgttccaccctcatacattgtttgaccaattcattgccaccaaagtgtgcaatcgaaagctattccgtcgtatttgcagcaacttcctatttactctgagtggatttgatccgcaaaacttaaatatggtaggtgtaagtaattgggtctgggaaaacatttgttttgttgcacagargtgatgaaagttatcctggattgtatggcaactgcaattcaaggtttcctttttgcatttggaatgyaattagtacatttatggcttccaatgagggttgagagtccacttgctttcataggaggatttgagaagaaagcttttctgccaacaattctcatctcttcttacccgaaacgtccttcgcttagataaaggctatggttttgatatttatcttgctgtgcctacgccttatgtcagacccactgaagtagaatctcagggggtgagtccagacatttgcatttttatttgtttaccaattttccactttcacagttgatttggaaagttattttgtgaacaacttacttccttaacccaaaaggataaaaggaggcatggttcttcaacaacagctacaaatttattgttcaaggggtaccgagagggatcagtgtcagggttcttgtcaagtaatttctaatttaactgagatcctttccatgatgacccaaggagttggggaagggaggagggaaagagaggagttgtgtttgaaaccagaagtaggataaggctgaagttggtctccacctctctcacaaacttctgcccagagcctactctcccagtcagtagaaagcactgattaaaatttttcttgctttcaggcaagatttataaaaggctttttatgcaaaacatgtcttagccattgcctttctatgttcctctctcactttctcagtgtacaatggaaactatgcttcctatcacttagatgcaaggatatatgtaggtgagagcatatcatgcaggcagagctgagtaaaaagaccttgaagcaaataaaaaagagtgtattttaaaagcaccctctcagcatagcctaagagtttgctaaagaaagacatcacaaaataacacccttgagtattcattggcccttgttgtccatatggacaccttttgtcagatcaccttttgtctttctgccaaaaagcaaaacttacagaatattacagcaccttcaaggacatttgtttcaaagaaccatagccaggggtacataagtaatattggtggaactttgaaaaaatacacatgtccagaactcaacctttgagattttgatttttattcagtacrtttggatagcttataagtaggttaaaatatttttaaagccctaagatgtttctgatgcttactttggtggaaaataactcttttaatttaaaaaatagtgcaattgaaaatatgagagaatcaagagtttttgtgtgtgttttgtttttgtttttgttcttgtgtgtgtttgtggttgtttatccataagatatctaaatataccgactgactgaattaattctgttacacaaaatttcagagtcctgtagaataytcatcacattttaaaattcagaaaacgaacgtcaacatwcagatctattcttagtgtcttagggccaacagctctctttgaatgtcctttgggacttaacacggggtgaaggagaagatcactggggtttttatyctttaatcycctatacccttgaacctatgggagttgagtctggaaaaagatagatttccttttgtctttgccccgygggatgccctctgtaggctttctgaagacactgctgaggacaggacagagctggtggaggaaaaagttcttcaaagatgggcttttttggttaatatgtcttcagattatatggtacatgttttttccttaaagaaagggaaaagasgccrggtgcagtggctcacacctgtaatcccagcactttgggaagctgaggcaggtggatcacgaggtcaggagagcgagaccatcctggctgacacagtgaaaccctgtctctactaaaagtacaaacacaaaattagccaggcgtggtggtgcgcacctgtagtcctagctactcgggaggctaaggcaggagaatggaacccaggaggtggagcctgcagtgagctgagatygcaccactgcactccagcctgggtgacagagygagactccawctcaaaaataaaaataaaaataaaaataaaaaaaagaaagaaagggaaaagaggaaaagaagaaactttttaaatttctctcaaatgtttacttgtggtatgatgatatgattagcctctagatgagaagtaatctctttgcagagtcgcttggatgtttatttgtcacacaatcctgcgggaacatctgttcagaatatgctgcactgggctcaggtaagtgcttcttattcctgcttgatgcacacatatctctgcaagaccctcaagaagtgctctcagagarctcactgcagggttctgctggcacctgccactgycacattgatgtttttggaatcagcatcaactcttcatttttatttacttcattcccatttcttctccttgtcctcagtgtctgggttttgagcatggttctcagatattctgactgggttctgatccttagatgattccaaactrcattttaagggaagrcttttatttcctctttcagaaagtcatcagctctaatagaactttatataaaatgatgcatcttattccagaaagagctgttcatcctccaatcaatatatggggcatttcagaatgtggaaatgatgctttattcagagaagattgaatgctagggaagaattaaartggatttatggcttatgtttttaccttcagctaaagttttatttgttttattttattactcaatatacagaaagctcagagataagtctaatccagttggtgtggctttctgagccttgtgtgtgtgtgtgtctttgtgtgtgcatgcgcacacacgtgcatgcacattcatttgtttattatgtaatatttgcctatattcttggctggtggctcagtcacaacscyttttgaaaagtgaacaaaatatacataattctatgayggggaaagtggtggtgtcttcttaaaggtttaatatatctgagaccccccccaaccaggaatttgcattttaatatatatcctactaaatttgctccctgttttagagaatcgctactatagatagcctgaaatacttggtgaggatttccaaaatacttggaagagtttgatcccaggagataaggcttcaagttcctctacgaagaaagatgttcaggatatagggcttcctactgacgaggagacagataggtcctcttatgagcatggccttccaggtactacacatttaacttcacagttattgagcacttaatatatgctcttcttgctgctcatacatatgattttattcagtctcactgaattattataacaattttttagtaaaggcattgatatccccccactctacaaatgtcatagcatattcttttatttatttattttttaagacagggtctcaaaaaaaagcgtgcagtggtacaatcacgttacccaggctgaagtacagtggtagaatcatggctcactgtagccttgacatcctgggtttaagcaatcctcccatctcagcttcctgagtagctggcaccacaggcatgcaccaccatgmccagataacgtttgtttctttttacaaagatgaggtcttgttttgttgcctaggctggtcttggactgctggactcaagcaatcctcccacctcagcctaccagagtgctgggattacaggcgtgagcactgcgcatggctgcctgttccttatacattttacaattgacttctcttaagaaaaacttttcccctttgacagagagtcctcttcaggatagaaataagtggggatggtggggggcatggtgaatatttggttataagttacataggcagctaaggcaagagtgatgatcatgatgatgggagtaatactagtgaaaaaaagctgtttgttgggtattattaggtgctacatgctttataggtgttamcataatcttcacaatcctaagaaagaatgttactatcattctcatttcacaaatatcttgccttgaatcacagattcagtagtctattaagcctggatacaatcaaggtatattagtgtctttcacactactataaagagctacctgagactggataatttatgaagacaagtgttttaacagactcacagctccacaggctgtacaggaagcatggctaggaggcctcaagaaacttacaatcaatcaccgtggaaagtgaaggggaagcaagcacrtcttaccacggtggagcaggagagagagagcacaaagygggaagtgccacacactttcaaacaaccagatcttgtgagaactcacttactatcaggagaacagcaaaggggaagtccgcccccatgattcagtcacctcccaccaggcccctcacctgacaagtgtggttacaattagagatgagatttggrtggggacacagagccaaaccaaatcatcagatttgatcctagagcccaagttcctaagtagtacgtcctattgcctctcatttctaaaagcttgcagaatttcaacagcavactgctgcctctctgaatataaatcatgatgagaataattttaaactaaaaatcaggactaaattggtaagtgggaaaaatatctgagattcaagctaagaaagaaaaacacagaatagtctgagaataatttaatgaagtgcttgacataaatgtcaaaattatctgcctcatcaatcctatatgggtggcaaataacagaaaaatgaagtgctgcatatatgcatgaccttatattctaatatttgragtttcaataccaaaatgcaaaagtagtcatgcacagtgtctcagtcagcccatggctacattatgcacatcacagcaggtggcttgactccacataygggaggcagagagcagccatgtaccttacacagaactgcggaagctcagtgggtgaatatttcttttaatagtaaaaaaaaaaaagtytaaggatagggaatataatcataacagtttagaccacatcatgaggataaggtacaaagttgtataataacaatagcagtaatttttaaatgtaagaaatgtatagctaatgcctttttaaaaaaattattaaaattcctgaagcaaagatattcaagaatcattcaattcygcatctttaaaaaatatttctgtgtgtaacatggtaacatttaaaggcattggatttaaatgaaaaatctgaggattttcactggaaagatacaggaatgagtaaaagattgtaccaattctgtgaattacgataagatttatcatttttattacttattttcttaatctttattgaaatttagcttatgtttctaaagactggggcataatgttaatcttctttgtatatttcttctgtactgtctttaaatgtacactattttcttatattattttaacgtgcttattttattttaggctgttaattctggtcagctccaagcttttgattggggaaactctgatcagaacatgatgcacttccaycaggtacaaaaataatcctcataatcagttccatgctgcaaatgaactaacaaaaatagtgtctactcatgaagcacctrccacttccatttaaccacactggatattgcttattgctgttctcacaggctgcttattgggttcttgccatatgccatatcattatttctaattcttacaaggaccttgcaaggtaaatattattatccctatttttttcagaggttcagagagggtaggtaaattaccagagttattcagctagtaaacaaccagagacaggggctcaagatggtcaactrgatacagccaggaagagtttctcccattaagagacaagaccatcaagaagattggaacactctgagcagatcttcagaagaaaggcattgagartgaatggaggtaggatgtggagcctgggctagagggaggattctgggaagcctgaacggggttgctgagcaccaggactcacttcaggccctgagtagctcctggggaagaggtgagttaaataggagtgcaatggcccattcttactatggacctacctgtaggacaccccacaacccccatagacatttgagctagtaggcagagctgtttggggagttggcagggwcaggactcttgcctgtgcaaagcccaaagggtttggtgcaggaacggttgcagtgaagtatggccagggacatccattccctaaggctcgccaagcacctctaggtagcgctggcctttgttgactgttgaacctgaacagaacagggctatcttacccacgggacagggccagtgtaatctgagcacatccctgtctgctggcctttctcagggttcctgcctggctgcacctgcttgcagcacagcctcacatgcccaaccagagtgcctccctgtggtcactgccatacctccttcactggcagattctgcctaggcataggacagcttttgcagatgggtccctaccagtgtgaacatacttgcagcctcccctgactgctttgcaagcatgcgtgtgtgcaaaccttgccaccaccaccaygatgaagtgcttttgccccacctcccatcagagtgttgttgccagtatatgaggaacatctcagcctctccagtgcagcagtggccagagaacaaagctttgcacatggtcccacctaccaaggttatagcacccagcccaggagtgctgagctgagccctggtaccctgaagtcatccagaaatgaagccagtcaactaaacacaacttatatcacagtcatattctcaagggcttcaaagaatatraaagcaaaaagcctcatccaaaggacagcaacttcaaagattaaaggaatatcagccaaaacagtkgagaaggaatcagtgcaagaactctggacatttgaaaaggcaaatgacctctaaatgaccacactaactctccagcaattgttcttaaccagattkaaatgactgaaatgacagatacacagttcagaatctggacggcaacagagatcattgaaattcaggagaaagttgaaactcagtccaaggaatctaaggaatccagtaaaataatttaagagctgaaagatgaaatagccattttaagaaataaccaaattgatctgatagagctgggaaactcactataagaatttcataatataaccagaagtattaatagcagaatagaccaagcttaggaaaaaatctcagagattgaagactggttatttcagtgaacccagtcagacaaaaataaagaaaaaagaatttaaaaaatgaacaaaatctgcwgaaaatataggattatgtaaagacaccaaacctacagctctctggcattcctgaaagagaggaagagagaggaagtaacttggaaaacatatttgatgatattgtctatgaaaatttccccaacctcactagagmggtcaacatttaaatttgggaaattcagagaacccctgcaagatagtatataagacaaccatccccaagacacatagtcatcagattctccaaggtctrtatgaaagaaaaaatattaaaggcagctagagagaaggggcagttcaccaacaaagggaacctcatcaggctaactgtggacctttcagcagaaaccctacaagccagaagagattasgggcttgtattcaacatccttaaagaaaagaaattctaaccaagaatttcacatacagacaaactaagctttataagtgaagaaaatataaaatatttttcagacaaaattgctaagggaatttattaccaccagacctgccttccaagaggtccttaatggaatgctaaacatggaaataaagactggtaccagatactacaaaagcacacttaaatacatagaccgttgacactagaaagcagctacataatcaagcctacataagaaccagctaacaacacaatgacaggatcaaatctacacatattgatattaaccttgaatgcaaacaggctaaatgcctcacttaaaatgcaaagagttgcaagttgcataaagaagcaagacctaactgtatgctgcctacctgagacctatcttgcatgcagtgacactcctgggctcaaagaaaagggagggagaaatatctatcaaacaaatggaaaagaaaaaagaccaggggttgctattcttgcttcagacaaaacagaatttaaataaacaattatcaaaaggaacagagaaggacattaaataaagataaagggttgaatttaacaagaatacaactatcctaaatatatatgcacccaacacaggagcacccagattcataaaacaagtccttagagacctacaaagagacttagataaccacacaacaatagtgggagacttcaacaccccactgacagtactagacagatctttgatgcagaaagctaacaaagatatttgggacctaaacttgacacctaaccraatagactgagcagacatctagagaacactcgacccaataacagcagaatacatattcttctcatgtgcacatggcatatactctaaaatcgaccacacactcaaccataaagcaattctcaacaaattaaaaaaaaactgaaattatactatgtacactcatgaatcacagtacaataaaagtagaaatcaataccaagatgatccatcaaaaccatgcaattagacaaccttctcctgaatgacttttgggtaaataatgaaacacaggcagaaatcaagaaattctttgaaactaatgaaaacaaagatacaatataccagaatctctgggacacagctaaaggagtgttaagaggaaagcttatagtgctaaacatccacatcaaaaagttagaaagatctcaaattaagaacctaacatcacacctagagaaactagaaaaacaagagcaaaccaactccagagctagcagaagaaaaaataaccaaaattacagcttaactgaatgaaactgagatgcaaagaaacatacaaaagatcaacaaaatcacaagttgyttccttgacagaataaataaaattgatagactgctagctagactaataaakaataaagagagaagattcaaataaatacagtcagaaatgacaatggggacattaccaccaccccacagatacataataatccctcagagactatcattatcacctctacacacacaaactagaaaatctagaagaaatgcataaattccgggaagcataacacctccaaagattaaatcaggaagcaattgaaatcctaaacagatcaataacaagttccaaaactgaatcagtactaaaacactaccaaccagaaaaagccctggaccagaatgaattacagtccaattttaccatacatgtaagaagagctggtgccaatyttattgaaataattccaaaaaatcgaggaggagggactcttctctaactcattttatgaagccagcatccatcattctgatgccaaaatctggcagaaacacaatgaataaagaaaacttcaggccaatatccctgataaacatatatgcaaaaattctcagtgaaatactagtgaacctaatacagcaacacatcaaaaagctagtccacaacaatcaagtaggctttattcctgggttgcaaagttggtccaaaatatgcaaatcaatatgtttsaggcatcacataaacagaactaaaaacaaaaatcacaagattatctcaatagacacagaaaagactcttaagaaaattccacatcccttcatgttaaaaaccctcaacaaactaagcatcaaagaaacttacctcaaaataataaragccatctcaacaaacatatgaaaaaaagctcaacatcactgatcatcagagaaatgaaaatcaaaaccacaatgagataccatctcatgccagagagaatggygattattaaaaagtcaggaaacaatagatgctggcgaggctgtggagaaataggaacrcttttacactgttgatgggaatgtgaattaattcaaccattgtggaagatagcatggctattcctcaaggatctagaatcaaaaataccatttgacccagcaatcccattactgggtatatacccaaaggaatataaaccattctactataaagatacatgcacatgtatgtttactgcagcactgtttacaataacaaagacatggaaccaacggaaatrcccatcaataatagactggataaagaatatgtggtacatatgcaccatggaatactatgcagtcatagtaccatgcagccaatgagataatgtactttgcagggacacggatgcagctggaagccatcatcctcagcaaactaacacaggaacagaatatcaaataccacatgttcttactcataagtgggagttgaacaatgagaacacatggacacagagaggggaacaacacacascagggcctgtgtgtgagggttggatggcgagggaagggaacttagaggatgagtcaataggagcatcaaactaccatggcatatgtacacctatgtaacaaacttgcacattgtgcacatgtatcctgtctgaggcgggcagatcacttgaggtcaggggtatgagactagcctggccaacatggtgaaacctcatctctattaaaaatacaaaaattagctgggtgtggtggcaggcacctgtaattccagctacttgggaggctaaggcaccagaatagcttaaacccaggaggcagaggttgcagtgggctgagattgtgccatggcactccagccyaagtgacagagcaagactccgtctcaaaaaaaaaaaagaaaacaataataatattaaatgccatttmtgacaaacccacagccaacataatactgaataggcaaaagcttgaagcattccccttgagaactgaaacaagacaagaatgtccactgtcaccactcctattgagcatagtactggaagtcctagccagagcaatcacacaagagaaagaaataaatggcattcraataggaagagaggaagtcaaactacttcttttcatggatgatgtgattctatatctaaaaaaccccatagtctcattctaaaggctccttacactgatawcttcagtaatgttttaggatacaaaatcaatgtaccaaaatcagtaacaatgtccaagctgacagccaagtcaagaacataatcccaatcataatagccacaaaaagaataaaatgtgaatacagctaatcagggaaatgaaagatctctacaatgagaactttaaaacactgctcaaagaaatcagagatgatacaaatggaaaaacattccatgttcatggataggaagaatcaatatcattaaaatggccatactgtccaaatcaatttacagattcaatgctactcctatcaaaatacaaatgacatctaacacagaattagaaaaactattttaaaattcatatgaaacccaaaagaagcctgaatagtcaaggcaatcttaagcaaaaagagcaaagctggaggcattacttgacttcaaactatactacaaggctacagtaaccaaaacagcatggtattggtacaaaaacagacacatagaccaatggaatgggttagagaacccagaaataaagttgaacacctgcaatcatttgatcttcgacaaagttgacaataacaagcaatggggaaaggacggtctattcaataattggtgctgagataactggctagccatatgcagaagattgaaactggaccccttctttttcccatatacaaaaattaactcaagatggattaaagacttaaatgtataacctacaactataaaaaccctaaaagaaaacctaggaaataccgttctggacataggacctggcaaaaatttcatgataaagatgcaaaaatttcatgataaagatgcaaaaatttcatgataaagatgcaaaaatttcatgataaaggtgcaaaaatttcatgataaagatgcaaaaatttcatgataaagatgccaaaagtaattgcaacaaaaaacaattgacaagtggaacctaattaaactaaagagcttttgaatagcaaaagaaactatcaatagaggaagcagacaacctaagaataagagaaaacattttcaaattatgcatttgacaaagatcgaatatccaaaatctgtaagaaacttaagcaaactaacaagcaaaaaaaccaaacamccccattaaaaagttagcaaagtacatgaacaaacacttctcaaaagaagacatacatgcatctaataagcatatgaaaaatggtcaatatcaataatcattagagaaatgaaaatcaaaaccatgatgagatagcatctcacaccagtcagaatggctattatttaaaagtcaaaaaataacagatgctggtgaggttgtggagaaagaatggtcatacaccactggtgggaatgtaaattaattcagccattgtggaaagcaatgtgacaatttctcaaagaacttaaaacagaactatgatttgacttaggaatcccattactaggtatatactcaaaggaatataaatcgttctatcaaaaagacacatgtacccgtatgttcattgtgcacctattcacaatagcaaagacatggaatctagatgcccataagaggtggactgaataaagaaaatgtggtacatatacaccatggaatactatgcagctattgaaaagaatgaaataatgtcctttgcagcaatgtggatgcaggtggaggccattatcctaagtaaattaacacaggcacagaaaaccaaatatcacatgctctcacttataagtgggggctaaacattgagtttacatggacacaaagaggggaacaatagacactggggcctacttgagggtggaggctgggaggagagtgaggattgaaaaactacctattgggtactgtgctcattacctggatgacaaaatcatttgtaagccaaacctccatgatatgcaatttacttatgtggcaagcctgcacatgtaccccctgaatctaaaataaaagttggaaggggaaaaaaatcaaccagaatacgayccaggtttcctggatttaaagtctagtcttctccactacacttattccttctcaaaaaaacaaaaacaaaaaacaaacaaacaaacaaaaaacatgtttgtttttaaagtatattctctgacttcttatctatgtttaataactaagactgcctaatagttctttaggatgtcatttactagccactttttaaataccattatatggatcattaaagatataagtaagaagtatcatttttaggaggtagtagtatctgccagggatagtgtgccttagcatgycattccctagcaaatagtactattttcgatctggtgtgtcaccagatctacgaaaacttttagagaaaagttttatattaaagggaaatgtgtattgttattgttattttattcccaagtatgtgaggaaatccaataatgattttggcttcttgcygatagactgagcttaaactgaaaaagtagtcatgaatgatacttgggtttttcaaatctaggatgtagaaatttgggaaaaaaaaattcttttttttaatttcttttttcttttacctttaaaaataaartcagggtctcattatgttgtaaaggctaatcttgaactcctggctcaagcgattctcttgcttcagtgtctcaaagtgctgggattacaggcgtgagccaccatgcccagccaaaaaattttaatgtgggaatttttaatgtcatcmtaacaactrctataacaactataatagtgaaaatgtataactcaactctaactgttgtgaaaaacctgacttttctccccagctgctatagttagatgtacgtggcaggagtggggtggggatatgccacacacacacactgtttcagaatacggttgtctcttgtgaggaaacagtggtgactaggtttacttagttcatatagtttttccaaargccccctaaccccaactcccaccaaaagatactatattctcaatggctatggcaaaaagttctagagggacctctggcccagttttagtcacgtgcccatctctcatacaatcactgtgacctgaagaatggaggacgaattggccagacctggttacctggaacagaggttgtgttgkatcaatacaagaaagaagcggtaagggaaaacttgctgagagtttatagagtgctatagccactctagttatttgtaacagactgactcctttttagcatcatacttcaaatgtctttcatgccttggtctcaatgctccctgaagagtctgctgattcccaaatattaataatgccactgagcccagatttgtgactargagaagggatatttatcctatccgacattttgtttgaaaaggtcacattctgagatcaaatgctaactagaaagatgatcccccatggaaaaaagaatgctcttcctccagaatcttttattttcccaaacgtgcaagtcagaaatacaataattgaattgtttttttcgattcacaattcatattactgcacgagaatggtttcaagtatttttaacattttaatgtttatataccattaagtgtaaactaattgtacacttgtagcatttaaagaacttgctcaacagctgacagttaatgttacttctataatgtaatattctgtaaaaacttttctctctctcttttattgtatttagcttacacctcctttatacaacattactaagatsgaagttccaacagcaatatggaatggtggacaggacattgtggctgatcccaaggatgttgaaaatttacttcctcaaattgctaaccttatttattacaagctgattccacactacaatcatgtggatttttaccttggagaggatgcacctcaggaaatttaccaagacctaattatattgatggaagaatatttacaaaattaaatgcactttactttctctaagcaagtggattttcataataataatgagatgaacagacactagagtgatccccagtgatttccagcttctagtatctatgcctttgtataatctcctcccattcaatgtgggtgggatatgagacttckttcaagccaacagaactggcaaaggtgtaagatgtcacacccttgattaggttttgtcatatggcaaaggtgataaaatgtcaatccctgattacattatacaagaagttggcggggcttggtggctcacgcctgtaatcctagcactttgggaggccgaagctggaggagcacttgaggtcaggagttccagaccagcctggccaacatggtraaaccctgcctctactaataatacaaaaattagccggatgtggtggcatgcacctgtaatcccagcttcttgtaaggctgaggcagaagaatcgcttaaacccagcaggcagaggttgcagtgagccaagatcatgccactgcacgtcatcttagcagattggagcaaaagattctccttgttagcttgatggaataaacagatatgttgagaaaactgaccttacaaggaactgagcatagcttttggaatctgagggtggcttccagctgataaaacagcaaaacaccaaggccttcagtcacataacctcaagaaaatgaattctgcccaaacctgaataaacttggaagcccattcttccctagtaacctcccattgagagagcatcctggccaacaccttgaaggtaacgtggggagatcctgagcagaggacccagttatgccatgcctggactactgacacacagaaacagtgagataataaatgtatattgttttaaactgctaagcttgtggtaatttgttatcagcaatagtaaactactactactatttgttattgttatataacaattatattaattatatgtttgattatattaattacataacataatatgatattatataatttataattacattatatacaatatattaaaatataattatgtattaaagaattagataacaatgtataataaatatgtaatatactacatatgatatgttatctgttataataaaattatatataatattaatatatgatgattattattctgtctctttggttaaaagtttgatagatctaaattcttgagttaacatattttaatatacattttcacatattttctgctaattcagtcacctctgtcatttgggaatttgttctatagattgatttttctcttagttatgggtcctgccttattgcatgcttaataatattatattgaatgccagacactgaattttgcattgctgattgctgaatttgtttttatttctttatatagggttggaaaacaatcacccaggcacaaagtcaatgatcaatgaatacatgtttggtgactgggagtgtcaagtaacatgaagcacttgattgagccctgtagaaattggggtattttacaacatgtaattaatataaacttggctaagactcatttatcaagaatttcctggcataaataaaggggctgtagacatgatggggaggatattaaaggagatctgagtcttagcaggggaaggctggctggcagggcaccagaagccttcacagggagacacctctttggtggctatggcatatcatactggcatatcctgacactgatcttgtcactgccccagaaatgactgcacttacacatgctgattcatgcaactgaaatgtacaaggatctgcagaacataaaacaaaacacatgtttataatttatatcaagaactactatttggccagactagtgttttcttttcctgtaataaaacacatgggaaattctagtatgaaactgttgcttggtgtacatggaagaaaacacagaagtatatggtttgacaaaaatcatcccctccacgatcattcaagttcactgagccttttccatgaggaaataatagtgtaagcattttacatgaatggtatcatttaatcttcatgatagccttataacatggtatcattcttatcactttacagatcaggaaactgaagtttagagatactgggcaacttctctaaaatattagttctctgaactctgaaaccttgactttaggtaaccaagctcttaacctttatgctttaatattataagtatgtattataaactagccattcagaacaagaagaatgataaggaaaacactgttcctgccyaagtggcactcagagtaatgaaaacatcagatactatacagctatagtttgagtatcctatgtccaaaatgcttgagaccagacatattttgaattttgtagtattttcatatcataataagatatgttagggatggaatccaaatctaaacataaaattcacttatgtttcatatacactatacaaataggctgaaagtaagcttgtatggtattttaaataattttgtgcatgaaacaaaagttttgactgtgttttgagygtaacctgtcgtataaggtcaggtgtagaatttttcacttgtggcatttcagtgctcaagaagttttagattttggagcatttcagatttgggatttttgtattaggaatgctcaacctatactaatttacatacttaaatctttaattttaatttaataattgtgatgaagtcatcaaaaagaagtacaccctccccagggtggacagggaagtcttctctgaagacatgaaattttggctgatatccgtgatatctgccagatattacaggtagggtaccaactcaggggtgaggagctaggttaaattaagaaaattaaagaagcccaaggagccaaagagagaatgggttgagatgagctcaaaggggtaggcagagtctggttttaggctctcctagccactcacggaatattgaaaacaaaatcattgaagtcttattttcaagaatacttaaaagataagatcacatatgtgattttaaatgatgataatagctatgatgtggagaaaaaagaacttcctgagactgggtaatttataaaggaaaggtgtttaattgactcacagttctgcaaggctggggaagcctaaggaaatttacactcatagtggaaggggaaacaaacacgtcttacatggtgacagacgagagaagtgcaagcaggggaaacaccagatgcttatgaaactatcggatctcataagaactcactcaatatcatgagagcagcatgagggacagcacccccatgatcaaatcacctcataccaggtctctcccttgagatgagatttgggtggagacacagccaaaccatatcagaaaatatttcactaataatgatattgactacatatggaaatgataatattttgaacacattggtttaaataaaatgcattttaaaatttaatttcaccttttatactttttaaaaatgtggccattagaaaatttaaattaaatacctaattcacattatatttctattggaccatgctcagatagtgaaaagagtaaggtaactatcccctgaaaattctggttatttctaggaaaatggaatatctctgcatttataagattttttaaatgtatggaaaaatgaaaraatacagactgtgtaaaagatatcagattgtgctatagtggttactaggtttaagaataatttggaggctgaaaaagagaaaaaatgctatcaggtagcaatttttaaattgtattcgtgtggtttgcaatctgtaaatagcaatgtatctcttccaatttagttaaaaaacaggacaagattgaatttttcccgtgaatttcctgttttctattaaatttagtaggtaatgttaagaaaaatttcctttgtaacagcaaagaaagccagtggaatttacagccaagttggtagcatatcaaagtaaaatacctgacacatactaygtacttaataaataataaataattcactattattatttataataacattattagtattcttcagtaactaagctgcattctctggacttccagaatcatctattcaatcactcattcactcagtcmgcaaaaatttttgatgatgatggtgattagaggaggaatgaaatyaagaaactctaaaaacaatttatctattttcaggggtgctggtgagatttgaaggtgatttaatagtaactcaaaatagaacattaactcaggaaaaaaaacaggagcatatatcaaaacaacaatgttacctctttgcacattccaatcaccatttatttactcttgcaaattagakgagacaaattaaaactagatccaacttgaatgtctagctaagtgtcctgtgtctttttttttttaaagaatctacatttgaatatacctcctacagaaattcaaatacaaaatgagctctagagaataccacacatacatgctgcacattaagcaggaagcgaggaaggtagatccgcctggggcaggaaaatgatataattttcctcatattcaatggtatggcccttcctcttcattctcacaaggatttgacctttgtcacaaacacggatggtcctgatcgtgtcactccrgaacatggacgttatcaaggacagctgccggcactcttggtaataatttctctttaaatgtaagtgatctttcctttgaacattttgagttgagatggatgtgtgttcaataaacttattatggcctcttcaaaaatctttaatattttagttaactatgattgatagatctttttgtcacttctctcttctattatagccattattgtttttaaagatggatgtagtatagatgtcactgaaacagagattcattttcactaacactaaaagaaagcatgttctacgctaatatgtaatctcaaaaacaacactgtttcttgtagtaattatgaacattcccaacttcgctttgagtaaagagatgaaattttaaaatataaagtattttctcttaagcaaaagtgtgctaattaataattttacacacacacatatagacttatggacacttatggttctattgagcactgtttgaattttaggatgcaaaataaattagataaattatctagtgagcaagagacaaaatccaggttcttgttcatgcacagtctttttactgtagggtgaaatttgtctcaaaagtgtgaggttcaaattatttatttttcaaaattctcactagtttccattttgctggttatggcctaacctttttaactttgagttattttcaagagaaaatttgaaaaagcagcctttgaggagaaagaagcaatccaacaaacaaaaagataaccacactgtaataggaaatgtgttttgaataggacattggaagaaaaataataatcatttttacagrtagatcccaaagtcaaggatctatgttcaaccatgtgtgttccaccatcttcacaattgartgagyaaccatcattaagcagttagcttaggccgtaatatgattcttggactgagatttcaaaaataccacaggccttctgaaaggttacccctttctagctccactatcatctaattttattaaaaaaaaaaaaaaggaaaaatttgagcttctagagagtaggggctaccattttgtatcccacagggccaaggaacaagttttaatgtattcatttaaattaatttcagtatgagtattgaaatatataatagaaatattgtaacattatatattttctatatacttttattatatagaaaatatatattacakaatatattattaaatattgtagaacaatatataatacagaaaaatatataataytcagtaatatattaaatacttattaaaatagcaagcttatataggaagagtgatggagcattgtgagaaagtttcagctttatttctttgacattactttgtttctgcacaaacaaaagaattacaggaattgtccagattattcaaataactcgaagttgaggagggaatataagtcaatgatgtagaaactcttttaagatttgagctagcctacaatctgtaaagatctgtgaaattgaactatatttgtgctatttccatattaagtcaaggcaacaaatcaatattaataataataacatagcacttctagaactttctaaagagtccaataaagttttgttagaaaggattgtttttgaagttaaaaaccatgagaaattccaggaaaatccacatacctatgccatcatactatcaatcagggcaaaacatgcttgagtctttcatcaagactaaatgattaaggagtggtacataacttttccctgttctgactagctgaacacttccttttactccacatttgtttaattggcatgaaatttcccactccactaaaacagatcttaggatttggacaacacaaaatatcatttkttttgaaaggatttgaggataaatccaaactaatagaactgaaacttctatattatgctgggtagcaacttagttttccctacccttcttcatgctgggagatgaaagagattcagttacggcttaagctccacaggcatacaaagtgaagcagaaaactgaggcacgtgtgcctccattatctggtatctcatgtggggcttagaggtaaattgtcgttatttggcctccatttctgcctttaaccactggtgtaaacaaaggttactgtgccaaagttgacagcaacccaaatccctttggcatgtgaattagtttcctctgccatactgctagttccaaattccttctggtttcaggatttaggagtcagggttgcctcatcttctcaaatgagttacagtcacgcacatccctacrcactgcatggttggcactagttccttgatatatgttactccgtttgatcctcatgaaggatcaaatggggaagggagatactattgtctctgattgtccattaagatcttgagtatgttctacttccctgtttgacacactggtttgaaaatgttgctaagtcttcccaacaatgacagatactcagtggaaacatgaaggattccgtcaaactggttattttgcatcatgtagaccactatttcccaacctgcaagtgcatcatggcctttggtgtgtcagggacacgccttgggtgtgtgtctcagtctaaagcttcctccttttcacaagcttcctgtttctcatctctctagcttctaactgtcactgtaatcatctcttactcttcagcctgatgtcaaaagcaaaagttcagaagttcctcatcaataaggagtccttgtgagcaggtgaagctcatctaactaggtaagatgaagatctatcataaccaggaggcaggttggaaggtgccagttgcactggcagtcaggtgcaagagctctgcagtgaggctgcctgagtgtccatcctagatctctcacctcttggctctgtgaccttgagcaggtcttaaatctctctaagcctttgtttttttaattgataaaatgaggataataatagtaccaaaattagggagattttcagagcttaaataacataygtgaactatttagagtaatgcctgccataaggggactcagtagcttattattagtttcatacaatttgaaaagtttcataatatttgcagatataagatgatcttcaaccagatagctaatgtatgcaaagctatttagcttcagaagtaaactctgcatttctagargttaaatattactttgttatagtgaattatctgtaatatttatctcttgctcacttttataagaaaaatagtgaaagcatttattaagaacttacactgcactaaatgttatatatgacttaatcctcactataaccctatgagataggttacattattgtcctaattttactaacaaggaaaccaagagacaaagctactaaaacacttgcctgaggttagacatcttcttctgtggtgaggctggatttcaaatttagaccatttgactgtagcacttatatgatgagcaygctgtttagtgttatagtgttggtctacctttgaatagacatacttttaaaccatggcaaggaagtgagactgcacattgaaataygyaaaatttgcctttgggtgccacgtgagaaatartcacatcactagaaactaatcataagcttttgtgtttggttaaagttttattgatccatttttcttgtttactttgtgggatactgggcttaactaggggatacctccactttttacttggccatggtatgaaaacctgtcctctgaatctttagatattttgkcaaattgtaggcaaacaaagacttaaagcaattcaaccttgattaaaataagaccaaaaatgcctccatacttgattaaatttatttcattttaggaactggattataatcaagacaacttctacatgaaaaaatagattaatagtgctccaagttagttcactgtatttattcctttttatacattatctgccttcggtgttattcaagttttcattaatcattaataatttcactaatcattttatttcattaatcaacattgatagttaaaattaatctgtgaatattaaatgttttatgccaggcatttctatgatgtggctgcttttaacaacaacttgtttgatctgtggaactttaaatgctggtggattccttgatttggaaaatgaagtgaatcctgaggtgtggatgaatactgtaagtcatggaaaactgtgaagaacatcaaataaagcaggactaatggagtatgaggttacgaaaggtcctgttgtaacagaaaatctctgataaaacagataaaatgtagatggtttttaacctctgcaagagtcaagctagttagatctttgtctgaaaaacaaatactgtccggtaatgaaaaccaaattgtgctattgtgctatctatctatctatctatctatctatctatstatctatctatctatytadctattyawctatctatctahagatagaacctcctcttttgaatttatgttttaagaatatcaagctatttgttgatrtacatgattgccttctattgatctatagttctattacttttaaagcaagaggggtctcaaaagacaattgacttgataatatagctttgtcagaaagaatgggtcaatgctaaattttcccccaaccccccaaaatattagccaatagtagatattttttaaaattctacttattttgtattaagactttatttattaattttacagttacctggtgctacaaatttcagataattcaccctaataagcacacaacagatggtttgttttgattcctttttatatcctttggagaagttccactaacgactgtatttttacygggcagagtgaaatcatcatctacaatggctaccccagtgaagagtatgaagtcaccactgaagatgggtatatactccttgtcaacagaattccttatgggcgaacacatgctaggagcacaggtacaagatatgtctctcctgaaaaggggactgcattgacctcctgcttctcaggaggaatttaatgctagatatgcatcaacagagtttatcaaaattggtttgaattattggattagyctttaaatagttatcagggaggctcactctttgcctgataattctctgaagacagacaggaacctaaaaatacaaacagcaagactgatcttgctaactgcaaccagaggtacttgttagggtgtaaacagaaaggcagagcctgcattttgtcacctcattactgatttatcatgtggaaaattgctttgtcccaggaaaatggatcctctcattgtcagaaggagattttctaggttgtatgaaattgactctggggcacccaagaagaacctctcctgctcccactaaaattaaggggcctccctctgcaggataaaaaacaatctagttaaatgacaacgcatttctgaaaagttttccaggactgaaaaccttaacatccacatacactttgatctaagggacagacggttcatagaatgaaagagtatggtgtcaataaggcttgaattctagaatgaggagccagccatgccatagcaggggaatgatactccttaaaagggaaaatttaactacaaatcctctgaagtagaaatgatragaataaccaaaatatctgcaatggttcaatagcaaataatttattggcagctgcttaccgtgttcattttgcatcttttttcccaccacacatattaaggagcagctgargtcatgtttgacattctctccctcttttatctccagtttcagaatgaaaaatgagagtgagatatgagtagttttactagttaaaatatgaaacacccagttaaatttgaaggtcagataaacaacaaataattttgtataagtctcattttaagataatactaaaaagtcattatttattcactattatcactatttataaaattttgtagagcatcctggawctttttgcttacttttgtttttattttttgctaaatctggcaatcccaggcacatgtgtgaaggagctgtgaaatataaaaggagaaaacttttatgggaaagatttggcttaaggagagataattttggaaagatttagaattaaagatcattcattagatgtaatgttctaaatactttatatcagttaaacttctcatcaacaatatgagatgggtaccactaatagtcaccatttcacaaatgatgaaattaaggcacaaccggttatgttaagaggcctaaagtccacaaatagcaagctgacagaccagaatttaagcccaggcatgctggctccagagcctgtgctcttagtcattaaattatagtgccttacttgaccttccaccctggttctttggatctccctgaatgctctctctccctcagaaatctggaagttggcagagggacactgagctgagcatattattgtagtttttaaatgctctccactggacagargatggggatttgaatagaaatttggtgaggaactaatcagtgtccatttacactcacctcctcttcctccctggaagagctataggacttgagtaagcatgataaatttyrtgtctttgtaaaccacacccaggaaatttgtatatacaaatacatagagcacagtagttatcaggacagactttgacataaaaagaactgggtttgagtccctgctctggccttcttatctgggtggccctctgggaaagttacttaactacataaagttttgtttccatatctacaaaatgaggtttctcaaaatagcagctagtttatagagttgttgcaagaatttagtaagctaatacatataaatacgtcaacatagcaccaggtacaaaaatatgtgctcaagaaactgaagttacctgattataatgctctatactattgacaagggaaaagtgaaaacagtttttgttttaccatgtgtgtatgtgtgtgtgtctgtgatgtttccgacatgctctatttaacataaattactctcactctttctctctctctctttctctttctccctctctcatcttaccctttcccccaccaggtccccggccagttgtgtatatgcagcatgccctgtttgcagacaatgcctactggcttgagaattatgcyaatggaagccttggattccttctagcagatgcaggttatgatgtatggatgggaaacagtcggggaaacacttggtcaagaagacacaaaacactctyagagacagatgagaaattctgggcctttaggtaaatattagctaagaaaactcaagggggaaattggaggcaatttwaaaaaaataacgtggacgctattaatgattatctttgacgcttraagtcatatagctccttgtagtttctgttaagatctcaaaggagggtaacagcaagaagctctgatttttcactgattctcccacargcaaagtatggcatttcaacaagatcatttttacatccaattctgtgaattctatgcattaaaagtatgtccaaagagacagctcaggaaattatcatgaccaatgtgcacattcattcagccaatgtttactgagtggctactgtatgcgctgttctaggccccgaacattcaaacagggaacagacaaactcygacctcacaaagcttatgttcattttagtgataattttacaagtcattgctcctggatkgccaatcaactgtgtaaagatgatttggaccaggaccttattgatttagagaaactgwgattgatttagagaaactgagatcgcacatagtaccattttcaggaaaactccaatattagatttttaaaaccttkttaatgggcaatgaagaagaatcttttttgatatcttgtttcttttaatggaagagttttctgctgtcaccagaggacaggctgatgcctgcgatagacttttctttcttcaggcctaagctccctgttggtttgtaaacctgatgctagaacagastgtgtattcctaytacattaataaaacattcagtacccactgaaagtttgagaatagtggaggaatagaatagaatgttatagtctgagttcttgggcaggggcaagcatcaggaaatattgaatcattagtctttaggaggtgtcacaacaattctcctattcttgtaagtcccaatctatagatttcctcacatgttcttttaataaacaggcttctagcttatggaatacytgatttgactaaatgttatataggcccttttgttcctcctgtctgaagaacaaaatactagtactatggaatattggtatatattaaatatatatctatatatccatgtggacaggaatactactactaacaacatcttactgagcacccactggcagccagagtcgtttctttcatactattaaaccccgttagcagccccgtaaaccaggtactaccctgtttatttcccaaatgagaaaacataggctcagagcatttcagtaatttctcaagagttgcaaaggccataaatagtagaatcatgatttacaaaacccctgtttccaaagatgggtattaaatggtcctaacaattgtgaagcctcatgtgggagtcagaagtagaggcacacaagccagatggggaaagggagggcaaagaaaagcaagagaagggaaggaagaggagggatcataaggttgaacttcaaatatcatacacaagtttcgaaagtgttcctcttataaggaagtaaaatgtacatatgcagaaaaacaaaaagctacaatagcctacatataattggataaataatgaaatacacattgaatctaagtaaacagcatagaatctgggtgtaaaaaagaagtgagcaagtgctctgagttttaaacttaaacttgcaagtatttataaaagcccctgttttattttgcagttttgatgaaatggccaaatatgatctcccaggagtaatagacttcattgtaaataaaactggtcaggagaaattgtatttcattggacattcacttggcactacaataggtatgtttatgagggtcactgttaggtgtgtttttgagggtcagttttctcagagtcttacaggagttcacctttatgttggaataaaacaactgttacttatagtgccctcaattccctgtcctctgctgggaataaccctagtactctaagtagctgtgagcctgcagtgcacagactatatgtagggcaaacctttcctgggtctcwggtcacagcagcatattgaytacggtgatgcaayttcccaggaataacatgtgttccaaattcaaagaaataattccacagagtaagtttctagattccctctgagctgaaaaagtaaaattcaatgccatggaatatggctgaaacataataaatgtgcatcaatcatctctttctcacaacccaaatgggatttttaaaaaataaaagggaagggcttatacctatatttaaacaaaytgaaaaggcatggttatatttgtttgtgagttggaacacacaagcttactataataaatcaattgagcttatctattcagtgtgtgatttagtatttatgaaatagcaagtaaatgtaagcactatgtagaaatttctaaagttttttaagctgacaacttacttcttaatttacttactttacttaatttactttacaatttactttccagrtattttggaaagaaatcaataatctagttccaagtaaaagttgaaaggaacccacactaataaaagctttgaatttgtcattgaacttccactaaagtttccaattttaagagaataaatcatgtgaaagtgcaatatttcagtttagggaaatattttcattatcaccactatcatcagtaacaaacatatattcattagtattttagattgacaggcactttccaagctcagaacaggcagttagcatcagtcagcatatactaaaaaagtatcaaagaactcataggagatcaaaaatgccaccaataggcaaataattacagtatctaacacttattgagcattcgttatgtgtagggtcttgtgttcaggaccttccccacagtatctccctctgatcttcaaaacaacccgaatgttattatccccatctcatagaagaagaaacacaagttcagaacacagattcaaaccagatgtatctgatttcaccaatagggtgtgtaaggattccggagaaatggtgtagagaagaagaaatgactttagttggttttggaaagtgggtaggacttagatatgctcttatacttgatctgcaaaaaaaaaaaaaaaaaccatggagaatttgattatctgtgctctgtgtttcatttaggacataaatatttttagtgactgttgtttgcattttggacagagcaatttctgttatgtaaggagcacccactctttgtaggacatttagtaggtcccagcccattaaacagggctctgcagtcagcgtgaccctcaaaaatctcacctccacacatttccaaacaccctctggggaagtactattcctgattcagagtctttttatcaattgttcagtcaattatttcagttcttctttttctggccaagacagttttaatgttccaacaagtgtttcagtacacacayacacacacacacacacacacacacacacacacacacatgcyagtggaggcccaggaagggacctctggaaaccaaattatatggatattctccctagcctacccagtgttgtgctaatctccatcctcacagatatacaaaggggtgcaatgctactgctgaaagagcaaagcaaatggagatgcctggtccttactgggccatcgtggatgctagggaaagcccctttctttttggaaacagggaagagtctagagggttgaaaaacacccagtaagacactgggagcagtgaaatttcattccatagtgagaaagaaaacctgttagaataactgggtgatgctgcagaaagaaatcaattcacctcctgtgactgattatttgcttctggaarctctgtgattcattctggcatctcagagttagggatgaaatgagaatgttgccagcatttaccccatgcttgggaagtttacacagcagtagctactccagcagcttaaccatcacctttcccctgccaactactccatttcccccaatcaagtcaaactgtccataaatagaataaaataaaattggagacttgagagcagagaagactgaaggcagattatctttatagaataactcagaagacttccaattcatccccagtatgatcacgatagaaggaaaaaatgactaagcagagccccaattttgttagaaacantgcgtaagtatttatttttacaagattgtcttatctcctgttctctcagggtttgtagccttttccaccatgcctgaactggcacaaagaatcaaaatgaattttgccttgggtcctacgatctcattcaaatatcccacgggcatttttaccaggttttttctacttccaaattccataatcaaggtaggctcctttcaacaaaatgtacctgaggatctcattttggatcataaatccttattattttcaaatctactgtaaagtaaaagtaggaaatttagataaaatctatagaacttagactctgtgggtatgtgcttgtgtatgtgtgtccctgcgtgtgcgcatgtctgtgccatagtatctgcaggttctgtaatacaatttactatacaaggtcatcagcaggctgagtatatgtcagaatttctagctgaactgagtgctatatgacaacaaggatttttcttgttttcccaagtgttttttkttccatttagtcaggtaggtcaatgaattcacattgcccaaatgaaagacacttcaagttacccataatcactgatgtgtccaattttgacattagaaaaacctgattaatatattccttccaatatggaaacttgccctaataactaaagctaagattccaaagcctaaatgtattacagctcaagtattaattcaaatatttattggttatttttcaggagttgaaaaagtcatttggttgccaattgtggatttgggattttatctattaaagggttttttttttttttctctttgcttttgtttctctacaaaggtcattgccacaatgaacacagcatttaatcaaattccagattggcctttgaacttgggatgatggataaaatggatttgggccaaaattgaagtcaaggagaccagttagaatatcaaaataattcatatataagaaaatgagacgttggtttggggtagagtggtaggaatgaaaaaaattatttgtgagctaacacaaggaataatttccatagggcctaataatagttaggtctgataatactatggtctgataatagttttattgtattgtttactgagagcacaaatgatgtaacttccttattcaagagcttttctagtttatttaaaaatgtgttgacatcagttaggttttaatgttttctatatttggacagtgtgagcaaactaatttgttaaattaaattcagagagagatacatctatctgtaaatacatatatgcgttgtttgtgttgctcttcctacataggtcagctataaggcaaataatgttcctgggttatctcagtttcacatttcccactgtcaatattcctgctacttttaagtcccatatcctgctcttttcttccgtcagtttcccccagaagctccaagaccccaccaggaatccccatccaagtttactttcccaactcctggaagtttcaattgtgctgcctttgtgacattatcatatcttttctgttcaatggttgcttctctttggctcactgttctctacttttcagcctgagagctggctaatctgggacagtactcgaatgcagtgtacacatgggtaacatggaaaaccccgattttcccttatattcaaggtattatttgaccttaagaaaaacygttytacatttcataccaattaatgagaaaaaaatattggcaagcactgactgggcagaatacagggaagcttcactatggagaagtgaatttgggattgagggcctttattgcaatctccttgtaaataatatttgatactcttcctcatctggagacacattcctaagtaacttttcctgaataatttggtctccttgactgaatcagtaagtacaaatagatccccaagcatggctctttcctagaatgaaagaaatgtcaagaagtctgaagatgattcttgaattttggttttttgctattgctatttgggcttgttgtccttgttgttgctattgagttgagctccttatatattctggttactaatcccttgtaatatggatagtctgcaaatattttatctcattcaaagataattattatttactttcataggctgtttttggtaccaaaggtttctttttagaagataagaaaacgaagatagcttctaccaaaatctgcaacaataagataytctggttgatatgtagcgaatttatgtccttatgggctggatccaacaagaaaaatatgaatcaggtatgtatgataattatagggccatttgataccttaagaaattccagctttcctttgactcattttgatatatctatttactgtataaattcatatggtattccaaacccttaaagacagatttttttttgcttttaaaaatgtttatgggtatataatagttgtacatatttatgagacayatatattttgatataagcatacaatgtgtaatgaccaaatcagggtaattgggatatccatcacctcaagcatttatcatttctttttgttagagacattctaatttgactcttctagttattttgaaatatacaatgaattattgttaactatagtcatcctattgtgcatgccagactttagtccttctaacggtattttggtacccattaaccaatgcctctttatccttcccccwcccctactacctttcccascctctggtaaccatcattcttctcactatctctataaggtcagtttttttttaaactcccctatatgagtgagaacatgcagtatttgtctttttgtgcctggcttatttcacttaatgtaatgttctctaatttcatccacattattgcaaatgacatgatttcattcttcttatggctgtctatatgtaccacattttatttatccactcatctgttgatggacacttaggctgatttcatatcttggtcattgtgaatagtgctgtactaaacatgggggtgcagatgtctcttccatggattgatttccttttttttttytgaatatagacctagcactggaattgctggatcatatggtaattctacttttagttttttgaggatccctcatactcttccccatagttcctgtactaatttacattcctaccaacagtctgtgcaagagttctcttttctccacattcttgtcagcatccattattgcctatctttttgataaaagctattttaactggagtgagatagtacttcattgtagttttagttcgcatttctctaatgattagtaatgttgaacattgtttttaatgtacctcttggctatttgtatgtcttcttttgagaaatgtctactcagatcttttgtccatttttaaatcagattttttttttgcaattgagttatatgacctctttatatattctggttactaatcccttgtcagatgggtagtttacaaatattttctctcattcaacaggttctttagttcactttgttgatggtctcctttgctttgcagaagctttttagcttgacgtaatctaatttgttcatgtttgctttggttgcctgtgcatttgagggcttacctcaaattggcccagaccaatgtcccggagtgcttctgtaatgtttgttttttagtagtttcatagttttaggtcttaaatgtgtctttaatccattttkattttgtttttgtatctggcaagagatagagatctaatttcattcttctgcatatggatatctagttttcccagcatcatttcttgtggaaattgtcctttgcccaatgtatgttcttgatgcctttgttgaaaattagttgactataaatgtgtggrtttatttgtgggttctttattctgttccattggtctatgtgtctgtttttatgccagtatcatgcagttttgattattacaggtttgtagtataatttgaagtcaggtcatgtgatgcctccagctttgttcttttttctcagaatcttatatttagaaaaacstaaagactccaacaaaaaacctgctagaactgataaacaaattcattaaatttgcargatacaacatcarcatacaaaattcagcagcatttcaatatgccaagagcaaataatcttaaaaaaaagaaagaaaaaaaaacaagaaataatcccatttataatagctacaaataaaataaaacacctaggaataaaccataccaaagaagtgaaagatttctacaatgaaaactataaaacactgatgaaagaaattgaaaatgacattaaaaaatggaaaggtattccatgttcatggattgcaagaatcaatattgttaaaatgtccatatgatccaaaacaatctacagattcaatgcaatccctatcaaaataccaatgacattcttcattgaaataaaaaaaaagcctaaaatttaagtggaaccatgaaggtagatgtctgctatacatagaagattaagtactcaacaaaccttgaatatgaagactggggaagtgaataggcagcttcactcttctattccctggtgaaatttaggagaatggatgttttataatgggtagcagtttcttacatgttctcaatcagccataacttactacagtcaatttgaatttattgcatttgaatatattggattaaaaataaaatcctaaaaaaggagagaagcacatataaacctgcgtcttatttcatgtgttcctttctttgtgggtgacttttgttttgaartaaaacctgcaaaataacaggacagggtggaagggagatgggatcccctctttatgaagaagcagcagtcctgttttatcacctcttcattttctgttattgagaattcaagaagaaggaggaggaagagttcacatccacagactggtgtggttgaatagttgtctctactgtattccaaatagcagccaatgaggctgttacagtgaagccagtcccaagataattgttctgtacccctattctctaagaagctaaattgtgttagactgaaacccataaggaaccattgttcaaagttggcttgytcaaaagtaaagatttttaatagtttctcttaattagattattttctaagacatagaattatgattactattttatctctataattttcatctctataacgtttacaaatactgaaataacctttggaaaaaattggcytttagctttacttttgcaatattttattttatccccataaaagcctaggaaattggtactatgacttttagtatgttcatttaatagatgaaaacacagaaactcaaagatgttaaatatggtggccaagttcacaaagctgatcattaacaacaacagggcctgaactcctggttttctgatttaatctgtgacagtgcacctgggtgcgcatgcatgcatcacccccacacttgcacatagaacctttcctagttggctttgctccatgatgaccattactgttccttctacttcaaaataagcaaattatcctacagattcagagctggtacaggtgtgctgtcaagcagcccattccattagtcagcttgtggttcactcacattaaagtattgacctwaatggtatatttatctagataattctaccttgttattttcaaagccccartcttgtttgctaattctgtgcatcatttttctctgattctgaaaggcaaaattttgttgggcaattgctgtaatatgagttttatctcctttagagtcgaatggatgtgtatatgtcacatgctcccactggttcatcagtacacaacattctgcatataaaacaggtagagtcttagtcatggaaaaccattccaatccttattttcaatatatttaaaaagacagaattgaccctgttaacaggcctaccctaagaatcttaagagcttgcttccagtttgtccttgctgccttctgtatgccttgatttccctggaatttaagagaaaggatgttatggtacagaccaagtagatgacataaatgaacaccaccttaaatcagagttttaaaaataggccctgaactgaagcaagaggtaaactagrgaagcctcaggagaactgagacttctccagagagaagtatctgggatttaacttctttctaatgaggcttggttttccatgaacttttcctttaaaccaaggggggtattgctcatctttctgttgagccccrtttgtcataattgtaaaatgggtggttacatccttctggtgatctaggagccctattttcgtcctagcatacagcatttttctaaaatktgctgttagctttcatgattcttaccytaactattctttttctaaaaaacatttgtttcagctttaccactctgatgaattcagagcttatgactggggaaatgacgctgataatatgaaacattacaatcaggtgagctatttacagtaaccccagcatgctgattttgataaattatartaaaaaattatttgagggtggaaagactcctacctgtcatttggtggcatttatactgatagaacttttttytaaaaaaattttaattttaattttaatttatttcagaaaatttataaattaaagaagcatatacaaagaaacttacatcatgtgtaatccttccatccagagataactagatgtactaacattttggtgtatttattccaattttctcagtattatattgcttttagacaacttttaatctttctattttacttaagctatagtaagagataactaatataactgagggatttttaaatgcatttttaatggctacataatagaaattatttcataaaaatctttacagcataaatgaatatacactttttaataccaacagaaaaattagaattccatatgaaagttgaataagtattacccaacattgaagacttgggtcgtaaggcatctttctccatatagctttatgacataaaaatctgtagccttgtttagcaccgtacttttaattaatcctgtcaccatttttctgttctcatagccaggggcttggcttataagtatgaactaagcaaactaaattaaattgttttaagtattttcccaggctatcatattttaagctatttactggtgcaactatagattattaataagttgtttctgaggatcaaaacaatcagactaatcaatttctcaataatgaattggcctgttagaggaataattctactaatccttaaaaccactacaagagatagaccatgtatattttatttatttttaaaaataagtttaagatgtgatttacatacaagaacattactaattttgtgtgtcccatttaataagttttgacaaatatatttatttgtgtaaccacaccacaatctaaatataggacgtttatatcaccactaaaagtttttttcctgctcctgagactatttatagacacaaatgcgtgtatttgcaaatgcttagaaaaggtctagaaaaaaaaacagtaaatgttaaagtggttatcttcagagagaagaaagaagaaaagaagtggatggacatgaaacagtaaaggaccctcattttggactttacatatgtctgttttcttccattattttgaataaacatgctatatttataaattatttacatttacaagaaaatgaaacaaaatcaacacgcacattcaagatcattatggtcaagtactaaagtatgtgagagtgttaatgtccttagaatttgtccacagttagctggtcctactctgctccaagccggtcctattttgtgaattaatctcatttgatgccaatttttattacattctctccaaaaaactagtctcaacagtttgctctctcctcaagttcacagcattatctctgctatatctatattttattgagtataagagaattaacccatgtaagctccatgagggtagggatttctcatcrttttgttcaccagtgttttctcatctkgaagagtacatgacaattactgggctcccagtatctatgtgttgcattaatgaaatttcttaactttaatctacctcaaaatgtctctatcttcttgattctctccttcctttctctatcagaaaatgatggtcctcttattttccaagttattccggtcctgtgcccttgatcccatctcttctcacttccccttccttcctgcctccattctcctgtcccttatgaaaaacaagcaagaccatcaattctatcaagttatcattatgtcactctgttcttatcaacatatttttagtattgaagagggcttcttctacttactcctkaaccttgtacaatgtagtttaggtcttcatctttttatcatagctaccttatttaaagtcacccatggcttttaattgccaaattcaatggcctatcttcaccttttgaaatgtgttatgttcgttaccacagtctccttgaaactcagtcccctgacttggacttccataacacaatgatttctgattttccttctgtttgtgattgttccttttgtcccaggcactggctactccaccttccacctctctgaaatcattagcattccccaaggattcttcaaaactctctttcttccttggagaagtcagcatagctttaatttggaccatttctatggcttatctagattttttcaggacttgccttcaacctattctttctgtaggtgattccattaactgttgcccatatggtagtcygaagacagacctccgagaaatgacccttgtctccaaaacttccgcaatatgtccaaatttcctagcctgacattcagactttgattatctgcctccaagtttatatcctatcatattcctttayatattctgttctccaggtacactgggaagcttgccattcctgatcatagcctacaaactcttcctgcytcccactcaccctcatctctgctgtcaaaatgcaaccttccctcaagagtcatttcacaggacccctctttctatgaagccctcaggtggaaataattttttgcctttttttccattttatttttggagtgtttatggcatttaacataccttactttgtatacaaatatttgccttgctccctcttttgcaaatttcttaaaggtagagaccattgtatgttttcttcatatgttgctggtgcctaacagaactatggccattgtccacattcatttagcagcctttgtagttattgctttgaggagcttyctctcatgaatgcccttgctttctctcccacagagtcatccccctatatatgacctgactgccatgaaagtgcctactgctatttgggctggtggacatgatgtcctcgtaacaccccaggatgtggccaggatactccctcaaatcaagagtcttcattactttaagctattgccagattggaaccactttgattttgtctggggcctcgatgcccctcaacggatgtacagtgaaatcatagctttaatgaaggcatattcctaaatgcaatgcatttacttttcrattaaaagttgcttccaagcccataagggactttagaaaaaatagtaaccaacaatgaggttgtcccccagcaccctgggggagatgcacagtggagtctgttttccaagtcaattgtgttagtgttatttatgtttagagacatctttgcatgggaccatctacaggtccttataaacaatgaggtagattaggcaaaaagataaacaagttgctactctatctggcatttaagtctaattaaattgtaatttttagggcataccatgaagtatagaaatgtctgaagcttcaaaggaacagtgaaattcctttaaggtcctatatggaaacctctgttgtcattttatttatatggattgctatggcaatggacagagtgtgggattaggaggagggcctgtaacttctttataaaagtttcttagctatcctgaagacgtatagacatttttacttttttaggtattttcaacatcagaaattcaaaaaagtccccaaagattcttccagagaagccctcttttcttacaatcttatccctggctatctgcgtaaacggaatcttgaacccataataggatacatgtataaaatcttccttattaaagcagaaataaattgtacagcatcaatatcattttataatcatagggaggcttctttgtttagcatgtaatgccccctttacaggctttttgttctttgaggggtttgaacattccatgaaaaactgacagataggaaactgacaataaaagattgagctaaagatggaagcagaaagtactaggctagatagtctctaaacattaagtattttcttcctccatcttaaaagcaatgagaagccaccaaaatattttacctaatggaaacctgattgccgcatttttgtaaccaccactttggctgctacatagagaatggattagaagatgccaacaaaagattctgagcaagtctgtaaatctgatcaagtgttctgatgcaggctgatatccttctgtgctaagagagatgatccttggaaaatccagagccagctccataatactttcctgctctgctggcaaatccacaagctgctggcccctggagccattcttctctcaaaactagcattcatcaatttaatgtatacgtattgatggggaataatggtcactatgaaaaccatgtgataatatggaaaaatacccatgatataatgttatgtgaagagragaaaatgaaactggtagaactatgtgattgcaaatatatacaaatattaaaacaattatatgactttataaaatatttgtatataatgaaaactgaagcaatataaaaaataaaattagttgtgtcagggtagtaacatgatgagtgattaatagtttttaatttttaatatagtaatgacataatgttacaacttgtccaaatctcacaaacataatattcagtaaaggaagataaacataaaagaatacatattttattatacatttttatgtaggctaattgatggttctgaaagccttaaaaagcttacttttaggaggagaatcatgccttggaggactctagggtccagaaaaatgtcctaatactagagctaggtgcagtcagattaattataatacatttcattattttgtctggaataccaagatgacttccaagcaggaatggagtctagcaacactttactgatggggaacttggccacagacttgtaatacaaatttttggatatgttgacaatgtttctccttatttttcttacttatacaaagcaagaaatttggctcacaaccttgaaacagacttaccaggttcctccagtttcccaagcctcaatatctcattgctatttttaatagaacaaggtaaataataacatgaatgttattcaatacaaattgatgtcaaatgtaaattctgactcagaacattggtgaatttctttcaatcggtataatcaatcagtttcagagaggcgaagtcttgctcaagtgacagcctttttgagactcattaaccaaagaacaaggcacgtgtttcaccatcagggctttgttcaactttgatcacctctgcattctcctctcataggaaggttacccacattttccaaggtctggccacaataccaccatttctgaaacgttttgcctgaactatatgttctagaattactgttccctcttctaaatcactttttttttttagacagggtttcactgttgcccagtgaagttgcccaggctggagtacaatggtgcgatctcagttcactgcaacctctgcctcctaggttctagcaattctcctgcctcagcctcccaagtagctgggagtacaggtgcccatcacatgcccagctaattttttgtatttttagtagagatagggtttcactatgttggccaggctgatctcgaactcctgacctcaggcaatccaccccgcctcggcctctcaaagtgctgggattacaggcatgagccaccgcgcccagcttaaatcactttttattatgcttctgaattatctttttggagagttctgtgtaagtctactgccctaataaattttaagtagcttgaaaacagaagcatttaagatatagaactctccattaccacactaaattcacttttgctattcctttatggtcaaccaccactaccaccatgaccagctctccttgaacttgatccctgacaacttatctgttctccattgctataatgtcttataaataaaatcatggagtatgtggccttgatattggcttttttttactcagcatgatgtccttgagatctatccaagttgttgcatatatcaagtttgttcctccttattgctgaatagcattgcacggtatgcatgcaccacagtttgtttaactattcactcactgaaaaacacgtgggttatttccaagttttggctttatctttttggtgtttcactgcttaatggcatgtcttgaaaataaaaaaaaaaacactccgctcagattcattaatttgacttaattgcaagtcccacccaaagctaaattttctgtgctaataccttttgtaatctgtacactgcctcaagggaaaatgttactcaagtcagagttcccattgacttgactacacaatccttgattcatattttaatttggcatttagagattgyaaaacagtgacgtggttctcattacatttttgagttctaatgtgatttaagaagtgctttggagtagggtgaaaacagattgctagtatttataccttgattgactatgaagtccttcctccagccattgtcaagatgtgacatgtctttagctctgtcaaaacctccatcagcatcatcatatctcccacagagccaaaccaaataaaagtaatcacagtaataatagtgtgcaatcattaaaaatctatgtgaagtattaatataaaacaccaacaatttttagtatatagatataaaaaggtaaattctataaaaacagtacgctttctatggaatgcaccttcaagaaagtttcatcattctcctccattctatttcctataagattgtccataaattccatttatggaggaattctggagtcaaacctttcttctttttgtaccttctacacatattggccattttagttggtgtgtgaatttctttccttatcaaagcagtcaacttagctaagaaagattatttatttgggatatgatgtggccttaataagcttaatcaaaataagcacttgtatggtatttgatagcacaacagggtgactatagtcaataatttaattgtacatttaaaaataactaagagtataattggatggtttgtaacacaaaggataaatgcttgaggtgatgagtaccctatttaccctgatgtgattatatattatatgactgtatcaaagtatctcatatatcccataaatatatacacccactatatacccccacaaaaattaaaaattaaaaacaaaataagcacttaaaaataccttccacatcctgccactctacccctacctcaaagagaagattcccaaggaaactctaggtaatgaaaacctggtcctacagtctatgaaagtatgacttcaacagtgtgtggttcagggagttctgaacattcaaaacagaagcaaacaaatcagtattggggtgaagccaagggaaaattactgaccacatactccacaagacttgtctcaggtgtacatggaacctgagaatgtttaatgttataatgaaatacgtattcatattacaaagttacacgtatattttaataattataaaatgcaaatatcgtaagtatagtgtgatactcaatagcttcaagtgtattttttggcattggcataatacatatgtgtatttccatagttatttatatgtatctaattttaactttgttttccacttttttgatatacctgctagccatttgatatgtttcaagtaatttttttcacgaagaaatatgttttaaatattgtttgcacccttgagtgtctgagaatgttttttgttgccttaacacaaaaggttaaaacatctttctaccacaaaattctgtagacatttctctattttcttccagagtttagcattacaacagaagtgtgtaaagtcacctttgtttttatctatttgtaggtaacccgttgtggatttttagaaaataattaactttctgcttatatrcttgttttatattattatggtttggttttcatctctgtaatgaaatgaacttagcaagcatatttttgcaaaggtatcccctttgatttcaattttgcagcgaactctttcaatctgcacttacatgtttcttcaacccaagttttcttctatcatgccttcgaatattgacatcaattccttttcgtcctttgttttaatctagtcaataatctgttacctatatgttttttcaatgtctaccatcttctctgtcaaagattatttttatttctttgtctttttctctgacctgtgggcttggtaatcaagtctttctcaggatcactaacgtacttctatgcaattctgtgctttacagtctccagtgtgtttaatcatttttagttttctttcagtttttctttatcttgtccatctttctttatccatcaaactcttgcatttttattatgaacaattgcagacctgcaaaaccatataaaatacactacactgaacatctatatttactaccagggtctggaaattaaacattacaaatgaagtttgtctcactgcatcaattttggtatgtttttccaggatattgtttgtttcacctaaatttatgtatctttctatgtatgtatattaatatatgtattaaattgtacatatctatgcatatatttctggataggtgtatgtaaaatattacatatgaaagccacctttttgaccttttttctttttatttcataccgtattctttttatttcagtatattcttgtttcttatattttattctgagtttttttaaaaaaaatcttagcattagctgtgctaaaaaatgaaagtactccccaaagaagatgcaatatttttatcagctgcgattcacatgtggccaggcttaatggtaaccacatccttcctgagtgacctttggagatcatccaccatctcaccataggctggtaaccatatttctcagcttactccacgtgttttcttccctttccagaatgggaaaacttgtgattggaagtcaggtatcttaatttctaaaagcaagcatctatatctgtttagttcatttgatttttggaggtttattttgttttaccttgagcaagtcacattttctgggcctcattgtcttccaacataaaacaaaataatctgattagatgatttttttctgttatcttcaaataagcaccttattatcaaatagttcagtatcagaacaagattcctaa

SEQ ID NO: 94701 - DNA, 59673 bp, Homo sapiens
  misc_feature (1)...(59673): n = A,T,C or G
agctgcttctgccctggacctggttttttgttttgttttgttttgtttttttttgagatggaacctcactttgttggctcactgcaacctccacctcccatgtgcaagcgattctcatgcctcggcctcccaagcaggtgggactacaggcacccaccaccacactggctaatttttgtattttagtagagatggggtttcaccatgttgactagggtgatcttgaactcctgagctcaggcaatctgcctgcatcagcctcccaaagtgctaggattacaggtgtgagccactgtgcccggcctgccctagatctgtttaactggtcctcaatttggtcaggtgtctgagccctgcctccagagtaaggttcaccttcctgagtccagtcctacctcctacctcagaactgttaggtagagatgtgaaggagtagggagagaagggtgttgctggaagggagagtagcagaggctggaaggagcatggcaggaggggaatggtgatggccttagctgaagagacaaagaggtgtgttgtgggggatccctgagaaagatctgaggggtacattgtgtcaggctctggagccctggaatggaagggtataaagggtatagggaggctgtaggagctattgagagcactgcagcagggagcagcaaggtgacagtggtgttttaggagggtgaaactggtgttggtgcatggggtaggctggatgaggagatcgtgtgtaaagcctgagagctggactgacaagtggagaggcctgaatcctaagatccaggcaggggcctcagtcgggtcaaccagctggtagggaaatatgaatggctactttctactcctacagagactgccaagctgacctgatatttcaccccaatcagaaacaagaaatgggaatttaaaacacacacacacacaaaatgtgttgcttcacactctcatcaccatattataaaagttatacatcataattgcagaaatttggaaaacacaaattactaaaactaaatatttttaaactgtattttttaacctaaatgaggctgtatttttggcatgaatatttttctataactttcctattattatttctctttcttctctcacttttgacaatgtccgtcttatttttttatttttagatggagtctcactctgttacccaggttggagtggaatggcgcgatcttggctcacttcaacgtccgcctcccgggttcgagcgattctcctgcctcaccctcctgtgtagctggaactacagatgcgtgccaccatgcctggctaatttttgtatttttagtagagacggggtttcaccatgttggccaggctggtctcaagctcctgatctcaggcaatccacccacctctgcctgggattgcaggtgtgagccattgcgcccagcctcttttgacaatgtctttctatgttgcccaggcaggactcaaactcctgaatgattgatattcagaagtgaaggggcagatcctgattgtttggtttgcaaaagggggttcactgaggtgagttgtcataaattgattgaacagatttctttttctgtttcttttcttttttttttttttgagacagggtctggttctgtcacttagtctgagtgcagtggtgcaatcacggctcacttcagcctcgacttcctgggttcaggtgatcctcccacctcagcctcccaagtagctgggactacaggcgcacatcttcacgctcagctaatgtttgaatttttcatagggatggggtttcaccatgatccccaggctggtcttgaattcctgagctcaagtgatcctccctacttggcctcccaaagtgctgggattaccagtgtgagccactgcgcccagctgaacagatttcaaatgagttctggtaatatattagttttctactaccacattaccatgaatattaccagaaactttgtggcttaaaacaacacacatgtattatcttacagtcttggtgggttaggaacctaagtatagcttctctgggccatctacttagcgtctcacaggctgcagtaaaggtgtgggccagggttgggttccatctggaggctctactggggaagaatctgcttcctatgtgcctggttgttagcaggattgagttccttttgattgttggactgagagctttttttttttttttccgctggctgtcagctggaggcccagaggtaggtgactagatggtacttgcagttccttgtcacgtggagttctccaacgtggccactcgcttactcacagccggcaagagagagaggctctggcaagagagaggctccagcaagatgaggggaatggtgatgtaacatgtaatcttatgtaacatcatcatgtgtttcctatcacctgtgcatacactatcgattagaagcaaatcaaagatcatgtccacaaggaagagaagaggatcacacaagagcaagaacaccaggaggtggggtcaaaggctaccctgagcggccagtctgtccaccacaggtagctacgtgttaccatggctatagaacattccatcttttcctaagtttgtggatgtggagcaactggagtggcatacactgctatcggaaatgtaaagtgttaaaccactttggaaaatggtttggcagtttcttgaaaactgaaacacttaccatatgatccagccattccactactagatagttacccaagagaaatgaaaacaacccacataaagacttgtgtacaaatgttcatagcagaatattcataatattccaaaagtggaggccaggtgtgatgggcttatgcctgtaatcccagaactttgggagggcaaggcaggaaaatcacttgagcccaggcaacatagggagaccctgtctttacagaaaaaattgtaaaaattagccaggcatggtggcatgaacctgtagttccagctattccggaggttgaggtgggaggattgcttgagcctgggagcttgagctgtggttatgccatacactccagcctggatgacagaggagtgactctgtctcaaaaacaacgacaaaaaccaaaaccaaaaaacaacaaaacaaaacaaaaacccaaaagtggaaacaacccaagtgtccatcaacaagagagtgaataaacacagtgagaactatccatgcagtggaatatttctcagcaataaaaatgaacaggctagttatatgcacaacaacatgtcaaatcatcatgctgcaagaatgaagccagacaaaaaaagacccccctcccctcaaaaaagcctgtatgatgctatttatttgccattctagaaatgcaaattaatctatagttcccaaaagcagggcagtggttgcccgggtgagacagagaaggagagatggactttaaagggcacttggaaacttctgagggtgatgaaatgttttgcatctttttttttttttttttaattgagacaaggggccgggcgtggtggctcatgtctgtaatcccagcactttgggaggccaaggtgggccgatcatgaggtcaggagttcaagaccagcctggccaacatggtgaaaccccacctctactaaaaatacaaaaattagccgggcgcgatggtgcgtacctgtagtcccagctacttgggaggctgaggcaggagaatcgcttgaacccgggaggcggaggttgcagtgagccaagatcacacccgtgtactccagcctgggtgacagggcaagactccgtctcaaaataaagtaaataaataataaaaataaataaataaaatgagacaagttatcgctatgttgcccaggctgctgatattgaactcctggcctcaagcaatctttctgcctcggcctcccaaagtgctgggaatacaggcatgagctactgctcccaccctgttctgtatcttaatagtggtggtggttcacagatgtatacgtctgtcacactcatcaaatcgtacactttaaagaatgtggttattgtgcaggccgggcgtggtggctcaacgcctgtaatcccagcactttgggaggccaaggcaggtggatcacctgaggtcaggagttcaagaccagcctagccaacatggtgaaacccatctctactaacaatacaaaaattagccaggcgtgatagtgggcacctgtaatcccagctactcgggaggctgaggcaggagaatcgcttgaaccagggaggcaaaggttgcagtgagccaagatcgtgccactgcactccagcctgggtgacaaagcaagactccatctcaaaaaataatgttgttattgtacataaattataacataaattcatgcacataaactcaataaagtttattaaggacaaaaagtaaacagtaaatgagattcaacggagacatatgaatctagacacttggaagaggaagtaatgttgatattgaatacaggtaattttgaacaaaattttcaatacaataacattctcacatcttttattaactaaaaaagaaatggagctacttgaaatattttattttttttttgagacagagtctcactctgtcgcctaggctggaatacagtggcatgatctcggctcactgcaacctctgcctcccgggttcaagaaattctcctgcctcagcctccagagtagctgggactacaggtgcccaccaccacgcccggctaatttttgtatttttagtagagacggggttccaccatgttgggcaggctggtctcgaactcctgacctcaggtgatcctcccgcctcaacttcccaaagtgctgggattacaggcgtgagccacggcacctggcctacttgaaatattttacatattaattcacttacaaggtggttaccatcagtttggtattaatacaataaagaggttatcaataaaaattactagtgatgttgagcatttttcacatttatcagccagttgatttttttttttgaattgcctacttgtgccttttgccaatttttctattagattgtttttccttcttcatttgtttacaggcctatctgcctcatcagcctgggagttccacagagacaagaactgtatttcatttctttctctatccccagcctagtacagtgtctggtatttagttcatgaaatgtttgttaaaattgaatggaatgaggccaggtgcagtggctcacgcctgtaatcccaccattttggaaggccaaggctggtggatcattagatgtcaggaatttgagaccagcctggccaacatggtgaaaccctatctctactaaaaatacaaaaattagccgggcctggtggcaagcacctgtaatcccagctacttgggaggctgaggcaggagaatcacttgaactcaggaggcggatgttgcagtgagctgagatcgagccactgcactccagcctgggcaacaaagcgagactccatctcaaaaaaaaaataaaataaaataaaattaaataaaatgagacaagttatcgctatgttgcccaggctgctgatactgaactcctggccttgagtgacccttctgcctcggcctcccaaagtgctgggactacaggtgtgtcaccatatggataggttggccttgaactcctgacctcaagtgatccaccttggcctttcaaagtgttgggattacaggcgtgagccaccacgcctggccccttgtctcaattaatcaaaaaaaggcctaggcgacagagcaagactctggggaaaaaaaaatatatatgtatatatatatgtgtatatatatgtatatatatgtatatatgtgtatatatgtgtatatatatgtgtatatatatatatgtgtatatatatatgaatggaatgatattctcataaccccttggaaacattattacttctgtttaacagatgaggaatataagacagaagctgagtaatttgcagccacacactgctaaatggtagcattgggactgtaatccgggccttctgattctttttaattatttgtattaattttaattttattttatttttaaagagatggagtttcgctatgttgcccagggtggtctggaactctcaggctcaggtgatcctcctgcctgggtctcccaaagggctgggatttcaggcgtgcgccgccatgccctgccgcaggctttccgattctgaaccatagagtcaatgaaactgtcctccatcccctccagagatgtttgcctggaccctgttttcctcaggatatcaatgaatagttcatgagtttagtgagcaaaggtcaacctccatcaggcgcatgcgtcccttccttttcccatggaggaagagacgcctcttttccttccgctttgcttgtcttttggccccggcgactcaccatcgtcagtgcgcaaccgttcgctaactgaaatgatggcgactggaacgccagagtctcaagcgcggttcggtcagtccgtgaargggcttctcacggagaaggtgaccacctgtggtactgacgtaatcgcgctcaccaagcaggtgctgaarggctcccggagctccgaggtgagctggaagtggactctcccggcctgatagtccggggagtcgcagtctttcgttgctgtgggaaggaggtcgcgttgcatcttgggaattgtaggctgtgaagtacttgctatgagtaggtcttcttcgcggaggcgcgtgttgcattctggggtgtgcagtntctttggttagggacagtgtgtgagggttgggggaagaagcgatgccatgggaacctgtgctttaaaacagctctttgggaggccgaggcgggcggatcacctgaggtcgggagttcgaaactagcctgacaatcatggagaaacccccgtctctactaaaaaataataattaaaaaaatatatagccgagcgtggtggcacatgcctgtaatcccagttacttgggaggctgaggcaggagaattgcttgaacctgggaggcgaattatatatataagtattatatattacgtattatataatatatatacgtatatattatatataatgtgtatgtatatattacatatataatatacatatatattatatataatatatgtaatatatattatatatattttcaactagaggtgtttatagttaaccacctgtaaatattcaacatattcatcataataaacgtacatttatttagcattttatatatgctagacactgttgtcttttatggagtttaattcatgaagtctttagaatgactaattgaaggaagtacttttccttttttttttttttttttgagacggagtctagctctgtcgccaggctggagtgtagtggtgtgatcttggctcactgcaacttccgcctcctgggttcaagtgattctcccgcctcagcctcctgagtagctgggattacaggcacgcaccaccacacctggctatttttgtattcttagtagagatgaggtttcaccatgttggccaggctggtctcgaactcttgacctcatgatctgcctgcatcagccttccaaagtgctgggattacaggcgtgagccaccgctcctggcagcattgcttcttgagcagtctccacatagctattttgtttgattagctgagaatttcatgtgtaaaaaactcattccacagtattcatttaacaaatacttattgggtgtctgctatgtgccaggaactgctctaggtacacggaataaacaaaactaaatccctctacttgggaagtttacattttagtgaagagacagacgataaacaagtgaaacagaaaaaaatcaggtggtggtaaatcctgtgaagcaaaattaatctgggaatagagagtgatgaaagggttaatctttgtttgtttgtttgttttgagacagaggaggagtcccactagctctgtcacccaggctaaagtgcagtggcccgatctcgggctcactgcaacctctgcctcctgggttcaagcgattctcctgcctcagcctcctgagtagctgggattataggcgcctgccaccacacccagctaatttttgtgtttttagtagagatggggtttcaccatgttggccaggctggtctcaaactcctgacctcaagtgatccttcccgctttggccccctaaagtgctgggattacaggcatgagccaccacacccggtcgaaagggttaatcttaaacagatgatcagggaaggggtctctggggagagagcctgtgaggagaaacacactgacatttgcccacagcataatgagtggttatgactcataggcttgtctcttgcatgcctgcgcttctcctcctccatttgagttgtgtgcttagtgagggtccattgtgtttttttctaaacatcatgtgtctgtgggctgggcgcagtggctcatgcctgtaatcctaacactttgggaggccgaggcaggattgcttaagcccaggggttcgagaccagcctgggccacatagtgatatcttgtctctgtaaaaaaaggaaaaaaaaaaagaatgaaaacaattttttaaatgtgtgtatggcacttatgcttacagttgcaactacgtaatttaatgaaataatacgaaaaatgaaatatgagtaccaaaaaagagggttgctattgctatgaaaactaagttgaaaatcagaaacacttgttgaagatgagtagctaagacaaattgttattgagttaattatgaacaagttaatggtaaaagcctaggagaaaaatttatagaaatctaaaaagattctgtagtgaagattgttttacaggtgtattcaagatgttcttccattttaaagaaagcaaaactagaaatctcagatggtatgttaygtgtctggtctgtttatgtaggaaagtgatgcagaatgccaatgaatatatcaaggaaaagccttggctttacattacaacagcccctgccttcaaggcaaccacaactcccattgagtctgttttctaaatgtctcacaaatcctttgtttctttttttctyggctacttctgtgtttcaggccatcctcattccttgcttagagtactgctgtgtcatcctaaccaatctctctgcctcattccccactctagtccacctgcttaccacatttctaaaacagaaaaatggatcatgccatttttctctagaattacacacaaagatgaattctaaaccctaacttttaagtctcagattagaagtcacttcttttagggacctttcctgaacacctacccctgtaatcagttagacactcctgccccactacatgctcccggagcagccaatgcttccccatcagcacttaccataaggtgatgtaagtgcctatgttccctttgtaacccctccagattctgagccccgttatcactcttaaccagagtaagggcatatgttaaacactcaacaaatgtttattaaatgagtaagtgaatgaagtagattgttggaacccttttttttctgccatcggtttgtaagtcaccatctcccatctataggagtttgaagtttacccttaaaagtagccacaggaggaacaggtactctcataattgttggtgggaatgcaaagtggtacagccctaaaggagaggaatttggcaatatgtagcaaaattaaaaccccacagtcacaaatcacagtcctgtgagtccatcccaaacatatgctggcaaaaagatgcaaagataggagatatttgtaacagtaaaagctatgagataagatccaagatttgagaattttttgtaccactacttaccgtggcaaaagactgggaacagcctccaaatccgtcagcagagaactgactgaataatgttatggtcacctgtagagtgtggtactctgcagttgtaaaagagcaatggattcattaggagatagcaattgaataggagattcaatatgtattgctgcagataaccctcagggatctattgcaaagtgaaaacagcaaggtgtaggctgggcacggtggctcatgcttataatcccagcactttgggaggctgaggcaggcaaatcacttgagcccaggagtttgaaaccagcttgggcaacatggcaaaaccccatctctacaaaaaaatacaaaaaactatctgcgcatggtggcatgcacttgtagtcccagctactctggaggctaaggtggaaggatcacctgagtccgggaggttgaggcttcagtgaacagtgatggtgccactgcgctccagcctgggtgacagagtgagaccatgtctcaaaaaaaaaaaaaaaaaaatatatatakagagagagcgagcgagagagagagagagagagagcaaggtgtaaacaagtacacatagtatgttacattttaagtaggaaagtggtatggaggaaaataaatacatgtgtccattgtttaaaaaggaacaatggaaagaaaaccacaaagctaataaaaatagttatgcatggggctgggtgtaggggctcatgcctgtaatcccagtactttgggaggctgaggcgggtggatcacctgaggatgggagtttgagaccagcctggccaacacagtgaaacctcgtctctactaaaaatataaaaattaggtgagcgtggtggcatgtacctataatcccagctactcaggaggctgctgcaggagaatctcttgaatccaggatgcggaggttgcagtgagccaagatcgcatcactgcactccagcctgggtgacagagtgataccctgtttcaaaaaaatgaaaattaaaaaataaaaaaatagttttgcatatgggggagagaacagggaaagaaagggacagagatggaaaatcctattttattgttttgactttagacatccagaaagggttactaactttaaaactttaaataaagttgccctgtgttggggaagaaatctggcaatcctagttactttgaagtcacgctacccttttcactagagtctccctgacccaagagaacagggaagggccggtaggatacacataacagtagctccttttacttggctggatttaggtatgccaggagcagggtgcagtattaggccagaaatctctgttggtctctgcttgcctctcagtgctaatgtggtcagctctccttgactgtagaccatccagccaaatccaagctctgcttttctcttttggactcaggacccattaaactcagtaacctcattaaattctgcctgcacatttctcctttcttttcttttctttttttttttttgagacagagtctcactctgttgccaggctggagtgcaatggtgcgatctcggctcactgcaacctctgcctcccaagttcaagagattctcctgcctcagcctcctgaataactgggattacaggcacgtgccaccacgcctggctaatttttgtaattttggtagaggggttttgccatgttggccaggctggtcttgaactcctgatctcaggtgattgcctgcctcggcctccgaaagtgctgggattacaggtgtgagccaccgcacctggccatctcctttcttttctttttcccagccctgtctggtcatcttttatggggtggttccccattttaagccctgagcttctcctcatggcttccccacaccccccactgtttctcttattccattttttttttctttttttttttttgagacagggtcttgctttgtcgcccaggctggagtacagtggtgagatcttggctcactgcaactttcgcctcctgggttcaagcaattctcccacctcagcctcccaagtagctgggattacaagcgcagccaccatgcccagctaacttgtatttttcggtagagatgcggtttcaccatgttgcccaggctggtcttaaactcctgacctcaagtgatccacccaccttggcctcccgaagtgctgagattacgggcatgagccaccgcacctggccttctcttatttcatttctaaatagctgtattcctctgtccttttcagccccattctaactcttgcatctttactactttcaaacaaccccaaatctcaaatctgcctttaaagaattacgagtcatgttctctcactggacttgtggagccaaagtttttttgcagacttctcttagcacttaatgaatacactgtgccaacagcccagcagttaggaagcacttgatttctcaggcagtggcctttgaaacagatgtcgggtccatgccagaactgccatagtgccaatgaaatgaattttcaacatgaacaaatagaaaattatccttcattacattttgagtgtttgtggttgtatagggtggaggagtgggagaggagagagggtagtagtgtaacagctgcagagagaagattacaggaagtttgggaattttgattattaccattttatttttgtcttccagctgctaggtcaggcagctcgaaacatggtactccaggaagatgccatcttgcactcagaagatgtaagaaacaacttttttttttaatgatttgggtttatgtatatggtttgtgtggccacagggaagtggaaatgttctatttctctctctcttttttatgcagagtttaaggaagatggcaataataacaacacatcttcaataccagtgagtatgccccctccagcaactatttgctgcagaatcattatccctggtctgctttcatggactttgtgcttcagcactttcctgtggaggccagagtgggagtaaaggtgggggtggccaaggatgactttctcgatggcaaagatgcctgagactacagaagaagtgggggtaaaggatgagaatcaggagcagagtccaccctttatgaacctccccatgttaaattgagggctcctcagagagagactataaaccctgtaaaggcagggcccgtgccaggaccatgctagcactgtacttggcacctgtgaggccgttgatcagtatttgatgactgactgtgcccaaggtctcttctgggaagttaagttgggtcctctactagggaatgaagtataacatacctgtatcctacatggtacataggtaactgtggcacctgctacatataaatcatgtagggaattttgaaatataagaccccctctttctccattataatttgctcttcatcttatttcatgttgttttatattttatgtacttgatattatacttatgtacctcttagaaatatatggttggggctgggcatggtggctcacacctgtaatcccagcactttgggaggccgaggagggcggatcacctgagatcaggggttcaagaccagcctggccaacatggtgaaaccccgtctctactaaagatacaaaaaagtasccgggtgtggtggtgggtgcctgtaatcccagatactcagraggctgaagcatgagaattgcttgaacctgggaggtggagtttgcagtgagtggagattgcacctctgcactctagccagggtgacaaaagtgaaactctgcctccagaaaaaaaaaaaaagaggctgggcacagtggctcatgcctgtaattccagcactttgggaggctgaggcaggtggatcacctgaggtcaggagttctagattagcctggccaacacggcaaaaccccgtctctactaaaaatacaaaaattagccgggtgtggtggcacacacctgtaatcccagctactcgggaggctgaggcaggagaactgcttgagcccgggagacggaaatggcagtgagctgagatcgggcaccactccactccatcctggcgacagagtgagactctgtctcaaaaaaaaacaaaaaaacaaaaacaaaagcaaacaaacaaaatatatatatatggttaggaatttcactcttcgatatttaaatagctaatgtttgtcataatcattagtcattctttgggtatctacatattaggtattaggtatgtgaccatttgattccatatacacagactaattttaagccatgcatgtagtctgttgaaccacatttctcactctgggagaatgttactatctgtttgggtttagattccatcttttcagcagctctgcactcagacaggaatccctgttcaatagcacaatcttaggataggatggacagaaatacaggatgtgacataagctgaaatttcttctgcctatatgtattatctggtcataaatgaaacttattagttcacttatgtgtattttcctctttccttttctgatttaggcaagaagctattcagaagaagtaagtaaccccaaaggtagaggagtagggaaccaactgaagcaggctggggggatttatactgctgggtccagaatcaatacaaaaccctggttgacacctgccctcaaattgaaatatgctctgggatactcacttgggatttaaagatacagcatatttcaaaggtgtgcagtaactcaactcactgctattaatagtaaaactttctaaaagttatggggtatagagaccaaccttaaggagtagaaaaccttttacattggtaatattcattaagcagagtaaatgtgcaaaaaccattaaacagccttgttttctaaaatggattaaatttgtcccttgcaacattgtttacattactaattggctttgcaaacctttcttcagagtttaaacacttctgggacacaactggaccaatataaattttgatttacatgcaacagtatttatgcattaaagtacagatagcttgtacaggacaggtgtagtggctggctcatgcctgtaattgcaggactttggaaggctgaggctggaggattgcktgagcccagagtttgagattgccttgtgcagcatagtgagaccctgtctgtaatggaaaaaaaaaatttgtaaatagttgtacaaagatgtctttattattgctcatttcagataaaccctgtctctattctaattcctagtgttgaacagtcatcggatctacaggaccagttgaatcatctgttgaaatagaatgacatgtaagagtgctgtaggactcctttgcctaatgctgaggagtaaataccttacacagctgtcctctgggtttggttttctattttcttctccaaaagttaagttagaaaagttctgtgttagggccgggcgcggtagctcacgcctgtaatcccagcactttgggaggccgaggcgggtggatcacgaggtcaggagttcgagaccagcctggccaagatggtgaaaccccgtctctactaaaaatacaaagaattagctgggcgtggtggcgggcgcctgtaatcccagctactcgggaagctgaggcaagagaatcgcttgaacccaggaggtggaggttgcagtgagccaagatcgcgccactgcactccagcctgggcgacagagtgagattccatctccaaaaaaaaaaaaagaaaaaaaaaagaaaagttctgtgttgatgtacagtttctcctaagaagaagcgaggtggttgaattttggaagcacttcttgaatcggattaacccatgctcttattgaattttttcatctgctctgtttagtttgatattaaagcaaaattaagaggtcttagtttttcctatagaacttttaatatgtcaaaagctatattgtctaaatttcagtacttaagcaaatactgagtagtgttttaaattcagaaatagagcttctattatgaacacatgagaatgatttttttctcttaatcattattaaggaaatattttaatttcatggtcatataatggtgataagtaatacctgattgtttccttttctgttctagtaactcagaggagatacgtgttttatttgtgatagcaaattcctaaatgaacattaggcaagtggtatcattatcaggccagctgcagcctyttgccttgacctgcattcctagaatttctttgttgctgtaattcttgattaagtgaccttgactttcattttgtaattttgctaatcatcagcaaattcacttgcatgacgttactgccaaatatgaaggcagttgaattattatgagtgattgtggcagaggtttgtgccatggtgaaaactttgatgtttgtctgtgttcattggatccatctttttaaatgacattaccatgagtcwgttgtcaaacctaaatatctttgtttgaatttaaaatgggactctatattgttgtagttcaggtcttcattgactaagagattgagagaaatctgacataagaaaatattgttttcactgcaggaataaagaggaagtaacagtgaatccaatatagttcatattgttattgtccaatcatcaagttaactaagcattatcagattacgtttatttctcatacatatggatattaacttaaggtaaaaaagctagatgtgaaggatctgaaaaggcattaatttatgtactaattctataaacatgtattaataattgcagtattattaaatacagatggactcaatgtacctttgaaaagaccactaatttagaaaacaaagctaagtgcagtcattacaagaagcaaagaaatacttaagttagaaaaaaattaaaatgaagggatggtctaagttttcttcatgctggaacaaatgttaaagaagcagtgattgcttacaatgtatgtgataaaataatacctttcacaatcaaaattttaatagtaaatataagataaaatttatattaaataatgaaaacgtatttgtactgaatttagtcactagagaacatcgtaacaaaatacatgaaacaaaagtagccagaaatgtgagaacaggtggaaatgtatacattatttgatggtttgtttttttatggaaataaacaacatacatagaattaaatggtgatcaaaaacatggaaaaaatacttcactaaataacgtctaagttgtagaggttgtgccggaagataatatttttaaaataacaaatgttcaaatgccataaaagaaaatttgtgtgataataccaaagcagtactataagaaaataagcatgctttaaatccctgtattagggatagagtggaaatatttttgttttttttaaggggtatatagttagaatttagaaagaatggaaatggaaataataaaactaaacaaattagaaaaaaataacaaattagaaaaaataaaaagtattaagtagttcttgtagattaaatgggtaaagtgtcagctcagccagaaaagtacaaattagtaaattcgtaattgaataggcaatacataaaatcaatgagatttgaaaagagttatcagtttgctgcaaaaaatgtgattaatatatgcccagctccttataaagataaaaaattatgaaactgacacttttaacagagaatattccagattggttatgagaaataacccacaaactaagaataaccaattaaaatggcatttgcttgtgaaagctttcatgagacttttccaaactgtcaaagaacatatactcctggccgggygtggtggctcacgcctgtaatcccaccactttgggaggccgaggcaggcggatcacagrgtcaggagttcgagaccagcctggccaacatggtgaaaccccgtctctacttaaaaaatacaaaaattaaccaggcatggtggcacatgcctgtaatcccagctactcaggaggctgagacaggagaattgcttgaacccaggaggcagaggttgcagtgagccgagatcgagccactgcactccagcctgggtggcagagcaagactccatctcaaaaaacaaaacaaaacaaaacaaaaaacccctatactcccaaaatatagaaaatgatcataagacactaattcatttaatgaagtaaacaggattttcattttaaaaataaaattatgtaagaaagatgatgcaagaggatgtaagataatgtaggtgatttttttatgagtatagatgcaaaaatccgaataaaatcttagaaaactgaatagagaaatattttgaataattgttcatgtaactccagaatttcaaagttgatgtaatagttacaaaacacattacattaataagaaataataaaatcttttgtcactataatatataccaaaaaggcatttaaaatacacttyctatttcaaaaaaactaaaagaattttttaaaagggtatgttttaaaacccaacataatatttgatgaagaagagtcrtataaaaccccagaatattagagctgtatggggccttaaaagttattaaattctggccccatgttttacagatgaaaaaaacacagccaggaagatgaaatgacttacccaaggtcactgagcttgatggtaggtcttttgactactagtctggctctattacctgttagtttccttatgcatagaaacaagggtgccaccttcattactagtcttcaacataatactaaagagctcttagaaaaggaaaggatcttgaagtagctgaatccaatccatttgcccctgcttctgcatctcaggtgagccatcatccagtcattcatctgcttctgcttccgatatttggggaatcctttacttaggagtgctgatccttttggaaatctccacttcttgaaagatggttctgtgtaattaaccaaaatctgcctttctggataatcctggaattgtcactccagtagcttccaagatagaatgtgtgacggtgtgcacaggcctctgttaaagggtaggggagaaaatttctatgtatgttagttttttatcttaaaaaaattagcttttgtgaggctgggcgyggtggctcaygcctgtaatcccagcactttgggaggccgaggcgggcagatcacgaggtctggagattgagaccgtcctggctaacacagtgaaaccccgtctctactaaaaatacaaaaaattagctgggcgtggtggcgggcgcctgtagtcccagctattcgggaggtgaggcagtagaatggcatgaacccgggaggcggagcttgcagtgagctgagatcctgccactgcactccagcctgggtgacagagcgagactctgtctcaaaaaaataaaaaagcttttgccaatatttaaaatatgacttgatgtgagagtcttaatttcttctacgcagtatacagatatatagcattcctgtcatttagcaggggtgatagtaaaacaaaaaaacaaaaaaccccacaaaacctgtggtgaggcactgaccaatcagaatgattgatggtcacagtctggtccaaaattagcccccacaccagacaccatggaggaaaagtgagagtaactcaatttaagttgacagtggtttgttttattgcagtttatctgtgtgtgaataggtagatttaaggattgttggccaggtgtggtggctcacacctggaatcccagcacttttaggaggcagaggcaggcggatcacttgagatcaggagttcgagacagcctggccaacatggtgaaaccctgtctctactaaaaatacaaattagccaggcatggtagtgcatgcctgtaattccagctacttgggaggctgaggcaggagaatcgcttgaaccggggaggcagaggttgcagtgagccgagattgcgccattgcgctccagcttgggcaacaagagcgaaactctgtctcaaaaaaaaaaaaaaaaaaaaaaggattgtcaaatgattcttgtaagtaaaccataaattaaagataacaaaacaagcacaagagaaaaatgatacagccctttccttgacctctcactaatctgcccttttaagataaagatatcattttaactatgagaaggtaactgcttttctaaaggagctcattttatgaagataatattttgaaaactaatatttaggagtgttttcaccattctatgattgcccaaaaactaagtgatacttataaaaacactaagttttatacatatactagttggaaatattccaagctgtagaaatattccaacaaggattatttccatggggttaatttgttaaaaatataaaagacaccacctttctattaatttgtaacaactaattgacatcagagaagatgaaaatttactagctggatatcaaccagatttttgtattattggcaactgagattgaaaaatgaatgaaagagtctacttcatccatttagatatcctttcacttggatctccctgtttccttactgtcctaatgaatagaaatgatcgttacaagctgggcatggtggcttgcacctgtagtcccagctactggggaggctgaggagggaggatggcttgaggccagagttgaaggatccagagatgattgcgcagtgacgctaagcttgggccacagagttgagaccctgtctctaaaaatttttttttaatttaaattataaaaagagaaatgcttgttacaaccacaaagggaaacaagatatacacatataattgtggaagtaaaaataaataatttaaaaatacttttgggtgctcgcttcggcagcacatatagttggaatgatagagaagatttgcatggccccygcgcaagatgacatacaaattcgtgaagtgttccatatttaaaaaaacaaaaaatacttttgggcctggcactgtggctcatgcctgtaatccaaacactttgggaggctgaggcgggcggattgcttgaacccaggagttggagaccagcctggacaacatggtgaaatcccgtctctataaaaaaatacaaaaattaaccaggtgtggtggtgcacgcctgtaatccaaggtacttgggaggctgaggcgggaggatcgcttgagccaggaggttgggcctgggtaacagagaccgtctcaaaaaaatttaaaaattaaaaaaaaaactttctgcaagatgaagtgacaatacctggaaaatacatgtgacttgaccaaaaattactataggtgaaaataaatttagcaaagttgctttcctaaatacaacccaaaatagactgggaacagctacatactgttaatggttccctctatgtgacattctagaaaaggcagaactatagggagggaaaacatctgtggttgcccaggagctaggggtgggaagagggaatttactacaaagaggcacgaagaaacttgtgggccagagctattttggtctccgttttggtgatgtatatacgtttgccrgagttcacagaactgcacactgaagaaagatggatttcacggaatgtgaattatatctcaacaaacttgacttcaaaaaacagatcgagaaaagatgattctattcccaaaaagggggaggggggaagatcattatayaggtgagtgttcatttaaatcagagtacgagatttatccgtgaaaatcgcagtggagcgaacaagggggatgctgataccgacctcctggttggaaagcctgtagagcagcgcggatgacagtggaacagcgggtcaggcggtgggcgcctgagcgaggggctagagcgggatgggcgggcggagcaagcctgccagcctgggcggggcctcggcacaggagctggctgcgggagcccgccgtcctgagtcgcaggccgaggagacagtgagtgcgcgccctgagtcgcaggccgaggagacagtgagtgcgcgccctgagtcgcaggccgaggagacagtgagtgcgcgccctgggcgccccgccccagcccccagccccttccytgggcccccgcaaggcgggaacgcgagcgcctcccccgagctgtgtctcgagacctttgtcctcccckcacccctcggcccgctgcctgccctttactggccccctccctcatgcccgtccctcagcaccctctcctttcaactaactttcccgctcccgacagtggctgcacttcgtgacgctgagatacagaaggacgtgcaggtgagagctgtagggcctggaatggcccaagtggagcctaggctaatggaagtctggcctggcccgcaccctgtcccccgggactcctggagtcggggtagggcagggtctaggcttcgacctttccagggaactgaggtcggccaagtggaggtggaggtggtgacggagccctcgcgctgcagtcacagctctcttctccctctctacccctcactccactgtgggacgctgggtcagacctactacgggcaggtgctgaagagatcggcagacctccagaccaacggctgtgtcaccacagccaggccggtccccaagcacatccgggaagccttgcaaaatgtacacgaagaagtagccctaaggtagagtgccctgtgctgtccccaggaagaccccaaacagcagttttcccaaaagataatgatgcaggtcactagggaattaacccgtagccaccaacccatcagcttgccttgtctattgtaaaaatcctaaatctcagcacccatcatcttactgctctaagaacctccgatgagtctgggcgcgccagtgagcctgtagtcccaagtgcttgggaggctgaggcagaggatcgcgtgagcccagaagttacaggctgtagtgtgcgatccgggatgtgaatagccactgcactccagcttggtcaacatagccagatgcatctctaaaataaatgcgtactttaaaaaaattgcctaaaaaaaagaacctccagcgtgaacactctgtagtccctacccatgctcacagaatacagtcacactcactggatctgccattcaagatatgcgcagttcagcacccactaatcaaccttggcccttttgacccttcccttcctcactccatcagcactgcctgcccagccggcagtcaccaatttggaaggtcttcccttttctttttccttcccaaccctgcgcatccagcaccacgctgctgtcccacctactgcatggagccttctctaatccttgagcggcctcttccccaaactgccacagcactctgtcactcggtctgtccgtaaatcacgggaagtgttttctgtgcacgatgttttatctcgcctctcaaatacacctacgcggcggggagcggtggctcacgtccgtcatcccagaacttgggaggccaaggcaggtagatcacttgaggtcagaagttcaagaccgacctggtcaacatagtgaaaccctgtctctactgaaaatacaaaaattagctgggtgtagtggggcacgcctgtagtcccagctacttgggaggctgagggaggagaatcacttgaacgtggaaggcggaggtcgcagtgagcggagattgtgccactgcactccagcctgggcaacagagaaaaactcagtcaaaacaaaacaaaacaaaaaaaaggccgggggtggtggcttatgtctgtaatcccagcactttgggaggccgaggcgggaggatcacgaggccaggagatcgagaccatcctggctatcatggtgaaaccccgtctctactaaaaatacaaaaatattatccgggtgtggcggcacgcrcctgtagttccggctgctggggaggctgaggcaggagaacggcgtgaacccgggaggcggagcttgcagtgagctgagttcgagccactgcactccagcctgggtgacagggcaagactccgtctcaaaaaaaaaaaaaaaaaaaaaaaaaaaaaaaattagccaggagtggtggcaggcgctcgtagtcctagctactcgggaggctgaggtaggagaatggtgtcaacccgggaggcggagcttgcggtgagctgagatcgcgccactgcactccagcctgggcgacagagcgagactccgtctcaaacaaaacaaaacaaaacaaaacaaaacaaatcaaaacaaaaaacgcctatgggacagaaaccttacattttttcctcaataactagcgcagtcctgggcctgaattagaagctcagctaatgattaaatgtatttattcaacacattattttattttatttatttatttttgagacggagtctcactctgtcccttaggctggagtgcagtggcgccatctctgctcactgcaacctctgcctcctgggttcaagccattctcctgcctcagcctcccgaggagctgggattacaggtacctgctaccgtgcccagctgattttttggtatttttagtagagacagggtttcactatgttggccaggctggtctccaactccttgcctcaagcgatccgcctgccttgacctcccaaagtgctgtgattataggcgtgagccaccgcgcccagcctgaacacattattttagatggcttatgaagtcttagtgcctagcacatgcccaacaatactgtggtaaagcagatacagtcccagccttcatgggtgtccagttcagtggagactaaacatcagaagtatgagtgaatgatgcaagaaagaaggaaggaaggaaggaacggagggagggagggaggagggaagtatgtataagatttagtggtttcatgtcttacagtctccagggaaaaaatatgtgttttccatttcccagatattatggctgtggtctggtgatccctgagcatctagaaaactgctggattttggatctgggtagtggaagtggcagagattgctatgtacttagccagctggttggtgaaaaaggacacgtgactggaatagacatgaccaaaggccaggtgaggcatgatttggaagacaaggagaaaaagattctcaaaagcattatttgaaaaataaagttgttttcttcgtggctcttcaaggataatttaagaaagcttctagttagcaatgctcatttgtgccactagtgcttcctgtcttggaaactgataacttgaacaattaggggttcttctgggcgaacacaagagtcggaggtttgctctgatatgaatatcgtgacgatagagtggactttgatctttcccttcttgctgccatctatcctgaaagattttgttattgaatgaggagtttattcaagccaaactgcacgggcagcagggagtttatgtcccaggttgtagtatatcctacgtgtccacaggaatcttgtatgtttatccaaaataatctaggggaagtatattctgttagtgataggaaatttttaggaaaaagttgtgtatttttttcaaaatgttatcaaaactatatttttcttactttaggtggaagtggctgaaaagtatcttgactatcacatggaaaaatatggcttccaggcatctaatgtgacttttattcatggctacattgagaagttgggagaggctggaatcaagaatgagagccatgatattgttgtgtaggtctatattcttactgttatgactatagcccattttctttattattattattattattattgagatggactctcgctctgtcacccaggccagagtgcagtggcccaatgtcagctcackataacctctgcctcccgggttcaactgattctcttgcctcagcctctcaagtagctgggattataggcacacgctaccacatccagctaattttttaaatcttcttttagtagagacagggtttcaccawgttggccaggctggtctcaaactcctgatctcaggtgatccacccgyttccacctcccaaagtgctgggattacaggtgtgaggcactgtgcycagccctcatttccttttgaacacagagatgtcactattactgtttgctgaattgactctcatttagggtgttaaactaaacttagcatggcttactaatgggagagagctggtttgagctgctggagctcaccagcagcagaacacaccagaccaagagggaacttacttgaaacttaaccacaarccaatgaacccaaaagaccagcaggaccactaagtttgctcctacaatacatgctgacctgtatctttcataatattttcatggtaaattataggattctatttccttttttccctcaagttgttattgtcaaatcatgcccaagtgacagctgcctttgaggaacatagcctgtttacgtgaagcataagaaatgccttgtgccggccaggtgcggtggctcacgcctataatcccagcattttgggaggccgaggcaggtggatcacgaggtcaggaattccagaccagcttgaacaacatggcgaaaccccgtctctactaaaaatacaaaaattagctgggtgtggtggcacatgcctgtaatcccagctatttaggaggctgaggcaggagaatcacttgaacccgggaggcggaggttgcaatgagccgagattgcgccattgtactccagcctgggcaacaggagtgaaacatcctctcgggaaaaaaaaaaaaagaaagaaatgccttgtgcagtaggcatctggtctgaggtttcatcttgttacatggtgaacatcaggacagaaacaagtaagaatcatgcctgatgttattttctgcacattcaaacttgctaacaatttattgagattttaagcactctgtctctgatcttggggaaaagcttagttgaaggcattagaaagagaggagggaggcggtaagaatggggtagctttgacagaacggtgggaaccacctttagggtctgaaaggatttgcagatctctgagtgttgtgaagatttgctcgacatttcatctgttctcttttagatcaaactgtgttattaaccttgtgcctgataaacaacaagtgcttcaggaggcatatcgggtgctgaaggtgaggaggagagtgagataaattatctttgaacatcagtaagagctgatgggttragtcttgtttgttcccccttgaactaagagctcaaactctcttaatttatccattaaatgaataaggggtggcaaaagggggaaggggcaggaataccccggatatggattactttccctcttaggttgcaaaaggtagtaaatccgaggtgacagttgtcactgaatgtgttaaggtatttgctttcttgactgtctctcctatttgctgctgtacatgatcctagaagagcatctgtggagctataggaatctttgcactgactactaatgattgctttgaatatactctcttctagcatgtacagtgtttctcagggcttctgatttcttatctgtcatgatttcagatctttgggaagttacagaagatggaacttttacattaactacttgctaaaaggaaagcttgcaggagctccacagccttcattgtatcatgagatgtgtatcttcatgatagtagatgaaatattcagccaggtgcggtagctcacacctgtaatcccagtgctgtgggaggccgaggcgggcagatcacctgaggtcaggagtttgagaccagcttggccaacatggagaaactctgtctctactaaaaatacaaaaattagctgggtgtggtggtacgtgcctgtaatcccagctcctcgggaggctgaggtaggagaatagcttgaacccagaagtcagaggttgcagtgagccaggatcgtgccactgcactccagcctgggagacagagcgagactccatctcaaaaaaaaaaaaaaaaaaaaaagattctagctgggtgggtggtacatgcctgtactcccagctacttggatgctgaggcaagaggattgcttgagctctggagtttgtgtgcagcttgggcaatatagtgtgatcactgcctctaaaaaaatgtttttttttttgagatggagtctcactctgctgtccaggctgtagtgcagtggcaggatttcatctcactgcaacctccgcctcctgggttcaaacaattcttttgcctcagcctccctagtagctgggactacaggcgtgtgccaccatgcccagctaatttttgtacttttagtagagacaagatttcaccatattggtcaggctgatcttgaactcctgatctcatgatctgcctcagcctcccaaagtgctgggattacaggcatgagccgctgtgcctggccaaaatttttttttaaattgacaacagatttttgagatttttggtttacaaagctgtcatagaactcaaatacaaatatctatatagaaatgatttaatgatttagtgatgtctttgttagtatgtcattttacacgccagttcactatctccaccaaaaatgtacttataaaaggtagaaacactattatagaatctagatctccaggtttccaggtttttgaaattagctaaataaaatgttaagttcctgatcactcatttgccttacattttaaggataatattttaaagataaaatgtgttgttataaaagtaaataacaacattacaaaaagttatattttttaatagaaatggggtcttgctgtcacccaggctggaatgcagtgtcactatctgtacccctctaactcctgagttagagggtacagatagtgacactcactgtaccctctaactcctgggctcaaacaatcctcttgagtagctaggactccaggcacatgccaccatgcccagctagtttttaaatttctatatgggagagagggtcttgctgtgttgccaaggctagtctcaaactgctctcctccagcaagcctcccacttcggcctcctgagtcattgggattagaggcctgagccatcatacctggcaaagttatactattcttaagagataaaagattatgaatactgatgatatcctctgttctacaatgacctggggctgcttttggttcagattggctaaaaatttaaatgtaagtaacctgaaaatctttatttaggagacagacactcttagaatgtgattttattacctgttggataagccactgggaggaaaaaaaaccttggcacttgactattgattgtaactaaagaggcagctgctatttgttcacaaagggtcagcttaaacattgctattgatttttaaatttgattttgttcccctattcctttctttgttatstggggtcaatgtaatcattaatcatcttgtttggactaatatgcctctgtttcagcatggtggggagttatatttcagtgacgtctatacgagccttgaactgccagaagaaatcaggacacacaaagttttatggggtaggtgattttgtttagtttagtattaaggcagatggttgtacatgtgcagaactcctttcygctaatagccaggatgaggctatatgagatcacatggggttaggccatgaggccaaggttccattcttcctctgccattcaaaagtgatagggctttggatagtttaattcatctctttgagttatcgttttccaaattgtaaaatgtaaataataatacaatctgccttatagggctgttatgaagattaaatgggataaagaatgggaaaaatactttgaaaactctagtgtggaaatgaggacaattgttcccaagctggtgtcctcttagtccccttatgttctcatcattattgtgttctttattcctttattatcattttaatagtctggaagttgagataaatgcatgcttttcatcagtctatgaaatcaaaagttcttattcttaaaataatattaactttattcttactatgtaataataaataggtaccgttaacaagttggaaagtgccaaaaaaaaaaaaaaaaaagaaaaaattactaagctggacacagtggcacacacctgtaaccccagatatttgggaggctgagtcaggaggattgcttgagcctaggagttcaggtacagcctgggtgtcatagtaaaaccctatctcttaaaaaaattacttataatcatataacccagtgataacttcttttttttttttttttttttttgagatggagtctcgctctgtyacccaggctagagtgcagtggcgcaatcttggctcactgcaacctccacttccygggttcaagtgattctcctgcctcagcctcccaagtagctgggattacaggtgcatgccaccatgcccagctaatttttgtatttttagtagagatggggtttcactgtgttggccaggctggtctccaacacctgacctcatgatctgcccacctcggcctcccaaagtgctgggattacaggcatgagccaccgcgctcggcctatgatttattttttatactactttattcacataacagtgcttttcagaatgtggcstactgcatacatgaatattatgcttgcagctgagtagaaccaatccaccagtgagtgtcctgaagaatggttcctagagaccatcagctagcacacccagtcttaaccatggctttctagaccttggggggatgctcaagttagcttctactgctaggatctatgttttaactaataccatgtcctaattaattatatagaagaatagttcccttaatactgtattaagtgttggctggtctgtggttttttgttgttgtttgttttttaggtgagtgtctgggtggtgctttatactggaaggaacttgctgtccttgctcaaaaaattgggttctgccctccacgtttggtcactgccaatctcattacaattcaaaacaaggaactggaaagagttatcggtaagatatgacagacagcagggactattataactacagcttgaatgattgaaatgtggtgattagtaagtaacttctgaaggagtctcattgagggatactttctgttatctggaaatagctatcttgcctcctgtacaatggtaaccccccaaaaattttgatatttaataaagcactttgaagtcattcagtaaatagagtgaagtgctyagaaagataactgatgacatgcaaggaagaaaatcatctttataacgtgtttgctccttgtctgctgagcaaggcaacaactgggggagtgctggagatgaaccgtgaataaattctatttttaggtgactgtcgttttgtttctgcaacatttcgcctcttcaaacactctaagacaggaccaaccaagagatgccaagttatttacaatggaggaattacaggacatgaaaaagaactaatgtttgatgccaattttacatttaaggtaaataaaacaatttccatgacttctggtattctttctgctcttgcccttgctccagctatcttttcttgactttgcattgcctcccatttttctggtgttggtttgtttgtgtgtgtgtttaaatgtatgtgtgtgtttcaagtggagtaaaaaagcattttttccccaatacttatttatttattgacagggtctcgctctgtcacccaggctggagtgcagtagcacaatcatagttcactgcagcctgacctcctgggctcaagcgatcctcccacctcaggcttctgagtagctaggactacagactcatcaccacacctggctaatatttgtattttttgtagagatggggttttgccatgttgcccagactggtcttgaactcctgggctcaagtgatgtgcccacctcagcctcccaaagtgctgggattacaggcgtgaaccaccgtgcccagccctcaatatttattataaaaatgtttttggccaggtgcggtggctcacacctgtaatcctagcactttgggaggctgaggcaggcagattacctgaggtcaggagttcgagaccagcctgacgaacatggcgaaaacccatctctactaataaaaatacaaaaattagccgggcgtggtggtgggtgcctgtaatcccaactactctggaggctgaggcaggagaattgcatgaacccgggaggtggaggttgaggtgagctgagatcatgccattgcactccagcctgggcaacagagtgagactccatctcaaaaaaaaaaaaaaaaaaagaagtttttgaatacagaaaagttaatagtacaatgaatacccacataggcattacctatatttcagcaattgagaacatttttccatgtttgtgtgtttatatgtgtatatatatatatattttatttgctgagccattgaaaataagttgcagatattatgacattttacccttaaatatttcagcatgcgtcccataggaatgtaatatccctctgcataatcacaataccattacacacctaagaaaactttttacaagaagcctcattcagacattggattaatagggctatagagaagtaggatggaaaagagtaggagtatgtacaatagtatttcaattgtttaattgtgtcaaggaattaagaaattttaatgttggatgatggcactaattggcatttttactgccctgtgcatagtaagatttgttttctcaaaatggaaaagttcaggctttggaatcagatacctgggttcaaattctggctctattattattgttttttatttttttttctgaatgtcactagacaaacttttattgaagcataaattgtggtacagaaatacattttaactgatttaagtccaacaccagtgaaaggagagattatggcaccaaaactttccctttcctatcataccatgatttagattatgatgcaatctacatttctcttttctaggctttgtcccatacaaatttgggcagtttttcaacattagaatttcaacattagaattcttaattctattaggaaaaaaagcaacaaaaaaaccagacctcaagtcaacaaatctattggatattgtttatgaacgaagtccacgttaagcattggtcctcaaaacagagctcctcaaaatattaggtgctgtgctcattacagaatcaaactgatcacactgattgaaaacttcctcaatgaaattttcaatcaacaacatgcttcaaataaaagtcaaacagtgttccaaccacttgacttcaaaccaagtagattttaggtttagaaacactaaaaaaaggtgtttcatttataaatacagaaggaacaaaaacatcactgcatcaatccagaaattatcaaaatatttagaggacaagaaatataaaatttagtcaactttgctgctttctcagttccttaaaatcccagagtatctgcaaatatagctaaaaagtaccaactcttgaaagcctatattactagtcatttcccattgagtattttggaattttatttatgttctacttatttattcatgtattctgctttatgatgtttatctgaataatctggacaaattctcattctgggcagtcattcgtttcatcctatgaatgccatggtgagggaaacagtgtagttagaggaacagatgaagtcagaacactcacmtgcatcacggtcacagaactttaagtcacaagacagaaaagaaatcgattctgctttggatcaaagtttatagaacactacttaatggaaactagtggaaatggctgctaaaggaaaagttaaggtgaatgatccaagctgacttgattactgaatccagaacaaaattatgctaaatctctctggtaattaactaaataaaaatcattttatactattatttagtaagttagtaaaggcgtgctactcattagatgctaatctcatttactgaggaacacagaattgtatatgttttctggctctattatttattacttgggtaaacttgaacaagtcaccaaaattcgttgggttacagtttgttctactgtaaaagcagggataataatacttactttgcagaatttctataaggattagcaataatgtagcaaaacactgggtacatactgcaagttcagtgaaaagaagatactgtcattatttgttccaaaagtggaagaacttactattaatatttcatttttctgatttatttatttatctattttaragacaaagtctctctctgtcacccatgctggagtgtagtggcacagtcatagctcactgtaacctcaaactcctgggctcaagcgattctcccatctcagcctcccaagtagctgggactacaggcatgtgtcaccatgcctggctaattttttatttttattttttygttggtgagacaggttttttttttttttcttttttgagaccaagtctcgctctgtcactcaggctggagtgcagtggcccgatctcggctcactgcaagctccacctcccgggttcacgccattctcctgccttagcctcccaagtagctgggactacaggtgcccgccaccacacccggctaattttttgtatttttagtagagttgggatttcaccgtgttagccaggatggtctcaatctcctggcctcgtgatccacccgcctcggcctcccaaagtgctgggattacaggcgtgagccaccactcccggccaagacaggttcttatattgcccaggctggtcttgaactcctggcctcaagcaattctcccacctcagcctcccaaagttgcaagcatgtgtcactgtgcctggcttcttctgatttttttggtctaaatagcatctccagatttcttttttttttttaatttaaaaaatgtatttatttctttatttagacacagggtcttgctatgttgcccacactggggtacactggctattcacaggtgtaagcatagcccactatagtcttgaactcctggcctcaagggatccttccacctcagccttccaagtctgggactacatctggctaagcatcttcaaatttcttatttatttatttatttatttttgagatggagtcttgctctgttgcctaggctggagtgcagtgactcaatctcagctcactgcaacctctgcctcctgggttcaagccgattctcctgccttagcctctcgagtagcagggattacaggcgtgtgccaccacacccagctaatttttatatttttattagagacagggtttcaccatgttggccaggctggtctcgaactcctgacctcaggtaatctacccgcctcggcctcccaaagtgctgggattacaggcgtgagccactgtgcccggctgcatcttcaaatttcttaaatactccttggtatagtggagcccttaatgcttttcactaatgcactgctccttgatgtgctgcctattccagtagatacacagaatcagagtggtaagggcctttgaaaccattgatttgttctagtggctttcaaaaaccatttttaatacaattattttttaagcaaaatgttttatatatatatatatatggtttttttttttttgagatggagtcttgctctgttgcccaggctagagtgcagtggtgcaatctcggctcactgcaacctcagcctccctggttcaagtgattttcctgcctcagcctccccagtagcttggactacaggtgggtgccaacgcacctggctaatttttgcatttttagtagagacagggtttcaccatgttggccaggctggtcttaaactcctgacctcaggtgatctgcccacctcggcctcccaaagtactaggattatagatgtgagccactgtgcccagccagaaatgcactttaaaaaccaccagtccttgcctgggcatggtggctcacacctgtaatcccagcactttgggaggctgaggcgggtggattacctgaggtcaggagttcgagaccagcctgatcaacatgatgaaaccctgtctctactaaaaatacaaaaattagccgggcgtggtggcgtgtgcctgttatcccagctactcgagaggctaaggcaggagaatcggcttgaacccaggaggcagaggttgcagtgagctgagattgagtcactgcactccagcctgggcaacagagcaagacttcatctcaaaaacaaacaaacaaagaaaaaacccccaatagtccaaagccctaattttccccccattatttatttttttaatgggcaaattttaaaaattgtatatatatttatggtgtacaatgggatgttatgacatatgtatacattatggaatgactaaatcaagataattaaaatgcattacctcacatactcaccatttatttgtgatgagatcaaagtctactctttcagcaattttcttttttcttttcttttctttctttatttcttttttttttttttttgaggcagaatcttgctctgtcgcccaggctggagtgcagtggcacaatctcggctcactgcaacctccacctctcaggttcaagcgattatcctgcctcagccttccaagtagctgggactataggtgtgtgctaccacacccagctaattttttgtatttttagtagagatggagtttcaccatgttggccaggctggtcttgaactcctgacctcaggtgatccccctgcttcagcctcccaaagtgctgggattacaggcgcgaggtgcccagccttttagcaatttccaatacattgttattaactatagtcaccatgttgtataatagatctctttaacttattcctgataactgaaattttgtatcctttaaccaacatctatcctgttccacccctgccctcccaccccctacccccagcccctggtaagagcctctactcttcacctctatgagttcaactttttgaaattccacatataatctagcgaggttatgcagtatttgtttttcagtgcctgcagatatgacatttttgggttcaactttttgtttgtttttgagatggaatctcactcttgtcgcccaggctggagtgcagtggcgtgatcttggctcactgcaatctccgcctcctgggttcaagccattctcctgtctcagcctcctgagtagcagggattacaggcgcctgccaccgtgcccagctaatttttgtatttttagtagagacggggtttcactatgttggccaggctggtctctaactcctgacctcagacgatctgcctgcattggcctccaaaactgctgggattacaggcatgagacactgcgaccggccaaacatttttttaatgcataatagatgtacatactttcagggcacatctgataatttaatatattcatataatttgtacagatcaagtcaatgtaactggtatatccatcgccttaaacatttgtcttttctttattctaggaacccatttgaattattcttttctagctattttgaaatatacaatagattattgtgaactatagtcaccctactgatccatcgaacactaggtcttatttcttcttattaaactggattttgtactcattaatcaagctctcttcatcctccccactctacctggcgtctggtaaccaccaatctactctctattatcatgaggtccacttttttagctcccacatatcagcgagaacatgtaatattcgtctttttgaggttggcttatttctcttaacataatgacctgcagttccatgcatgttgctgcaggtgacaggatttccttcttttattttattttattttatttttttgagacagagtcttactctgtctcccaggttggagtgcagtggcgtgatcttggctcactgaaacctccggctgccaggttcaagtaattctcctgcctcagcctcctgagtagctgggactacaggcgcgtgccaccacacccaactaatttttgtatttttagtagagatggggtttcacatgttggcaaggctggtctcgaactcctgacctcaggtgatccgcctgcctcggcctcccaaagtgctgggattacaggcttgggccaccgcaccaggccaggatttccttctttttcaagtctgaatagtattccagtgtgtacatatactactacgttttctttatccgttcatctgtttgagtcttctttttttcttagtttagctaaagatttattttattttttcaaaaaactaatttttcattttgttgatcttctgtatttttttagtctcaatttcatttatttctgctgtgatgttctttctttccttctactaattttgagtttgatttgttcttgcttttatagttccctcatgggcattactaggttgtttatttgaagtctgttccttctttccttcattccttccttcctccctccctccctccctcccttcttccttccttccattctttcttttttttttgagagggaatctcgctctgttgcccaggttggagtgcagtggcgcgatctcagctcactgcaacctccacctcccgggttcaagcaattctcctgtctcagcctcccaagtagctgggattacaggcatgcaccaccacgcctggctaatttttttgtatttttagtagagacggggtttcaccatattggccaggctggtcttgaactcctgactctgcccgcctcagcctcccaaagttctgggattacaggtgttagccattgtgcccggcccttctttcctttcttcttctttctttctcagggtctcactctgtcacctggactggagtgcagtggtgmaatcatggctcacagcagctttgacctcctgggctcaggcaatcctcctaccccagcatcccaagtagctgggactaaggctaccatgcctggctgatttttgtattttctgtagagacaggctttcaccatgttgcccagtctgctcttgaactcctgggctcaagcaatccacctgccttggcctcccaaagtgctgagatcttatttgaaatctttcaacttttttgatataggcattacttgaaatctttctacttttttgatataggcatttattgctataaactttcctcttagtgctgcttctgctgtatcccatagatttttgcatgttgtatttccattttcatctgtttcaagatattttaaatttttctcctaatttcttcatggacccattggytattcaggagcatgttgtttaatttccatgtgtttgtgtattttccaaggttcttgttattgatttctaattttattccatagtggtgagaaagatacttgttatgatgtctacttttctgaatttgttaagacttgttttgtggcctaagatatagtctatgctggagaatgttccatgtgctattgagcagaatgtctattctgcagcagttgagtaaaatgctctgtgaatgtcagctaggcctatttgagctagtatatagtttaatgtttctttattattttctgtctggatgatctgttttactgagagtgaggtgtggtgttagagtcccctactactattgcattacagtatatctcttcttttagatctattaatgtttgctttatatactttggagctccaatgttgagtgcaaagatacttatatcttcttgctgaattgacccctttatcattatatagtaaccttctttgcctctttgacagccttgattcacagtctgttttatctgatgtaagtatagctactcctgttcttttttggtttccagttgcttggaatgtcttttttccaccccttaacttccagtatttttataagtaaagtaggtttcttgtaggcagcatataatttggtcccatttttgtatccattcagccactctattccttttttttggggggggttcccaagttttattcaagaactcataccaaatattccagataaataaatttttatcttcaccttcctcctcttctttttccaggttaatctggaattaacgtcattcataataactctttttgctgttagcaactacacacaacaaatcacatagattattcttcaaatattttttggtgagatatttcaaataccttttggaaaaaggtacctcagaagtcacagtgatcttgctgttgctcctttcgatggttataatgctccaccaagattcccagcttttccattcactttaatcctctyttgcaaaaactgctcaaaattggcagcatctatgattccattttctacaaggtgggtacagtcaagagtgaacatcataacctgcttctttttttgcctctctttgccacaagctttttcacagcactatgcctcttaattggagaattgagtccatttacatttagtgttattattgatacataaagacttaacatttttttaaattgatacataattgatgtagctattttggggcgttcatgtgataatttaatacattcatataatttgtaaagattaaattagtgtaattgggatacctatcaccttcaatatttgtcttttcttttctttttttttctgtgagatggagttttgctttttttgcccaggctggagtgcaatggcgcaatctcggctcactgcaacctccacctcccgggttcaagcaattctcctgcctcagcctcccgagtagctgggattacaggcatgcaccaccatgctcagctaattttgtatttttagtagagacggggttttaccatgttggtcaggctggtctcgaactcctgacctcaggtgatccactcgccctggcctaccaaagtgctgggattataggcatgagccaccacacctggccctgtcttttctttatgttggaaacattcaaattattctcttctagctattttgaaatatacaatatattattgtaaactagtcactttactgatatatcaaacactaggtcttatttctttcatcaaaccctatatatatatatatatwtwtwtwtttttttttttttttttttgagacggagtctcgctctgtctcgctctgtcgcccaggctagagtgcagtggcacaatctcggcccactgcaagctccgcctcccgggttcatgccattctcctgcctcagcgccccgagtagctgggactacaggtgcctgccaccatgcccggctaattttttgtatttttagtagagacggggttttaccatgttagccaggatggtctcaatctcctgaccttgtgatccacccacctcggcctcccaaagtgctgggattacaggcttgagccaccgtgcccggccaaaccctatatttataaccattaatcaacttctctttatctcccccattctgtaccctttctggcctttggtaactatcaatatactctctatcttaatgagttccactttttttagcttccacatatcagtgagaacatatgatatttgtctttctgtgtttgccttatttctcttaacatgacctgcagttccatgcatcttgctgcaaatgacaggatttccttctgttttaaaatctgaatagtattccattgtgtatatatgccacgttttcctcatccattcatccattgctggatgcttaggttgattccatatcttggttattgtgattaatgctgcagtcaacattaggagtgcagatatttccctgacatactgatttcatttcattcccttcccttcccctgcctgtctgcctgcctkcctkccttccttccttccttccttcctttcttccttccttccttcccttcctccctccaccccccccgcccctttcagatggaatctggctctgtcgcccaggctggagtgcagtggcgcaatctcagctcactacaacctccgcctcctgggttcaagcaattcttctgcctcagcctcccgagtagctgggattacgggcatgtgccgccatacccagctaatttttttgtatttttagtagaggcagggttttaccatattggccaggctggtctcgaactcctgacctcatgatccacctgcctcagcctcccaaagtgctgggattacataggtgtgagccaccgtacccagccagtttcattttcttttcttttttttttttttttgagacggagtctcgctctgttgcccaggctggagtgctggagtgcagtggcacgatctcggctcactgcaagctccacctcccgggttcacaccattctcctgcctcagcctcccaagtagctgggacaacaggcgcctgccactatgtccggctaattttttgtatttttttagtagagatggggtttcactgtgttagccaggatggtctcgatctcctgaccttgtgatcggcccacctcggcctcccagagtgctgggattacaggtgtgagccaccgcgcctggcccattttctttagatatatacccaagtagggggattgctgggtcatatagtagttctatttttaattttttgaggaatctccatactgtttcccataatggctgtactaatttaaattcccaccaacagtgtgtaaggattagtgctggtgaggatgtggagaaaacgatacttctgggcattttttcttctattgagactaaagttgcaactcttagtatttttttttatactaccctttaggaaggtgaaattgttgaagtggatgaagaaacagcagctatcttgaagaattcaagatttgctcaagattttctgatcagaccaattggagagaagttgccaacatctggaggctgttctgctttggagttaaaggttagtttggctttcactacctgagagaactattttatttatttatttttgagatggagtctctctctgtcacccagactggagtgcagtggtgtgatcttggctcactgcaacctccgcctcctgggttcaagcaattctccctgcctcagcctcccgattagctaagattacaggcacccaccaccacgcccggctaatttttgtgttttttagtagagatggggtttcgccatgttggccaggctggtcttgaactcctgacctcaggtaacccacctgcctcagtctcccaaagtgctgggattacaggcgtgagccactgtgcccggccagtatgcatggtctcttgaggcgcacttctcttgctggtcaaatgttgttagacggttatataccagttaaacgccaccattttgcctcttaatgtgcatgcttgagcccacttgcccaactcccgagatcttatcgggaagctgctgatcaccagtttcaggtgtttctgtttattgggagacttcctttccctggtactgtctgtgactaattatgattttcgagagacagttaacaaccacctgatcatcacctaatgatcgcctgacattcctggtggagtcggcgcggggagccctctcctgccctgctcacgcctgactagctattatacctgctttaacaagttctccaaaattcagagacctttcgtgagtattctgattttataataaaatagttatttgcataagtttagtaagagtcttttctctcaaaacaggacaattggagacacttggttattttaccaaagctttgactggaataacatttgtaggtaaagttccagcaaagccaacttgaaaagagcctatctggccaaactcttgctggacttcatgcaaatgatcaggcaaagtttaataagcctaaaatttattttgcacataaattggccttactataatttgtctttagtataaaaggaggagctgggtgcagaagttcacactcataatcccagcactttgggaggctgagacaggcagatcacttgaggccaggagtttgacaccagcctgggtaacatgttgaaaccctgtctctaccaaaaatacaaaaaaattatctgggtatggtggtgcatgctggtagttccagttactcaagaggctgagatgggaggattgcttgagcccagggaggtggagggcaatgagccaagactgcaccactgcactccagcctgggcaacagagtgagactctgtctcaaaaaaaaaaaaaaaaaaaaaaaaargaaagaaggctagagagagaaatggtttcaaaggaaaactataacacttgttactagatttccagcctggacttttgtttttgagtgcatattgaatcattaattatttcttggctacaataaccctctaaagataaaccaggttataatttttcttcatgtttttagtttgtgccctaagtggaataggttccttattctgttctgacacacgaatactcttttgactgtcatattattaatgttatttatagctccttgttttacttccaaagaaaccagaatcatgatattctaaggttagagaatcccccgtttggaatcccactggtcctaatctgcttttcactgcaaattccgtgctgctaaaattatataagcactcttctctaggcccagggacctatcacacaaaaggtaggtgtgtgagactgtaagggccagttttgagagaattatttcagactctccaaatcaaaaatgggcacacagatgcataaacagctggtaaaataagggactctgcctcctgggttattatgtgtgtggcaccttttcatccatcccaatcataaagaatttcctgcttctcgtagaatgaaaagaaaattattactgagaggatataaaggtacctcatgtcaaagcctcctaggtttaatactctgagttatgagatttatgcagataacatatatattttttaaaattttagaacaggccaggcacagtggctcaagcctgtaatcctagcactttgggaggccaaggtgggcagattgcctgagctcaggagttcaagaccagcctgggcaacatggtgacaccccatctctactaaaatacaaaaaataaattagatgggcatggtggcgtgcgcctgtagtcccagctacttgggaggctgaggcaggagaattgcttgagcccgggaggcggaggttgcaatgagacgagattgagatggcgccactgcactccagcctggcaacagagtgagactctgtctcaaaataaataaataaataaataaataaataaataaataaataaataattttagaacaaattactgaaagaccacaaaaaaaaaaaactgtagcacaacggaagtctctaaattccttagcttaaaaggttttaacagtgcttatgttttgtatagctaattgctgtaagtctgtaactaaaaccaagattacagtagcacaatgcatagaagttaaagataagtcaattttttaacctcacctttggctttttgtttgttggcttttatattaagaaattttaagggtttattaatgcctatccacatccattcccatctggcctagaactttcttttttttggtgggggagggggacggagtcttcctctgtcacccaggctggggtgcagtggcgtgatctcatctcactgcaacctccgcctcacaggttcaagtgattctcctgcctcagcctcctgagtagctgtaattacaggcatgtgccaccatgcctggctaattttttttycttttttttttttttttccgagatggagtcttgctctgttgcccaggctggagtgcagtggtgcgacctcggctcactgcaacctctgcctcccaagttcaagcgattcttctgcctcagcctccagagtagatgggactacaggtgcgtgccaccatgcctggctaatttttattttatttttttagtagagatggggtttcatcatattggccaggctggtctcgaactccttacctcatgatccacccaccttggcctcccaaagtgctgggattataggcatgagccactgtgcccagccctaattcgtatttttagtagagacagggtttcaccatgttggtcaggctggtctcaaactgctgatcttaggtgaccaacctgtctcggcctcccaaagtgctgagattacaggggtgaaccaccatgcctggtctggcctagaactttcaaattcgctatgtgtcttttggctctaagccccttgaccataggggtcccaccaaggcacaagatggacccagggaaggcagctgtgccaccccagcaacacagtgagataaaataaaagtttggtgaccattgatgttgcctctgacaaatctaggccagaatgcggagaaagtaaatcaaaaataaaattctaggccgggcgcggtggctcacacctgtaatcccagcactttgggaggccgaggcgggtggatcacaaggtcaggagttcgagaccagcctggccaacatagtgaaaccccgtctctactaaaaataaaaaatcagccaggcgtgggggcaggcacctgtagtcccagctacttgggaggctgaggcaggagaattccttgaacctgggaggtggaggttgcagtgagccgagatcatgccactgcactctaacctgggcgacagagcgagactccatctcaaaaaataaaaaaaaaataaaaataaaaaartaaaataaaattataaaccctcaaccatctgaacggacccctcctgtcgggcaaaggcattgcaaagttatcctaaaaaactagttcaggtcacgaagggaaggagaagtttggacatgcctcattattccctcctcccttttggaattcagacactgctgaccagcattaacattaaaacagatcttaagactgatagaacagactctttaaatctggtaagaaacatttacaatctattctctctgtagcctgctgcctagaggcttcatctgcatgataaaaccttggtctccacaatctcttatcataacctagacactcccttctattgatcccaggtctttggattataactcaaccaaytgccaatcacaaaatctttgaatctgcctgtgacctggaaatccccacttccagttgtcccacgtttctggtctgaaccaatgtacatattatatgtattgattgatgtcttatgtctctctaaaatgtataaaaccaagttatagggtgaccactttgggcacatgtttgcagatctcctgagggctgtgtcacaggccattggtcacttatttggctcagaataaatctttttaagtattttagagtttgaccctttttgttgacaatgtttaacatcctacagttatgacaccctaatttgaatttatacagcttaacttcaataacatactaaaattctgctcctttaaagcttgttctcaactattttagttcttttttttttttttccattgacagagtttcactctatcacccaggctggagtgcagtggcacgatcttggctcactgcagcctctgcctcctgggttcaagtgattctcctgccccagcctcacaagtagctgggattacaggtgcgccagccaccatgcctggctaattttttgtatttttagtagaggcggggtctcatcatgttggccagcctggtctcgaactcctgacatcagatgatccaccagcctcggcctcccaaagtgctgggattacaggtgtgaactaccacgcccgggtctttctagttcttgatatcacaaaattatgtctttattcattttgtgcccccaaaacgtaaactaataattattttaaatgcattggtctcttaaatcatgtggaaaacaaaaagtagagttacaaaccattgttacaataatactagctttgccgggtgtagtggcttacgccaccaggtgatccacccacctaggttgcccagcctgggcaacaagagcacaactccatctcaaaaaaacaaaaacaaataaacagaaaaccccaataataccagcttttttttttttttgagacagagcttcgctcttgttgcccaggctagagtgcaatggtgcggtcttggctcaccgcaacctccgcctcctgggttcaagcggttctcctgcctcagcttcccaagtagctgggattacaggtgcgcaccatcacagccggctaatttttgtatttttagtagagacggggttttaccatgttggtcaagctggtctcaaactcctgacctcaggtaatccacctgccttggcctcccaaagtgctgggattacaggcatgagccaccgtgcccggccaatcccagcactttgggaggctgaggctggcagaccacttgaggtcaggaggtcaagaccagcctggccaacatgctgaaaccgtgtctgtactaaaaatacaaaaattagctgggcacggtggcaaatgcctataatcccagttacttggggggctgaggcaggaggatcgttttgagcccrggatgtggaggctgtagtgagccrtgatcacaacactgtaccccagcctgggcgacagagcaagaccctgcctcaaaaaaaaaaaaaaaaaagcacaaagctttttgagaaatcactttcaaaaatggtacatttgtagttggggaaggttaatcgaacctaaaatataagaatcctggaccccaaaacctggagccagtattaccagcatgaatctaacccaagctcagtatacaagccacctgtagagctaaagagtgatttactaggccgggcacggtggcttacgcctgtaatcccagcactttgggagccgaggcgggtggatcacgaggtcaggagttcaagaccagcctggccaagatggtgaaaccccgtctctactaaaaatacaaaaaaaattagccgggcgtggtggcatgcgcctgtaatcccagctactccagaggctgaggcagagaattgcttaaacctggaggggcggaggttgcagtgagccgagatcgcgccactgcactccagctggggtgacagagtgagactccatctcaaaaaaaaaaaaaaagagtgatttactttctttgctttattaaattcttcagcactctgctattctgactcttctgttgttcgaagaaggtgatactttggaaagtagacagatttggcttttgagtattcaatccattaaacatttcaaaaatatgtcactgatattttgaaactcctgagagttcattgataaggaaagctgctggtgagaatcaatatttattttaaaaggcttttatcattctaattcttctaaaacctggtttcctaaatactgattataaaagctatcagaaggcgtggtggctcacgcctgtaatcccagcactttggggaggccgaggcgggtggatcacgaggtcaggagatcgagaccatcctggctaacacggtgaaaccccgtctctactaaaaatacaaaaaattagccgggcgtggtggcgggtgcctgtagtcccagctactcgggaggctgaggcaggagaatggcgtgaacccgggaggcggagcttgcagtgagcagagatcatgccactgcactccagcctgggcgacagagtgaggctccgtctcaagaaaaaaaaaaaatgctatcagaagataatggttacaagtaaagagggtctttcctcgagctacagtattttcagtgtactctggctttttttttttcctttgagacagagtctcgctctgtcacccaggctggagtgcagtggcacgatcttggcttactcctccgcctcctgggttcaaacaattctcctgcctcagcttcccgagtagctgggactacaggcacacgccaccacgcccggctcattttttgtattttaatagagacggggtttcaccgggttgcccaggctggtggtgaactcctgagctcaggcaatccgcccgcctcggcctcccaaagtgctgggatgacaggtgtgagccactgtgcccagccactctggctattttttttaaaaaaggagttaaatgagtttgcttctgcagatgaccattttctttctgcgtagctgtccttgttctccctcccagtgtgcgtgcaacacatgtacaggaggttcttgaccttagatataaattgtaaaattccacatatttgaactggtttatcccaacataaggtctcctttctgctttatttcagcctgcagatgtgccaatgtctttaggtcagtttcaagtttttgaaatgggaataagtgacactgaaggaagattttaataaatgaaacagttgtgtgacctaggaatataaccttgtgctcttagggaaggacattcttatcttttttttttttttcttaacggaagacctttatgataaacgctggagtacagacagtacacgcagctggcatgcagggtattgcatatacttaacatcttgagagtccttctgctttttcttcatcttctttttaatcctgatatgcaaaatgtattttgccattaaaacaattgtactattaaaacactgcagcatctggctgggcgtggtggctcacacctgtaatcccagcattttgggaggctgaggcgggtggatcacttgaggtcaggagttcaacagcagcctgtctaacatggtgaaaccccctctctactaaaaatacaaaaattagctgggtgtggtggcgggtgcctgtaatcccagctttttggaagactgaggcaggaggatcacctgggaggcagaggttgcagtgagccaagatcgtgccactgcactccagcctcggcgacaaagggagactccctctcaaaaacaaaaaaacaacaaaacactgcagcatctgaaatgatgcaaacaggattagggctatggactgtcttaatagtaatggtagtaatagcattaacaaccatagcagtaatatagaggaattaacttttattgaatagttaatatgtttaaggcaccctgtcatttagtcctcacaatcacccctattatcttcatttgacagatggagagactgaggctctgaaagattcatttacaaatccaaagtcatacagctagaaagtggtgaatttgcacccacatctgattctggagctggcactctaaaccagtgtgctgctccatctctccatagttgtacttctcatagaatcacaggatgttggtgcaggaaaggactgcttatatctgggtaccccacctttcatttccttcaagtcttgagatctttttgaactagaagcatgcatttagaagtgatattgatatcaccatctcctgttggtagatagatcattgagtggaaagaagagggttcaagggattctcccacctcagcctcatagtagccaccacgcccaactaatttttatattttcagtagagacggggtttcatcatgttggccaggctggtctcgaactcctgacctcaggtgatccrctgccttggcctcccagagtgctggkattactcccagagtacatgagccaccgcaccaggccagggcaaaccctttcaagcaggagttccagtatactgagagatggaaatgcaattgatgtgaagtcctagcagtagcaaccagcagagctggccttcttccaggcttggagatcctctgccagatgctcatcttaccagatgcaggcagacctcttcatttcagaaaggtagacactgagggacagagagaccaaggccagcaggaagtcagtcactttagtaaagggtccaccagtctatcagtttcatgaatgtagagtctgtgcctgccttgtacacccctctatttgcagtgaccagaataagtagtaggactgtaaatttatgttataatgaattcattaccattatttaaagtggcatgttcatgcttttttttttttttttgagatggagtctcgctctgtcacccaggttggagtgcagtggtgtgatctcagctcactgcaacctccacctcctaggttcaagtgattctcttgcctcagcctcccgagtagctgagactacagacgtgccaccacacccagctaattttttgtatttttagtagagatgggattttgccatattgcccaggcttgtctcaaactcctggcctcaggtgatccattggcctcggcctcccaaagtgctgggattacaggcgtgagccaccgtgcccagaccctgtgctcttgatttcctatctttgtacttggcttttctctggccccactggtactattgttagaggtatctcatttggaggtgaaaggaggggaaataaatacagcagtcttgtcttttaaataaatacagcagtcttatgttactctactctgagatctgtctggccattgttggcaatttcatctgagcatcagcaattgctagtgacagccctacatctgggactcactttcctgtttggtataaatgtttctggagattagaataagggaagagragtcgttttagcatttccgtatctcagttccaaagaggtttaaaaggcacgtgcaaatgacaatcccacaaaacaaaatcaactgagcaaaaatcaatgctctgcccaagagggaccatctttaagaagctttaagtgaagtttaccttgaaagttgtaattagaagcttcaggaagcaagtgcctttatggcagaatgactgatgttactcccaggatctcatggaattgtaaaattttatctctgttctrtgtaagtcaacctaaatcaaacagaaatattagtgtttgggtacatcaaaacacctttaacttgtcctttcattttggtttgccttttgacaggatataatcacagatccatttaagcttgcagaagagtctgacagtatgaagtccagatgtgtccctgatgctgctggaggctgctgtggcacaaagaaaagctgctaaatctatagccaaccaggggaccacagtagtgggcaagagtgatctgcatgttttttaacctgcttttccccatagcacagaccataagaaacaacaaatggggccgggcacagtggctcatgcctataatcccagcactttgggaggccgaggcaggcagatcacctgaggtcaggagtttgataccagcctggccaacatggtgaaatcctgtctctaccaaaaatacaraaaaaattagctgggcatggtggtgcacacctatagtctcagctactcgggaggctgaggcaggagaattgcttgaacccaggaagtagaggctgcagtgagtaagcatcacgccactgtactccagcctgggcaacagagcaagactctgtctcaaaagcaaaaaaaaaaaaaaaaaaaaagaaagaaraagaaaacaacaaatggcagagagccaccatattccaaatcactgaaaaaaataaatgaattatttttatttatttatttatttttttgagatggagtctcggtctgttgcccaggctgaagtgcagtggccccatctcaactcactgcaagctccacctcctgggttcacgccattctcctgcctcagactcccaagtagctgggactacaggcacctaccaccatgcccagctaattttttgtatttttagtagagacggggtttcaccatgttagccaggatggtcttgatctcctgacctcgtgatccgcccgcctcggcctcccaaagtgctgggattacaagcatgagccactgcgcccggccataaatgaattatttttaagaggcattgattaaagattcacagcaaatcactagttaagcagattttttttctatttcctacttcaaagttctggtgccacatagtggtcagaaatggaacagagaagctgtcttaagccttgttcaagaagcaggaaaggcatcagaagaagtaacagttggcagagggtctcaggaaaaacatcttccttctgatcttttgcatagcaccttytggaattttcatcatgtttgcttattaaacaaagctcctactgccatcatactaatcatgcaaaaagattgccaaatcatgtttggtaggaggacttttgaggtagcttttgaacaaatgtttttttcttttttctttttttttgcaataaagaaaacaaattaatcataaacatctttgaatcaagtatctcaagaaaacaaatgaatcataagtatctcaccctaatgactgatgacatagtgattatttattgtaaattatcctaactgggtcaggaatagagttcgatcgttttttaaaaagagagctaaaagatgtaaaaatgaccaggcatggtggtatgtacctgtagtcccagctactggagaggctgaggcaagaggatcgcttgagcccaggagttccaggctgcagtgagctatgattgcaccactgcactccagctgggtgacagagcaagaccctgtctctaaaaaacaataaataaataggctgggtgcgatggctcacgcctgtaatcccagcaccttgggaggtcaaggtgggtggatcacttgaggtcaggagttcgagaccagcctgaccaacatggtgagacccccatctctactaaaaattcaaaactcagccgggtgtggtggcatgtgcatgtaatcccagctactcgagaggttgaggcacaagaattgcttgaatctgggaggtggaggttgtagtgagccaagatcgcaccactgcactccagcctgagtgacagagtgagaccctgtcaaagaaagaaagagagagagagaggaagggaaggagagaggaagggaggggagggaggaaagagatgtaaaaatggtaggttttctttttctttataaggtgtcctggttaaacttttagcaaaatgatagattcagtttttccatagttaaagaagaatattaagaacattaaagaaaggttcaaggatggtaaataatttgaattccagctgtacttgaagactttattggaggacacagaaaggtataagtgatggtcattatcatcaggagctggataattcagtttttaaataacagccttcaggctgggcgcggtggctcacacctgtaatcccagcactttgggtggccgaggtgggtgtattgcttgagttcaggagttcgagaccagcctggacaacatggtgaaaccctatcgctactaaaaattcaaaaaattagctgggtgtggtggtgcacgcctgcaatcccagctactcgaggctgaggcacgagaattgcttgaacccaggggatggaggttccagtgacccgagattgcgccactgcactccaggctgggtaatagggcgagactccgtctcaaaaacaataaatacaaataaataaataaatagccttcaaccaatcaagggttttgataagatgtcaaccagttgccctgggctcagtacaaaaacaaccaggggcatggcatggtccaggggatttcggactaggggtttgagaattttaaggcatgtaaaacattggaatggattccgtaggatagacttctgttttaagaaagctgtttaatatggagaaattctcaaatttttgagtaggttcagctatagagcctaacttactattacagacagaggaaagaactaggtagtatttttttaagccctattcacctccatgaccttaattttaaacatgcttgcttggttctagggtgccgtatctatctagtcgtaacctactttaatgtgaaaatggtacattacagcattagctacaatggtacagctggaataagcatactttgctcttcatgaacacaagatggccctgcttggggggaattgattgaagggtgttctgttggctgggtgtggtggctcatgcctgtaatcccagtactttgggaggctgaggcgagtggatcacttgaggccaggagttcaagaccagcctggccaacatggcaaaactctgtctctactaaaaatacaaaaattagacaggcatggtggccaaggcctataatctcagctactcaggtggctgaggcacaagactcggctgagcctgggaagtggaggttgcagtgagcctgggaagtggaggttgcagtgagccgagatcacaccactgcactccaacttgggtggcagagcgagactctgtctcagaaaaaaaaaagggggggggtgttttgtttatttggtttattgggctttttggcatttacaaggagagggtattagctttttacttgtccttctgaactctcagttccccaaaaagatgttgagtaatgggattgggctgggcaacttagcaagaccccatctctaaaaaataaaaattttatatttttttatttttattttttttcaagacggagtcttgctctgtcgctcaggctggagtgcagtggcatgatcttggctcactgcaacctccgcctcccaggttcaagtgattctcctgcctcagcctcccgagtagctgagattacaggcacacaccaccacacctggctaatttttgtatttttagtagagacgaggtttcaccatgttagccagggtggtctcaaactcctgacctcatgatccacctgccttggcctcccaaagttctgggattacaggtgtgagccactgtgcccagcctaaaaaaaaaaaattaaaaaaaaaaaaaaagaatcatggaaggctgcagaaacttttcagcttaccaactcagggaggcccagcagtagcctcaacaggcccccacccccacatccagccatgcatagctgaaaagggcatggctttgtgccaagacagccccagagcctgctcctcctatttattcttggcctttacttggatggctccagggaagcagctgaggtagtcactcattctgccatgttaagatgggaattgtattaaatgagtctggcaaggtatgggaactgtctatcctttctttcattcattcactaaatagtattatctcctgtgtaccaggcactgtcctaggcactggttgctaaaatggaatattatgaaccccatgggccaagaggacaaaaactgctgagtgtattttctaaactttgttggtacctgtcctgacttctgtgatttgccaattttcttcaaccacacaccacaatttgggtccaaacaaaggttcttctgtaggccctgccctgagagtcagtagagggagatctcactagagtaaaaatgaactctttttgaggttacagtaagctatgatcatgctactgcactccaacctgggtgacagagcaagaccttgtctcccaaaaaaaaaaaaaaattcttttgcaaatatgaagctgaaattatacaatcctaacaacaacctatgatgagctttactgcttcattccagtttctgttcaactgctgaccctgcaattcctgaaagcacaactcccactgaggttaataggagtgttatgcgaatgtaagttttgtacttaatttcctcctgctgagtgagccttggttgtgttggactcacaattgtaacaattcctttccgcagtgggaacatggtggccccaccttccatgtggcagggccatgctgcagtgcaatgctccaggtgaggggggagatcaatttagaaccaaaatattctggcttaatactacttcattgcctcatatagtagcatgatgcctcataagccagagagagtaaaaatgtagactggccagtcaatgatgttctaggcacactgtaatccagacttgggtctgataactttttttttttttagaaatgaggtcttgctatcttgtctgggccagacttgaacttctgggctcaagtgatcctcccatctcagcctcccaggtagctgggactgcaggcacatgccagtgagctcatctctaacttttaaactaggcctaaagccactaacctttttctcattggtggagtgaaaagtgatgcaggagacaggaagcaagtattcttttagatccggctctgccgctgaactagttatttggccataggaacatcatttgtccactttgggattcactttctccatctgtcaagtgaaggcattgaacttggaagactctcaagttctcttccatatgtaaaaacagatttatgggtccagattctgtggaggtcacagtgttttttccaattttttacaatcagttgcccacatttataaatcagaaaattctgtataaaatatgaatttgggctgggcgcagtggctcatgcctgtaatcccaacactttgggaagccgaggtgggcggatcaggagttcgaaactagcctggccaacatggtgaaacccgtctctactaaagatacaaaaattagccaggcgtggtggtgcatgcctggagtctcagctactcgggaggctgaggcaggagaatcgcttgaacccaggaggcagaggttgcagtgacctgagatcacaccactgcactccagcctgggtgacagagcaagactccgtctcaaaaaaaaaaaaaaaaaaaaaaaaaaaaatatatatatatatatatatatatatgaatgaatttggggcttcttgaaaaattgaaaatgctggcaacagcagccctacatttctgcatagttgtgatggccatggctgagtaatgggttccccttcagacagggcatgtcactttagacagtgtgccaccatccccacctcaagtcaacttcactcacccctgtaggcctttgagtttgtgacccttttttaagtattagaattagtacagtttcatcaatgttacaagtgaggtttttttctatcatacctcagatgatggaagtcagtgacctaatctatgacactaacatatatttaattcattacaagcagtagccaagaagggcacatggagctttgcagggacgctcgcaggaggacaccagagagtgctagagctgcttatggtaatgtgacctacaactcagagcctaattgtgtcaggtgaagtggcctggacagtttactctctgttctcagagttaacaagctcccatcacataactttctttgtgaatattaaataagcctacgctggaaagcaaatgtcaagttgccagggaggagaggtttgcacagcaagtgcagaatgattcgtgtggcttctaggctttgtagttaatcttttattaactgtccttattttctttttaaaattaaccttattattcctttcaactggatctaactaaggaaatgctatgaaggaggtatttttatttttgcttttaaataatgtagcaggagcccatgaagccagtgcaaccctttaaagatggtgatttctcatggttatgaggaagattcattggtttgtgtgagataaaaaccagacaaataccccacgttgtttctttactaaactcccttatgcctccctcacaatgctgatttttctaattttacagaaaactgaggctgagtatattcaaatggtttaaatgatgggatcactttttttgtttgtttttgagacagggtcttgttctgtcaccgaggctggagtgcagtggggcgatctgggcttactgcaacctctgcctcttgggctcaagtgatcctcccatctcagccttccgagtagcagggactacaagcatgcgccaccatcacagagctaatttttgtattttttgtggagatagggtcttcctgtggtgcgcaggctggtctagaactcttgggctcaagcgatccacctgcctcggcctcccaaagtgtggggattacaggcatgagccaccgtgcctggccgggatcacattctaataaatgttagaacaaaggccagaacttgttctgactcttataccattgtattaaatggtttgtccttgttttcctttagggaattttcctaaatttaagaatatagcaactaaaaagggaaatgattactataaaagtaaggatagtggccaggggtgtggtggctcacacctgtaatcccagaactttgggagactgaggcaggcagatcacttgagattaggagtttgagactagcctgtctaacatggcgaaaccccatctctactaaaaatacaaaaattagctgggcgtggtggtgtgcacctgtaattccagttactcaggaggctgaggtg

SEQ ID NO: 94702 - DNA, 13776 bp, Homo sapiens
tcagtctcccaaagtgctgggattacaggtgtgagccactgtgcccggcctttttttattttctgtagggatgaggtctcactatgttgcccaggttggtctcaaactcctaggctcaaaccattctcccgccttggtctcccaaagtgctgggattacaggcgtgagccaccatgcctggccttaatctacttttctgatttagactatgacctggtctccattcattcttcattcattcattcattcattcattcattcagcaacatgcattaaatgccctctccctgccaggtattttgctaggctctggggattcaaaatgaaacatccatggtccttagggagttcacaaacaagtgaaggagccaataattagctctgacgacataagaagatactatagcagaggtgggtagaaagtgcaatggatcacgtggacacagagaaagcaacctggattcggggaaagcagcacagaagagctgatgtgtgagacgaagcttaaaggagaagcagagtgcaccaggctgcaaaatgcaggaagtgagaaaggtgtgactacccagatacagtcaggaaactcaacaatctggtttggcagagcagtagttcttaaactgtattctacacaaaaatcagccccggtatcattaaaatgcaggttccgaggtaycagcaacagctggctcagtagttctggagcacaggaatttgcattttccattcagtaggtctcgtgcccaggaatcatgtcctgaatgattctgaagaagatggtccacagactacactgagaaacactgggctagagtacggggcacatggcaggaggaaggagaggggattgggatgaagaagaaaattatttttatttttattttttgagacagagtcttgctctgtcgcccaggctagagtgcagtagcgtaatctcagstcactgcaacctccacctcccggattccagcgattctcctgcctcagcctcccaagtagttgggactacgggcgtgcaccaccacgcctggctaatttttgtatttttagtagagatggggtttcaccatgttcgccaggctggtcttgaactcctggcctcaggtgatacaccctccttggcctcccaaagtgctgggattacaggcgtgagccactgcgcctggcccgaagcagaaattttggtcaggaccacattgtgctaaggaaatgggagctgagtttataggcagtgaggcatcctttgggaaagccctgatgaaatgcattggaaagcccagtctagaggcagtatcaatgacggcctggagaaaaagagggtcactgtatgtagggaaggcatgaaggatctctgtaacggaaaggattcagagatcaaaccacaacaaggaccctgatgctaatacccactcatgagctaggggctgcaggacatgccccagctcctaggagacaagtaccctgctgagcagacaaatagcctggactttgtaacagccaaagtggcccacatggcactcgcggggctgtgcagcatccaggcaggggacactgcctggcattctaaaggcctgtgctgagtcatctttcacaggaaccagcttctcaagtctctgggatcctgttttacaagctgttactaaccttcccttggcttccaggccaaggaagaagaaagaataaatattaaccaaaggtacggctgtggcagggtgcccagggcccctccctttccttctctccccgtaccccctgccctagaagctacaataaactgctgatctcccggtttcatgatcatcttggctgatcctgcrgaaaagggacagaggtgagcacctctcagagcagccctgaggctggagaggacttggtggtaacctgctgtttttctgggaggggccctagagctggctaaggagaactcacatgactgcctgggcctgacttccagggaggggctctcaccacaccagactgtttctcagggtaatttcccagttgactggcacaaaggggtgactgcataacactattccctttcttgggtttcgatttcctcctctgtaagatgatgaagttggactccaagaaccgcacctcatcctatcattccatgagctcagctgattggggctaaacattctctgctgggtgctgctttcctccaacatcccaccctcacgagggccaggaggtatttcggatcccctcgggacatacccatctatttatttattgttttcttttcaattttttttttttttttttgagatgagtcttactctgtcacccaggttggagtgcagtgttgcaatctcagctcactgcaacttctgcctcccgggttcaagtgattctcctgcttcagcctcccaagtagctgggattacaggctcctgccactgtgcctggctaatttttgtatttttagtagagatggggtttcaccatgttggtcaggctggtctcaaactcctgacctcaggtgatccgcctgccttggcctcccaaagtgctggaattacaggcgtgagattacaggcgtgagcctctgctcctggcctatttatttattgctgtctgagcaattactactaggagcaattaataacagccaacattttttagtccattctatgtgtcaggcactgttaagcatctcatatttatacattatcttatttgctcatcacaacaactctgtgaagtaaatactattattatttcataaatgaaaaaattgaggctcagataaattaagtaacttgtccaagaacattcagccagtaaaacagctgagaccctatcagctccaggtcagtaaactccaaagcccatggtctttccattctatcacacttacaacactggttaaccaaggaccagtgaagtgcagatcacagcctctaccagggttgctggggaagggggttggggtggggcctggggagagggaggggagtaaagatagacccagtgatgaaattatttttatttatttatttatttatttatttattttgagacagagtctcgctctgtcacccagggtagagtgcagtggcacgatctcagctcactgcaacctccacctcccgggttcaagtgattctcctgcctcagcctcccaagcagctgggactacaggcacacgccaccacacccaactaatttttgtatttttagtagagacggggtttcactatattggccaggctggtcttgaactcctgacctcgtgatccacccgcctccacctcccaaagtgctaggattacaggcatgagccaccacgcccggcctgaaattatttattgaatgagaataataatggtgactgcttcaattgatgattgtgagaattaaagaaataataagttcataagtgcttttaaaggcagctagtgatatataacagtaactattgttattaataaatgctatataaccatttatgtagttgtcattttttaaactgtgttaacatacacataacataaaatttgccatcttgccaggcgcggtggctctcgcctgtaatcccagcactttgggaggatgaggcaggcagatcaccggaggttgggagttcgagaccagcctgagcaacacggagaaatcccgtctctactaaaaatacaaaattagccaggcatggtggcgcatgcctgtaatcccagctactcaggaggatgaggcaggagaattacttgaacccaggaggtggaggttgcagtgagccgagatcatgccattgcactctagcccggacaataagagtgaaactctgtatccaaaaaaaaaaaaattgccatcttaggctgggtgcagtggctcatgcctgtaatcccagcactttgggaggctaaggcaggcagattgcttgagctcaggagtttgagaccagcctgggcaacatagcaaaatcccatctctccagaaaaatagctgggtgtggtggcatgcctgtgatcccagctactttggggggctgaggtgggaggatcgcttgagcccaggatgttgaggctgcagtaagccaagattccaccactgcactccagcctgggggacagagtgagaccctgcctaaaaaccgaccgggcgcagtggctcacgcctgtaatcccagcactttgggaggccgaggcgggtggatcatctgagctcagaagttggagaccagcctggccaacatggtgaaaccccctctctactaaaaaatacaaaacttagccaggcatgctggcaggtgccttaatcccagctacttgggaggcagaggcaggagaatcgtttgaatccgggaggcagaggttgcagtaaaccaacataaagccattgcactcaaaactgggggacaagagtgagacttctctcaaaaaaaaaaaattgccattttgaccacttttaaatatacagttcagcgatattaaatgtattcatattgttgtgcaaccatcaccaccatccatctccagaattttttcatcttatcaaactgaaactgccattggttcttaatagttattaatataagcttttattattatgctaaatatttgtatgctcctgtctccttaacaaaaggcagtaagttgtagtagagggcacgaggtagagattttggcccttggttcaaattcagattcccgcacagtctaaatgaacttgaataattcacttaaatcctcaacatcggttcctctaggtagataataccaacacatagagaccacacagggttgtagttagtattctatcagatcaccggggttaaagtactttgaaaactccatgcaaagtgctccacaaatattagattggtggacactttcatgctcctagatcagctcttggaacaaactaggaactgaatgaaccctgatgctccaagttgttgggccatactgcctcctggtggtagtcatgaaacgtgcagagtctttgctgcttggggtgctcctggggttggttgggtaagatcaggagctggccgagaatgtgaggaaaacccaaagtacccggccagggagggtatttttccttccccgctgaagacactccccaggccagtcccttgacgatggaagagtcagtctcctctctgtgctctcaactttctcttactgcttttgcttatgctgttccaccttccaactggtgcctcttccaaaccctaaatcttcagaccttctcatatccaactcttccagaagggatccctgaaccatgcctcccagggtatcccgcaccatttttgtttgtttgtttgagacggagtcttgctctgtcacccaggctgagtgcaatggcattatctccgctcactgcagcctccacctcgcggcttcaagtgattctcttgtctcaccctcccgagtagcaaaggttacaggcacgtgccaccacgcccagctaatttttgtattcttagtagagacagggtttcaccatgttggccaggctgatctcgaactcctgacctcagctgatccacctgccttggcctcccaaagtgctgggattacaggcgtgagccaccacacctggccatccctcaccatttttttaaacctacagaattcacagcctgtacttgactgctattatatagttctctccaaactatgtttcggggtttcttttttgtttgttttctgtctcttgtttgagacagggcctcactctgtcgcccaggctggagtgcagtggcgcaatcatggctcactgaagtctcagcctccccggctcaagcaattctcctgcctcagcctcccgagtacctgggaccacaggcatgtgccatcacacaggcaaattttttactttgtaaaaacgggttcctattatgttgcctaggctggtctcaaacacctgggctcaagtgatccttctgcattggtttcctgaagtgctgggattacaggcatgagccactgtgcctggccaaactgtggttctttggtagaatttcctggttttaaaaaaaaaaaaaagtgggctctagtcttgccggggactcgtggggtaacttgttcttgggagccagcggtatggcgtcgggctgcaagattggcccgtccatcctcaacagcgacctggccaatttaggggccaagtgcctccagatgctagactctggggccgattatctgcatctggatgtaatggatgggcattttgttcccaacatcacctttggtcaccctgtggtagaaagccttcraaagyagctaggccaggaccctttctttgacatgcacatgatggtgtccaagccagaacagtgggtaaagccaatggctgtagcagaagccaatcagtacacctttcatctcgaggctactgagaacccagggactttgattaaagacattcgggagaatgggatgaaggttggccttgccatcaaaccaggaacctcagttgagtatttggcaccatgggctaatcaaatagatatggccttggttatgacagtggaaccggggtttggagagcagaaattcatggaagatatgatgccaaaggttcactggttgaggacccagttcccatctttggatatagagggcgatggtggagtaggttctgacactgtccataagtgtgcagaggcaggagctaacatgactgtatctggcagtgctattatgaggagtgaagaccccagatctgtgatcaacctattaagaaatatttgctcagaagctgctcagaaacgttctcttgatcgatgaaaccataaggagcccaatgtttctgttcatgaaatctcccttttactggaaaacaggaatattgactaccaaatcatcatgaaattgaagctgtactgcttttttgagcagttattcattccagtgattaaaactgattgtgcagaatattctaagaggtcagaaattggtgtgtataactacatttttagtgatgcaatttaatgattagtgagtaagatactgtttttattgagagacttgatttttataaagagtaaaaatacggctgcattaaggttacaaacagaaaagtgtcttaatgcctaaggagggcatattagctacactacaaaaacaaattttgtctgtacttctgaaaagaattttgttgtttctcagctgttttccaaaagcaaaggaagtctttatggcttttttctatttcatgttatttgtgatttgtttataagtttgggtgggatggcataccatattcttggttcttaaaatctatcacttttcaccttacacttaatgtgtaaaaactataaaaacaatgcgtgaaacccaggggttctaaaatacaagcatagattttatcagggtgtttttgtcaaagcaggttattcagtgattcctccccaccattcttaaggacgttaaataatgctgttgtgttagctctgagtagaaaggaaaaagtaaaaacctctgtatggaagtaatattgggttgaattctgactgcccttttctagctggacctttaacaaatcacccagtcttttttgtgtttctctgaagtcatttatacattaaatgtaattataacaactgtggggttgtgttgagaattaagaggtaacactatatatgtaaagtttctagtactagtcccagaatttagaatatgctcaatacaaagtagatagcattatataagtttatatttttgtgagttataaagtactttgatatattctcattaaatctgtaaatcacctctataagtaagtggtaataataaagcagatatttttgtccccatttaaaaaaaaaaaaaaagtgttccctaacagtttccagagcacgagctgaagggattgacgggctcctcaaaggctatacacttttcatggccttgtctcttccaggtacagtgctggctacttttacatatatgttgtcaacaaatcctcaggataattctaaggcaattctactgcaaatgagatactatcttaatttacagttgacaaaaactgagtctcaggaaggttgcctgacctgctcaaggtcatatagctagtaagggtgcagtataggttcgaacccacctgcctgattacgtctcccatgccaactcctatccattggtagcacctgcctgaaacagtgacttgagaaagaattcctaggttttgaattcttaattattgaattaagagggtaaagtgccaggtttgattagttgtggctgccatgagtgaggaatggtgagtggttatgtacaagcctggtatttgccattttcccattaccccatgccagatagttctacaggaggctactcaacttgattctgaacatggttttaagaaagaatgatccagcctgggcaacaatgtaaaaccccatctctacaaaaaatacaaaaattctccagatgtggtagcatgtgcctgtggtcccagccactcgggaggctgaggtgggaggaccacttgagtatgggaggtcgaggctgcagtgagctgagatcacaccactgcactccagcctgggtgacagagtgagactttgtctcaaaaaataaactaaaacaaacaaaaaaaggaatgatatgttgagtaggcatgagctctaatgttaagactgacctgtattaaaacccagctcatttgtttttagaactttgagcagttacttggcctgttgaatgttgaagccttacattccatttgtgttaaatatgcataataatctctgggttgttatgaggttttaatgggattaattctgtaaatgctcctggcatggttcctggcatagagtaagtactcaactggtgttacttccctccccctcccatcgctctgtcacccaggcgggagtgcagtggcacactcttggctcactgcaaccccgcctctgaagttcaagcgattctcctgcctcagcctcccaagtagctgggactacagtcgcctgccatcacacccggctaattttaatagagttggggtttcaccatgttggccaggctggtctcgaactcctggcctcaagtaatcttgattacttgagtaatcaaagtgctcccaaagtgctaggattacaggcgtgagccaccacacctggcccactgcaatgttttttacaatgataaaaattaggggggaaaacccctaaatgtctagctattgaagaatgactaaattatgtcaacttgatggaatataatgcagctattaaaagtgaaaattataaacaatatttttaataccttaagactgtataacaacatgaaaaataataaaatcaaagttaaaatttatttaaaaagaatagaaaattacagcaaaacaaccaggagaaaaaaatttacctttgttcttttgacaaggctgaatgaaaacttagtcttagacttagttctttaattgtaacaagagctctaattctgagtgaatctctgaaagggtagctataatctcccaacattttgaacccatttggcatgggttggggtggcgggagggcattgttcttattgaagaaataaggaaagaaaagcctttgaattaggccctgacactgcctccatgtccaggaaacgctttaagagcaccaagtcattaatcacaagcttttagagcaggaataagccattctaattaatttcttaaaaacaaatttatttttggagacagggtctcactcttgcccaggctggagtgcagtggcgcaatcacagctcactatagcctctacctcccgggctcaagtgattctcccacctcagcctccaaagtagctgggactacaggtgcacgctaccatacccaggtaatttttgtatttgttttattttgtagagatggggtttcaccatgttgcccaggctaaaaataaatttatttgagtaatagaaactatggattactaaacattcattacagaacattaagcatttgtgagtccacttctgggctctgagaagaagtaatgaggaaagcaaatagaatcaagtgataagaaaatcgtgtatccacagtgggtgggaagggggcatggtgctgttcaacagaaagctagcatacatggcagtgggggcgtgtggggggctggttacagagctggtgctctctgaaggatcaggccccttctattcacgttaggattcctgttttcctccacgctggttctgatgtaaaaaaacaaaaacaaaacaaaacaaaaaaacgcaaaagaaatcatgacagaacataggatgctgtgacttctcagaagctcagtctttaattcatggaaccagcgcgacctgaaacaacctgcatcaccaaccctggggcacaaatcaggtcacatctcttccattgttcttttcttttgtctctctctctttctcttttttgagatgggatctcgctctgtcacccaggctagagtgcagaggcatgatcagagctcactgcagccttgacttcctgtgctcaagtgatcctctcacctcagcttcccaagtagctgagactatggcttgcactaccacacacggcccttctacttttcaaaacaaaaccaccttgaccacccatgtgccaggttagcagaaagtccaatatcccttctcctcctcttgagctgtccaacatccctggtgtttactccatccaaggggccagctttgtttccaagtgcttgaaggacagagaactgaagacacatttccactcatcagagaatctgttttggggaaccactgctgccgtcattgccacatgtgtggctgatgaacaccctgtctgcacagcctgacatgccccttcccctgctgcagggaccctgctgctctggatgtctgtgatgttcaatgctaggctcctaaggtcaccctcacatgcttggccatttttcctggggttaggtggcaatgactgggtcagaaggtttccagcctcagcatatgttgtgccagaactccctgccactccactaccaccaccactaccaccaccatcaccaccatcaccacctccaccaccatcaccacctcaacttcttccatcatgaccaccaccaccaacaccatcaccaccatctctaccgccattcaccaccaccacctccaccgccatcaccaccttcacctctacccccaccacaaccactatgtgctcacacttgtcaccagggctaactcttcccagtggattctcttagcccactgtcctgccagtgaatcttattcaacaccatctcaatccatctgataagttctaagagcaggaactctcaaaagagaagtgatatagtctcaatcctcatctccacaggagacgccatggcttttattttgcccaaatttccttaccccttgcccttttatttaccatcatcaggctgcaaaaagcattccatttcataatctgccctatggcagtgggtgcctccttgccttctgctgatataactaaggatggatggcagggactcaggtgtcttaacactggacacaaaatctgtggcaagtggtcttgcctccacttacagaagtgacagacacctttaaagatccacccaatcaggcccctgagacatttaatcttggctttcagattggtttgttttgtgtttgtaatgagctgatgattccccccgagtgcatcaccagctcctagcctcaaactcttgggctcaagtgatcttcccacttcagccttccaagtaactaggactacagccatgtgccatcaagcctggctaattttctgtaggaacaaggtctcactgtgtggcccaggctggtcttgaactcctgggctcaagtgatctgcccaccttggcctcccaatatgttgggattacaggcgtgagccattgtgcctggactttaatttctttcagtgaaattttacagttttcaatttataggttttttctacaactatttttctttttttggagatggaatctcgctgttgtcgtccaggctggaatgcaatggtgcgatcttggctaacttcaaccttcgcctcccaggtttaagcaattctcctgtctcagcttcccaaatggctgggattacaggcgcccacctaatttttgtatttttagtagagatggggtttcaccatgttggccaggctggtctcaaactcttgacctcaggtgatctgcccaccttggcctcccaaagtgctggattacagacgtgagccaccgcacccagcccattgcctgatttttttttaattatttatttatttatttattttaagagtattggttaagttggccgggcgcagtggctcacgcctgtaatcccaacgctttgggaggcagaggtgagcgaatcacctgaggtcaggagttcaagaacagcctggccaacatggtgaaaccccatctctactaaaaatacaaaaattagccaggcatagtggtgggcacctgtaatcccagctactcgggaggctgaggcaggagaatgccttgaacctgggaggtggaggttgcagtgagctgagatcatgcctctgcactccagcctgggcaacaagagagaaactccatctcagaaaaaagaaaaaaaaaaaagagtattggttaagtattttgttggatagtcttcaatttgagtttgtctgacattttctcatgattaaattgaagttaagcatattaggaagaatactaatttttttttttttttttttttttttttgagacagattcttgttctgtcacccaggctggagtatagtggcacaatctcagctcactgcaacctctgctcctgggttcaagcaattctcctgccccagcctcccaagtagctgggactacaggcatgcaccatgacatccagctaatttttatatttttggtaaagatggggtttcgccatgttggccaagctggtcttgaactcctgacctcaagtgatctgcccaccttggcctcccgaagtgctgggattatagacatgagccactgtgcccagcctttttactatattttgagttaatttcttagtcattgtcctgggaattacaattaacatcttatttaataacaacttagtttagataaatgccaacttaatttcattattacacaaaaaatgtgctcctatatagctttggttccctttctccttctttgtgctattattgtcacacaaaatacatcttaatacattgtgtgcattatcaatgcaggtttataattactgcattatgtacttatcttttaaataggataggaaaaaattaaacaaaattaaacaagaatacatttatgctaccttttatatttacctatggagttacctttaatggtttattttatttcttcatgtagattcaaattactgtctactgtcatttcagtctgaaagacctcctctaggatttccttttttgtttttttgtttttgagacagagtcttgctctgttgcccagtctggagtgtagtggcgcaatctcggctcactataacctctgcctcctaggttcaagcaattcttatgcctcggcctcccaagtagctgggattacaggtgcgtgccactacgcctggctaagttttttttatttttagtagagacgaggtttcaccatgttggccaggctgatctcaaattcctgacctcagatgatccacctgcctcggcctcccaaagtgctgagattacaggggtgagccaccgtgcctggcctaggatttcttatacgtcaggtttactagtgatgaaatcttccagtctttatcttagaatgttttaatgtcttctttccctccttcatttttgaagaatagt

SEQ ID NO: 94703 - DNA, 60586 bp, Homo sapiens
  misc_feature (1)...(60586): n = A,T,C or G
ttatactttttaacaaacagttgctagtagtttgcttaatgtaagatatgggatgaatattttcatgatggcccctgcatctaagttatcatttagcagtacctgccttatctcttgtacagaatcagattagacagcataggaagaatgaaaaggtgaggtgggataataaggaatgttgtttgtggaaacataatggttgcttcaatttgagtgtaaactgtcctttttactgaagcaattgcaaccaagtgtgtkagtttacaggtgcctacattgcttttttggcttaggtattgtttgggttttaatactgactggtatataatacagacaaatcaactcaatcaaagaaaccaactcaatcaaagaaagatgggtctacatacaacaaaactgaacaaaatctgcaagaagagtgattcatacatgggctattgaggcaacatgaaatggacattaatcgactaagtaaaaaacagatttcttgaagaattaataaagaacttttgttttggaagttcgctattgtttaaaattagccagatgtggtggcctgcacctacagtcccagctactcaggaggctgaggtggaaggatcacttgagcccaagaggcggaggttgcagtgagctgagactgtgtcgctgcactacagacagyctcctgcatgacagagccagaccctgtctcaaaacgtgggggggaggaaagttctctattgtttgaaataataacgaaacattaaaggctctaaagtcagctaaccaatagtcctaaaaatagaatggctcaaaaagattgtccaattttggaaaactaacatttcaaaaagttgtttcattttttatgaatcctaagatttccatatcctagaaaactaacatctcagaaaaaaaaaaaagatggtaaaacacaattgccatcatctatgcctgttctgtaaaaatacagagaagaagagagtgtttggtttttttaaccaggatttggaaagccattatttatctctgtgatagaataacaatatgttttggatggagggtaattctaggggaaattatatttctgaacaacagtgttggtttgtgcaggaaaatcaccaaagaacatgactagaaagtgtatagctacagtttccctcttttaaatgggaatagcaaaacatataaagaatattgataggccgggtgcagtggctcacgcctgtaatcccagcactttgggaggccgaggcgggcagatcaagaggtcaggagatcgagaccatcatggctaacacggtgaaaccccgtctctactaaaaaatacaaaaaattacccaggcgtggtggtgggcgcctgtagtcccagctactcgggaggctgaggcaggcaaatggtgtgaatccgggaggcggagcttgcagtgagccgagatcgcgccactgcactccagcctgggtgacagagcgagagactctgtctcaaaaaaaaaaaaaaaaaaaaaaaagagtattgatagtttaaacctactacaattttgcatctagtttctcaagtagttctgtggatttagaaccaacatttgctgaggggaaagaattaccaacatcaaagtcctaggatgtgtcagggcaccagaagagaagttttgtcactgtaaaataactctcttggcagagcatgatagagactgtaaacagcaggttacttcaatggttatgtgcgattcagtgaagatctctacattaattgaagcacaactcaagcaattcaatgtagctctgatatgctggagaacaatctagcagttagctatcagcggtggtgtggttccttttaagcaaaggtagcttgtagtcttcagacttgtgacctgtgcagcctccacattcaagtgaggttaaagggactgctgttggaacatggatcactccaggcctatctgtacacatggacccctcttctgttggcttccactgcaacaaaaagccaataaacactaaatcaacatctggcaactgttaaaagaggaatgatgcaacagcagggcagaaagataagaaagctcaaactttcctggcataggcacaaagttcgttgcttaatgtakttatgagataataaatatctatgaaaaactatttgtcagtttatttaagagagacgtgataataagaaaccctttaattctgcttaataaaagcaactgatatttatttgggggcagaaactatataaagtctttatataagctgtttcgtttaatcctctcaacagtctcatggctaggtattattatccccactttacaatgaaaaagaatggtggcaaaataatttaattttttaaatatttcacaggtaataagagatgaagctggaatctgaaaaccagaaagtctaacttctgagaccatgttcttagtattgtatatgcttacatagagagccttgctgtttccctacagaatttagctgtttcctttcctttattgtttcatccccagaaaactatcttagtaacctctttaaaagtaaagtagatggctgttaacttaaaatactatatatgacaccatgtaatctttttttttctttttgagatggagttttactcttgttgcccaggctggagtgcaatggcgtgatctcagcttactgcaacctccacctcccaagttcaagcaattctcctgcctcagcctcccaagtagctggtattacaggcgtccaccaccacacccagctaatttttttgtacttttagtagagatggggtttcaacatgttggccaggctggtctcgaactcctgacctcaggtgatccacgcacctcagcttcccgaagtgctgagattacaggcatgagccactgtgcctggctgacaccatgcaatcttaaaagctgaatgactatttttgaaatcctatggataatctggcaaaaataattgagcttatcctttcgtatagtggattgattagaaatgaagttctactcaagacccattaatgtaggaccatcaagttaaactttttttcttttccactctgaaaaaatacaacagataatgtttgcttctaaataaaattgcagaaccactagcaattcattctcagttggatctccagagctgaccatacaaacttctacttgtttctcccattcctcttagttgtcaatcctttcccattactttcccatttctctcagttgcaaatccaaaccattttcacatttcaagacttaattcctattcccccatctttcaaacttgtctcctatgttactgtggaaactgaggccatcagacttgaattctatgaactctctcctgccagatctacaaatttatccccatgttcacccatccttctaacattctcttagaagataaggtctcatctccttctggcccaaatcaaattctctacctgtgtttttggttctgtcctctcccatctctgcaaggaccttgaaccattaattttcctttctgcctcttgtattgtgttagatttgccaaatatattgctcccatacccacaatttcttatgaggggaggtgatgttcccatgatctctgcaaaggaatagccatgtttcgcactatgcaaacttctctgtactacatgattggaccaagtgggcacctatgtcaaagggcatccaatttacagagtgcccagataattcagacatggtctggcatgaaatgaggagcacggcctgtgacctttttaaattttttcaaaggctgcttagtgctctaagaacaagatatccattttaagtgaaatgagtggatttttattattagaaaagttatgaaatgatctttgatgcatgtgttgcctgtgaaagtcattcactttaatgttcagtgggagtaagtgtaatccatgtaattgctagaaagctaggcatcttagcacaggaataatcacactgaacattagtaatgataaaaatatcatttatagcggcctatcatatggattttaaatacatcatctctgtcatgataatcccatgatataggttctaatattaccaattttcagataaaaaaaaaaaaactaaggcccagagaacttgggtcactcaattaataagcggcagagctaattagagtctgggtccaaagcttaagcactcttcgtcttctttatatttggctttttcctagccaaaaacatggaggcattgcttacttttactttatcattgttatcttggcataacatcaaaataattaggagctgatatacctaagtgtataaaacaggataaaattaattgatgaggaattagataaggaaaataaaatcaaactaggggcaaatttcatgtataaaaatgtgtactgtgccatacattttgtaagcggagtctctaaagattgcttcataaggaagaagtgaataatgactttgggaacacttggtaacccctaggactcaaaagattgggtgtgagaagttattagtaagcatatgtattaggcaaaatacagtgagatgaacctggaacaaatgctcgctgaatgcacttagaaatattatcaggcgactcagcctatagagcatacgggttagaatgtctattttaagaaggagcggatatttactaaatgctaatttgagcaaagttctacaaaaatatcactgaccatgaatattcaggcattgacatgctacaaaatagcatatcgaaaagaacatctgttgccctaaagatggtttcctgcacagaacgtctccaaattttcagcattcataggctggccccgtttcttcttggttaacatttagaggcacgcctaaacttagaggaacacctctctaaaccaaggagacacttaaagagaaaaggagtaaagatggtgatgggcttataaagagcaatgtaatagtgtctttgaagcaaaagctaacttaatgaaaacgtggtcccaatttccttaaatctggatcaccgtacgacttctgtaatacttattatttccccagctggcaaataaactggagttcaagtgggaaaaaacaaggtattgttcagacttatgatttttggggtcaaagattctgagcaataacctattaaaaaacccagcttttgatttgagtatgtaagtaagtacatgggaggaacgtatggatctggagtggtggtaaatacagagcatgtttgcttcgcaaagcagattagctcatacttaataatagagtaaatctgttgggccatgactcaatgcacccaaattctctagattgctatgtctctactcgctaagccttcgggaacaacaagcacagaacttttagggtgctgtctcactgatgtcggcgttagctctggtagtccaggtcaagattataccaaagattcaggacttaaattcctgcagaatgtaagcccctttccaagttctctgctttactgtatcctgtttattttcaaactcaaatggaaaaaaacgaaacaaaaaccttgggcttcaagaggcatcctgccgcaaggcccagcgatgtgaattttcaacaaccgtctcaggcagatttcatgctgatggttcaggcactaaactttgaaaaacacagtatcacagagtagggatggtgatgtaagagtcatctgtaaaagctgtgctgttttggcagcctgggaggctaaggtttagtctaggcgactaaggtttagtccgggctgtattcacacccaaaacaactaaaaaagcggaggagtctttgagtcaatccctgaagctccggctaagaggaaactcgcccacgctccagggcagcgacgccggctccacctcagccacggctgtctcaagcttctcggggttttccgccggctccacccgagccacaagtctacaggactcctcggagctttccgccgggacgcaagacccaccgccagrggttggtacctcctagagaacagcgaagcgcatcccgagggccgccggccggaagcgccctccagacccgccccctgccctccggagccggaagctgggcatctgcagctggctcggcgcactccactgaccgtcccgacgatgctacgcgcgcccggctgcctcctccggacctccgtagcgcctgccgcggccctggctgcggcgctgctctcgtcgcttgcgcgctgctctcttctagagccgagggacccggtggcctcgtcgctcagcccctatttcggcaccaagactcgctacgaggatgtcaaccccgtgctattgtcgggccccgaggctccgtggcgggaccctgagctgctggaggggacctgcaccccggtgcagctggtcgccctcattcgccacggcacccgctaccccacggkcaaacagatccgcaagctgaggcagctgcacgggttgctgcaggcccgcgggtccagggatggcggggctagtagtaccggcagccgcgacctgggtgcagcgctggccgactggcctttgtggtacgcggactggatggacgggcagctagtagaraagggacggcaggatatgcgacagctggcgctgcgtctggcctcgctcttcccggcccttttcagccgtgagaactacggccgcctgcggctcatcaccagttccaagcaccgctgcatggatagcagcgccgccttcctgcaggggctgtggcagcactaccaccctggcttgccgccgccggacgtcgcaggtgaccccccgggcggcccgtgtgctgtcccggtcctcccacccgccctggatgctctcccgcctcccccagaccctgggcttttccgatgccccccagttctctttcctcttttcccaagccatcatccctcgggctacgtcctccctgtcgagggatattacagacttggctatctctttttccccttacacgtatgttcatttattaattcatcaggtgtaaattcagcaccttgtactcgctgcctgctttagtagagttggggatccaacaggaaaggggacagacgaggtctcccgcaatttttgcgctcccgttcccaaactgaattgccccttcgagcgccaacccatcccttcccccttccctggcgtctagtttcacaattgggcgcacgttttaaaaaacagaatctagaattttcttcctcgggctttgcttccgatactagtttttccttctttctttttttttttttttaaactcatcatctttttcagatgacagttttagacctacaccctgttttaggaacctgatctcaagcctttgtgtcctccttttttcttctgttttgttcatgtttttactgtagcgttcccatcgttgtagctgtggtccgtggtcacaagcagtaacaactcatttattccattaattacactttttcgaaatttgagaaatcatctagtaaggccccgttatttcacaggtgaagaacccgagcccaagagtatgccttcttaattgtctttctctaaggtctagtatccaagtcttctgttttcctagaatggttctttttctcttagaaaatgttgtaatagttacaaataataatgatagcatacacctcatgcctattgtatgccaggtatgcctcacatttattttacaaaatccttacaaccacaatctggagttgatagtattttccccttatctcaaagatgaggaaattgatacacgaacacattaaataatttgcccattttcatacagctagctgtggacccaggaaatctgattcagagcttgctttcttagccattatgctatactgcctccatttgtccaataacatacctaataagaataaaaacatgtaacatttttgtaccacagagatgagcaagcattaatagtttcttgatcacttttaaggccagaattgaagtgaggattattgtttagcttcaaagcccaagtgaaaaattagaagtaggctggtttgtaatttcttctgtagctgttgaacagtgaaaccatctgtaagggatttctccactgattctgtgtcatgttattgtgggtaattcagttagctgacttgtgtctaattacttgttgaactgtgtttttttttaaatatatactttttccattagcatgagtgaaaattcctcataaatctgttaaattaacagaatggtgaaagcagaacatattttaatataacacaatatctatagcgacttcctggaacaagtgaatttttgttctcagatggcattgcgaagactggcatttgactctcagtacagagccagggatgaaaatactacagttcagaataagcccactcctgaccgttttcagtgtcagatagcaaaccctttgcctagccactttattattctctatagacaatagttttgcctattatgtacatctggtcttttgagggagtctgctgaattagatttgtagttttgtagaaacagaacaatgcctttgtttttgtttaaagactagcaataattagatagtaacaaggataaaatacccagatgcacttgggaaattatattttagtgtacacagaaaaaaggtgacaaagttcgcttattttcctagtcaagatattttcttaagaattgcaatccagttgacaaagtgggcagaattatccatttcaagagaaacaaacatacatactgatttttttttgcatacacatccaaagcccagataaaactatattcaattttctcatattttatgtacaaaaatgatatacttggtgttcttttcgtggtaaattgttggagaaatgattgaaaaatgtgtgttttgaatatgactgaaaaaaacgtaaagggcacaccagtagttgaagcatgattatgaatgcttctccaatacatatttgttgcccaattgggggcataatgtaatttattaaattttatatagaaagttatctggggcttcagttaaaagataaaccaattcacaggcccagcacagtgaagcacaggagacccaaaacatcagtgcgttttgtgctgctgtcagtagtttttgtccaaagcagaatctttgtaaagtaatacagagttgggaaggttaattgagaaaataaaatactctgtttagactttggcttagagtgaaaaaatagattccatatgttgaattctctctcaccttgtaagtagaaactttgctgatttttagtttgctttctaaagttttccgtgcctgacagaaacagtacttattaatgtatgatgcaatttcattgcgtagcatctctacaacacatttaatcttcaatctctatttctttagccttttctagctattctcatgcgttacagccattataaatggggaataattttaccccaagagtttcctgaycaatatgtgcttatttcagctgtgcggattagtaagatgttagtgttcctttttcacacttaacattttcaataatttgaaactgtcatttatgtcagtgatttacaaatacatataaatttttttctctttcagatatggagtttggacctccaacagttaatgataaactaatgagattttttgatcactgtgagaagtttttaactgaagtagaaaaaaatgctacagctctttatcacgtggaagccttcaaaactggaccagaaatgcagaacattttaaaaaaagttgcagctactttgcaagtgccagtaaatgatttaaatgcaggtaatatgtctgttgtcttttatttgaacttaacagtttaaataattttgaactgtgaaaatgaaaacataaggaaacagtcttttttaaagacccataattgatctacattaagaaaataatatgttctgggtcaaaaaaattgtataccttgtgcttactatttaccatttttagattcatattcttctttgagtgttatttaaattactgtacaagattctagttatattctggagtttttttgagggcagagtaatataaagcctcaactgtaggcattatttttaaaacaaattatcttttctgaatttccccctgataaagtgatacaaatggaaaaatcatataaattctttagcttttgaagcagttcaaaagtacctgttaatgtgtaagaggggtaagttttagaaagtgaaaagcaaagtactatgatgttttttgagttatatgtagcaatgctgagaagatgagcagtcatgtctatcataagttattgcagtggatgggctgactatgcaacttaccatccaaactggtgggacactttcgaaagtgaaagggaacactattaataattttgccaggaaagcaggtgggaaaccatggcacatggtcacctagcaatgggagattaagaaaataagatttttttctgttttctaggaatttatrttccatagggtagatgttgacaaagatacatgcaaagattgtagattacattatactctgaattaatttccaaaagactggaagtagatgttggggaaaaaatagattagaatttatcagtcacagggcctggatgctttataaggatcaaaaagaagatgcctagactagcatttgaaattgaattttttctctctctccaaactggcagtacattggcatcgcctgtggagctttaaaaattatttactttattgggaaataattcaaacacgaagataacaaaaaaggctaatgtrgtgaacatccctatacccacaacttggttttactaaattttaactttgtgcttcagttacttgccttaaataaattgaggtctactggtccctttcctggatcccattcttcttcctttctcaccagtggtaattgttgtcatgaattgagcatttatattatcccatgccagttttatacataaatgggatattgttttgcagattttaaaacttttaagagtggtatcaaagtttataccagtccaaaattctatttttatgcaactttttgtttttgatgtaatgtttgcaattctagtcctacattttaaatgtatgtatttcattctacatctataccaatatctagccattattctgttagtaggcagttaggttgttgaaaaagattttttaaaactatgtttagtctctgaatgggcaagaattatgtattttactgatgaagtaactgacagcaacttctttttggaagcagtattaagtatagtggttaaaataatggattctggaattggactatttgcatttgaatcttgactctactatcctattgaataactatgatttttgacaagtttattaatgtctttatgccacagtttccttttctgtaaaatgaacatgggaattattcttgtcttataggattattgcaaagattatataagattaattcatacaaagcatttagtacctggcgcagtaattgcgcaataaatacttttgctatttaaatacccttttgtttacatagggggtgatgctatatgtattttcagtaacttactatttttacttaacaatatatttgtctctagacaaatatagaactgtctcattcttttaaatcctgtgttatttcatgggacatatgaatgactcgatttgtaagtcaatgctagttaaattgtttaacccatcatcgaattttactgctgtaagaggctgttgctaatgcagtccaaattctttttatagaaaccattttcctactgaagtttttcttagtttttaactctttcaggtaatgctacagtgaacattcttgtagtctgttttttacacttgagagtttatttgtaagataaaataggtgaggccgagtgccgtggcataacctataatcccagcactttgggaggccaaggtgggtggatcactggagcccaggagttcaagaccagccttggcaacatggtgaaaccctgcctctatcaaagacacaaaagttagccagtcttataacttggtctccaaataaataaatagatttctaaaaatgttttttaaagataaataggtgaaattgctgggttaacacacatgaatattttacatcttgacatatatttttaaattgttctctgaaggtgtagtaaaaatttatatccacagtatatgagaatgttcattttcccatatcttccaacagtagatattattagtcattttaattttcgccaatttgattaatgaaaaatagtatctagctttaatttgcagttctttgattacttctgaaagtgaacatattttcatgtttagtagccatttgcatttcttctaaaaattaccccttcataattttgttcattttctattgggttatttttgttttcttatgaatcacaaataccttttatgtattatggatatattaattatatcttttaattctgcctgacaaaggattcgccctttgcttgttgtatgttgctaatattttaatttcttgcttatctcttaggtttgttgatggtgcctttgattgcacagaagtttacatcttttacatagccatatctgtctcttcattatggcttctgagtgttgtattttgtctaggaatcctcccaccgcaagattattatgttttcctattgtcttccttttttgttgttttatttttttctcaggggagtggagggaaagggtctatttcgttttttaaatatttaaatttcttatccacctgaaatatttttgaggttctgaaagattgaccacgaaatcagaagggtcataacagataagtcagagctataacttaaataagatagtgtatctaacctctttactttgtaagtggggaaattgacactaaagagagcttacccaggataattagtggtaaagtcaggtctcagcctgtcttcatctgatgctttttctccctgtactctgaagagttttttggtgaattttttttttctggtaaactctcttccggtttaagaatataccatgtggactgacttcatagtttcagaattagagcttcgagtgtaaataagccaggtcctttcatcaaatgtacctggtacttacaagccactatattgtatcaggtattgagattataaaaccttttctttacgtaagcaaagttttgaatggcttttctgtatattcccaatgaaatacattttttttgtattatatactgcctcaggaattctttaaactcagaactagtgcaaaatgcatgtaacgccagttgatttttggtcccattttcctttaggaaaacaggaaaggcagtaaaattaaagaaaaatcaaagcaatggaggcaaccactgcagttgacttttttttctctctagcattaaatatcacccacttctcattgactagagagcagcagtgtttttatttactaacaaaggctactttttatagcccaagcattcattcccttatcacttctcttcaatacccatatgtatctcaaagtaatgtaatcagcaaattagcagtgtaaaaatgctagataacttattctgaaatccacttccgaaatcatttgagcagctaagtttgaaaaactcatgttggtaccaacatttctctctttagtgtgtgatttttccctttttgtgcttctcctccttggctgtctctcctttctccttccccctcacttaccttgcacttccttccctctccatctctgtagtcttctctctccttttatatcttttctgtacttactgctgcttcttagttataaaatgaattgtataatttaaactgtttaataaatgtactttgttatttgtaattttcaagtcgggtactaaaacctttataaccttagcccccctccttgaaccctctaaaattaacaaaatcatrttaagttttatatagcaagtccttgggttatactttttgttgatattgctaggcaaatatgctcttaacaagtaattgcctgaggcaggaggattgcttgagcccaggaatccgagtttgcagtgagctgtgatcaccactgcactctagcctggacaacagagcaagaccctgtccaaaaaaaaaaggcagaaaaaagttaccaattacagaaaatttcttagttttattgggctgaaatttatacttcctcatggtttcttcctgatagttcagttctgcacccttaaattacacagagaaagtctcttaattctttgatagccaggaagaaactaaattatttcttccccaaactgaagatgtccattttattgagctgtaccacacatggcattctacagatatttagcctttgaaaaattgcagaaaataatgacccacaaaattttacctttttttccccccagatttaattcaagtagcctttttcacctgttcatttgacctggcaattaaaggtgttaaatctccttggtgtgatgtttttgacatagatgatgcaaaggtaagtattatttttgcagtttctttgcttttttaaaaaaattttttttggcttgcttgtttgcatttggttacttgaagcagcttttcagaaaatgagtagttagggaacataaactgttttgtgactaactcctaattttccttaaataaagagagattaaaggttcaaattggtcccacctacttgtaaatagtttaggttcaaaaaactctggaaacattttttccatgatgatttgatttctaaatcatcccatttacagacctacttttaacccatcatcaaattttactgcttggaagggattatagagctgatataatcccagattctttttatgggaagccaaagctcagagagaataaatgggtttccaaagtcctagcaactattttataacagttttcatgggaaattgtgttctgtgttttacagtgaacacttgtatgtccttcacctatatttaccagttaaccttttttgccacatttcctttatcactctctctactatattagtttcctattggtgctctaacaagttaccacaaacttactggcttaaaacaatataagtttattatcttatggttctggargtcagaagttcaaattgaatcttacagggctgaaatcaaggtatcaatagagccgtatacaatagagccgtattctttcagggggctttaggagaacatctgtaccctgctttttctgatctccagaggctgcttgcatttcctatcactcagacttctgacgggtacatctccagctctaactgtccttcctgcctgcctctcgtaaggatacttgttgattacactgggcccacctagatagtccaggatttatctctccatctcgagattcataagttaatcacactggcagattcccttttatcaggtaaggtaacatattcataggatgtcagggattagaatgtggacatatgggagctgttttttctgtctaccgtgtgtatataatctttttttccccgccccaccatcaggatgcttcacccttaaatacttgggcatgcatctaggacaagaacattcttttgtataaccacaatacagaatactatagttcatatttatgtatatcatatatatcacaatattttctaatgtacagtcaactttcaaattttcacgtcttaagtcttttatagctgttttttgtttgctttgttttataagattcaggatctaataagggatcattcattgcatttggttgcatttcttttagtctcgtttaacctgaaagagtgctccagcctttcttttgtccttcgtacattggcgttttggaagagtctaggccaggttttttgcagaatgtttttggatgtgtctgatattttttactcaggattagattcagattaaacatttttgacaagagcactacgtaagtgatatatccttctcagtgcatcatatcagaaggactgatgtctgcttgtcatgtcattgattattatyactatttttttgagacagtgtctctctctgttgcccaggctggagtgcagtggcgcaatctcagctaactgaaacctctgcctcccggattcaagtgattttcctgcctcagcctctccagtagctgggattacaggcgtgtgctaccatgcccaggtaatttttktatttttagtagagatggggtttcaccatgttagccaggctgatcttgaactcctgaccttaggtgatctgcccgcctgggccccccaaagtgctggtattacaggcatcagccaccactcctggccagtgatgtttgatcattagattacaatggtgcctgcctgatttctttattgtagaggtactttttttccttgtaaataaagaacttcttggccgggcgtggtggttcatgcctgtaatcccagcactttgggcggccaaggcgggtggatcacctgaggttaggagttcgagaccagcctggccaatgtggtgaaaccccgtccatactaaaaattaaaaaattagccaagcgtggtggtgcacacctgtgatcccagctactcgggaggctgaagcaggagaatcgcttgaacccaggaggtggaggttgcagtgagccaagattgtgccactgcattccagcctgggcaacaaagcaagactctgtctcagaaaaaaaaggaaaaaaggaaaaaaaagaacttctaatttaaatgactgtgacttgaaaatttaaatacatgtttattaaattaattgaataatagtttctttttacatgtgaaaagaaattaaattcttcttttaaaaattaaggttgtcttttgattgaggtattttctattatttacttcagcaatttgttagaaaataatttatccctgcttaggactttcactgtgaaataggtttatatgctgaagtatttacaggtgaaataaaatgatacctgggatttgcttcaaaataatacagtggtggtggtaggagcaaagctgaaatgggattggttgaatgttgattattgttgaagttggatgagtacacagaggttcgttatactactgttttatattttttatgtgtttaaagttctttgttaagaattttttttttttttttttttttttgagacagagtcttcctctgtcgcccaggctggagtgcagtggcccaatctcagctcactgcaacctctgcctcttgcgttcaagcagtcctcctgcctcagcctccccagtagctgggattacaggcatgtgccatcatgcccggctaatgtttgtatttttagtagagacggggtttcaccatgttggccaggctggtctcgaactcctgaactcaagtgatccgcccgcctcaccctcccaaagtgctgggtttacaggtgtgagccaccgcacctggccaagaatgttttttacaattaaaaattaatagacatttatgaaattctgagataattagatatcctggactttgtgtaccttcagcaagcattttttgagtttccgttctgtgacaagcacttgcttggaactaaagacactaacataagatagatattgtcctcraagaatgccacaaggaatgaaagacatgtaactaaaccattgcaagacaataggatgtctatacagtgatagaagtatactcagatgctccttaagttatggtggggttgcatccagataaacccatggtagattgaatatcttaagttggaagtacatttacgacttacaatggatttatccagacatagcctcgttgtaagtcaaggagcgcactgaaagtgtattgcttttgaaccattgtaaagttgaaaaattttaagtcaaaccatcataagttgcagactgcccatgaaaggtgtagtggggcacaaaggagaaagttaatttgtaggatagcttttttgcaatttgtgtctgctttaataagtatatctagattttctctctcctgggattagttttggtatttaatatacctataaaagtcatttatgttatccattatttgctgaattaagcaaatatatcttttgattttaaaaagtgttttccttctctgaaattatttctccgtaattgtgtatttttgctttcaattttttctttattacagtagtttattgtttactaatttattttttccctaagaaacagtttagctttatctgtttttgaactttataatgatggaattactcagcgtgtrttttttttcttttggtatctagctcttgttcaacattaagtttttaagatttatttgggagctaaatggtgagaacacatggacagatagaggggaacaacatacactggggcctttcagagggcagaggatgggaagagagagaggatcaggaaaaataactaatgggcactaggattaataactgggtaatgaagtaatccatacaacaaactcccacgacacaagttaaaaaaaaagcttcccatttatagattgctacttagaaggcagggatttgaactgggaggaatttaaaatgatcttgacctgttgtgttgtgaaaaggtttacaaatttcaggaaaatatacctcttctcaaatggattgggaattatgaggtcacagacatttctcaggattccgtaaaacatgtacctgtagcagagtattagaggagattgaagcaaaggggcaagcggtaacttcttgggggcgattaagtcattgtattatcatggtgggggcaggttatacagttgtttatatttgtcgaaagtcatcagcctgtatatttaaatcatgtgtatgtaaattacaatttaataaagttttaaaaatgaaaaaagatttatgaggttgcatatagctacaatttttaattttcattactgtataatattccattatatgaatattttacagtttattcattatcttttcagtagacattgtttttagtttggggctattatgaaccttgttgctatgaacattattgtatatgtttattggggtacaggtatacctgtttctgaaggtgtatgtctggtagaattatcgattctcatgcttcagcctcctgagtagctgggaccacaggcatccgccaccacacctggctaatttttgtatttttagtagagacggggttttgccatgttggccaggctggtcttgaactcttgacctcaagggagccacttgcctcagcctcccaaactgttgggattacaggtgtgagccactgcacctggccttttttttttttttttgagacagagtcttgctctgtcacccaggctggagtacagaggcgtgatctcggctcactgcaagctccacctcccgggttcaagccattctgctgcctcagcctcccgagcagctgggaytacaggcacccgccaccacacccggctaattttttgtgtttttagtagagacggggtttcaccctgttagccaggatggtctcgatctcctgacctcgcaatccgcctgtctcagcctcccaaagtgctgggattacaggcgtgagccaccgcacccggcccttttttttttttaaatataaagttttagtggtaagcatgtgagaattttttaaatctccagttgcctcctttttatttctaatagtagattttattatttgaatagattgaacagactattatctaattcctttttaaatttcttagtgtttacgtctctttgttaacttcttgatttcattgcctttgtgtaaggacagactctctcaagccgtgtttttcctttactctcacaccaccatcacaatcatcaacacagaagacttctgtgaccaaatgtgtgggagcctttcccctgcacgccaagcaggagacaccagctgggtgtcctccagttcagatttgacattgtctacctggaggtagtattagatcccacaggttgagggctcagtccccaagtgccccatcggtactcttctgttcagctggcttcaagttggcgttcccatgacctcttctttgggttcagttaatttgctgtagcagctcacagaactcaaggaaacacttttgctggtttattataaaggatgttacaaaggatacagatgaagagatgagtagggcgagatatgggggaaggggcgtggagcttccatgtcctccctgggcatgccaccctccaggaagctccacatgttcagctatctgtaagctctctaaacccagtcctcttgggtttttatggaagtattccttccccccaggatatgaggcaggaccctttcagggcaggatcttaagacccccagaaaggcaggaagattagagttctgcctccgcacaggtgaaagggaggcaggagagagattctgtttcctgaggcctgccctggaggcctaacacacccagcattataccaaaagactacaacaagggatatgggagttacaaaccaggaagtgtggacgaaagccaatatatacatatcataataccacaggtcagcccctggttttcgaagagggataccttacatcaaaagaatatatacaatcattaataatccagtccatcatctgtatgaatgtcttccagggcaaggccactcaggtttgccagcttcctttcaatcctgtcaggttccaaaaccaggagtgktcktggcaaatttatggcttcaccctttcatgcatctgtcatacttgagctaagagacagcgtcaccttttgctctgagccccgttcaaggcgttcatgtaatatgtcatttccttcaatttataacccgtttattcatcctttttccctcagctgttctccttttcttcattaataaatatctacactgctacctttggaagggacacaagttgccattgtgctgtgctagtctagattgtaggcagcaatgctagtgtagcaagtagctcctcctcacccctttaatgtattttttgttttgtttttatatatggcactgacccacccctgctcttaaaacttactatgacatgcacttagtttctctaggagctctttcgggaagaaaggtttgtgactattgtagtcatcttgaacctcttttgggttacatattttagtcccctagttgtggttttagctacaggttttagttctagatagagatttcagttctccacttctacatgagcaaatgatcaaatgatatgtaagtggaaaatttaaccctcagataaaggctacttaattaccagctcccggttccagacctttcagcagaggttaataactgtaatcagtgataggtaggtttcaaaccgttttctatacttttataatctgtatcattcttagaaatataaaaggtatagtgtgtgtgtgtgtgtgtgtkttggtaataaatggtattatagggtatgtattatttttaatgggttcttattcaacattgtgtcttggagatttttccatgtcagtacatggaaatctataatatagaactttttgataactgcaaagtattctgaagtatgtgtataccatagtttatttaaccatctacctactattggaatttagttgtttctggggattttttggcttctataagcagtgctactataagtcattcttgtacattctccctggtgttcctctgtgaatatcactttataagaaatggaattaaatgggtcatagggtatgtgtgttttcatggattttgccaatttgccctctagaatgtctataccaatatacattccttccaacagtacccatttccccatatccttggtacacttttattattattttttcaccaaacagatacatgaaccaaagtaactcattttctatttgacttctaccttctcaaaattcttatacatttctcatccacctatggtatctttctgtgctttaatgaatattcttcttctttattctttcttctaaatgtatccttgacatttagaagaaagaataaagaagaatattaatataatatcatcttaatataatgttagaagaaaggagaggtgagcacatgtccttactccactctcttgagctgtcctgaccttggatgattggctgtgagcacttactggcttgctcttgcacaccagcatctacattcccccaatccaaatttgtgatgcagcataaatctctctgtggtatgaaccttagggaccaactcttaaatgctggaaaggacaaatactatattttgtgcagaatggtaattaaacattgtaaccatttcttagagaatcattattaaatcagggaatcttgttatattttwgaaaatatattagaaattatttttgaatttttttaggtattagaatatttaaatgatctgaaacaatattggaaaagaggatatgggtatactattaacagtcgatccagctgcaccttgtttcaggatatctttcagcacttggacaaagcagttgaacagaaacaaaggtaagaactttctaaaaaatgtgaagtacattttgagttactactaaacttctggaaatttttttataatgagtaattttaaaaaatagtttttgcttgtgttttaaaaaaattttaatataatgtgatacaaaagaattcgataacatatatgtaaattataaaacatacgaaccttccactctacccaagaactagaatattcataataaattgcatttgtttacttatgtgttcctcaactattccattttcctgcctcctcttgcccttccctttcctccagaaactattctttggaattttgtattggtcattccttcgcctctttaaaacagtttatattatgaatgtattggtgcccaaagaatatatttagtttttcttggaatcatactgcttattgtcttttgggacttgctttgtttcccccctcaactttatgtttttaatattcaacatattattgcatatagctgtagttcattttcactgtagtacaatattcaataatgtgaatataccatctactcttgtcagtgggcatttagatagttcctatcttttgctgttataawtagtgtaattatgaactctatgtggctcctgctatgaatgtgcaaaatgtttttgttttgaaagagaaaaagcttttgttaacatttataatcttcaattaaaaataatttttcatgacttgaacctttgatagaacctcaattccaggcttgtttcaaacttctgggctcaaggaatcctctcccgttggtctcccaaagtgttgggattacaggcatgagccactgcacccagctgagcacagagaactttgtaggtggtagaagttttcccaaactggattgtggtgattacacagacagctgtatacatttgttaagatatctaactctttaattaaaactgatgaatttcatggtagttatgcttcagtaaaacttaatctgagtatttaacaaaagtgtaaaaaaaaacggaatgaaataattttttggtaaaagtggaaaaattttttttaaagaagactccatttttctgaattagtaaagtttttttttacaaggcaacaccaaaatgcttatgacataattactgaaaatgttttaaaattattagatcacttccctgcattgatgcgcaatatattggaaaataattgaatttttttaattaaggattttacagtgtcatagggtcattatttttwaaaacagtttgagaaataattcataygtaggcatgtctcaaagatagtgcaagttcaattccagaccactgcaaaaaagtgaatatcacaatgaagggagtcacacaatttttttggtttcccggtgcatataaaagttatgtttatactataataagtgtgcaatagcattttgtcttaaaaaacaatacatacataccttaatttaaaaatgctttattactaggaaatgcccatgatcatctgagccttcagagagttgtaatctttttgcaggtgaagggttttgcctcaggtgttgaggctgctgactgatgagagtggtggttgctgaaggctggggtggctgtggcaatttattgtaaaagaaaatatcaatgaggtttgctgcatcagttgactctttctttcatgaaagatgtctctgtaacacatgatgccgtttaataacattttacccacagtagaacatattttaaaattggagtcaatcctctcaaagcctgtcactgctttgtcactgtcacaatcctttgttgtcatttcaacaatattcatagtatcttcaccaggcgtagatttcatctcaagaaaccactttgttcatccataagaagcaactcctcaggtgttcaagtttgatcatgatattgcagtaattcagtcacatctttgggcaccacttgtaattttcttgctatttccaccacatctgcagctacttcctatcatccatgagggttggaatcagcctcttccaaactcctggtaatgttgatattttgacctcctcccatgaattacaaatattcttaatggcatctagagtggtgaaacctttctgggaggtttccagtttacattcctcagatccattaaaggcatcactgtctatgacagctatagccttatgacatttatttcttaaataaataatatttctctgtcatatgaaatttctgttttttttttttgagacagagtctcgttctgtcacccaggctggagtgcagtggcgtgatctcggctcattgcaagctccgcctcctgggttcacgccattctcctgcctcagcctcccgagtagctgggactacaggcacctgccaccacacccagctaattttttttttttttgtatttttagtagagatggggtttcaccttgttagccaggatggtctcgatctcctgaccttggatccgcctgcctcggcctcccaagaaatttatttcttaaataatttatttcttaaatatttcttaaatttatttcttaattaatttcttaaaatttataatgaaatcaaaattactacttgatctatgggatgcagaatagattttgttttagcagacatgaaaacaacattaatttccttgtacatctccatcagagctcttggatgaccaagtgtattgtcaatgagcagtaatattttgaaaggaatctttctttctgagcaggaggtctcaatagtaggcttcaaagagccagtaagccatgctgtgtaaaaatagatgtgctgtcatccaggctttgttgttctatttatagagcacaggcagaatagatttagcataattcttacgggccctagaatttttggaatgaccagtgagtattggcttcaacttacagtcaggagctgcgttatctgctaacaagagagtcatcctatcctttgaagccagacattgatgttctagatggtatcttcttccaaaagaaggctgttttgtctacattgaaaatctgcttagtatagtgaccttcagttatcttagctagatcttctggatcacttgcagtttctacatcaggacttgctgcttcaacttacatttttgtgttatggagatagcttttttccttaaaccccatgagctaacctctgccagcttctaacttttcttttgcagcttccttacctcttagcttttctagaattgaggagagttagagccttgctgtggattaggctttggctaaggggaatgttgcagctgtttggatcttctaccagagcactgaaactttcttcctatcagcaataacattcttccactttcttatcatccatgtgttcactggagtagcacttttaatttcctccaagaacttttccttttcattcataacttggctaactgacccaagagacctagtttttggcctgtttcagcttaggacatgccttcctcactaagcttaatcatatctagcttttgagttaaagtgaaagatgtgtgagtcttgctttcatttgaacacttagaggccattgtaggattattaattgacgtaatttcagtattatatctcagggaatagggagactggaggagaggaaagaggatggagaatggctggtcggtggagcagtcagaacatatacaacatttatcagttaaatttaccatcttatatgggtggggttcatggcaccccaaaacaattacaaaagtaacataaaagatcactgatcacagatcaccataacagatataataatcatagtaataattaaaaaaactttgaaatattgtgtattactaaaatgtgatacattactaaaatgtgatacattactaaaatgtgatacacaaaatgagcacgtgctgttggaaaaattacacagatggccttgcttaactcaggattgccacaaaccttccatttgtggcaaaatgcagtatctacaaagcacaataaatcaaagcacaagatgaggtaatacctgtatcatatacagtttacctacttaaagtgcacaattcagtgttttagtatattcacagagttgcacaaccatcactactgcaactttagaacattttcatcgcctcaaaaagaaactctatatgctgtgccttagcagtcactctccattcaccctcactctgccatcccctggcaaccactaatatattttctgtctgcatgcattggcatattctggacatttcatataaatggaatgatataatatgtggttctttgtgacaggcttttatgatttagcatcatatttttaaggttcttccatgttgtacatgtagcagtagcatgtatcattctttttcatggctgaataatattcctttgtattactatatcatgtttttgttcatcttattttctttttttcaccttttttaaagttatacttcaagttctagggtacatgtgcacaatgtgcaggtttgttacatatgtatacatgtgccatgctggtgtgctgcacccattaactcgtcatttacgttaggtatatctcctaatgctatcctttccccctccccctaccccacgacaggcccacgccatgacaggtgtgtgatgtcccccatgctgtgtcaagtgctctcattgttcagttcccacctatgagtgaaaacatgcagtgcttggttttctgtccttgcgatagtttgctcagaatgatggtttccagcttcatccatgtgcctacaaaggacatgaactcatccttttttatggctgcatagtattccatggtgtataagtgccacattttcttaatccagtctatcattgatggacatgtgggttggttccaagtctttgctattgtgaatagtgccgcaataaacatacatgtgcatgtatctttatagcagcatgatttataatcctttgggtatatacccagtaatgggatggctgggtgaaatggtatttctagttctagatccttgaggaatcaccacactgtcttccacaatggttgaactagtttacagtccaaccaacagtgtaaaagtgttctcacatcctctccagcacctgttgtttcctgactttttaatgattgccattctgactggtgtgagatggtatctcattgtggttttgatttgcatttctctgatggccagtgatgatgagcattttttcatgtgtctgttggctgcataaatgtcttgttttgagaagtgtctgttcatatccacccactttttgatggggttgtttgattttttcttgtaaatttgtttaagttctttgtagattctggatattagccctttgtcagatgggtagattgtaaaaattttctcccattctgtaggttgcctgttcactctgatggtaggttcttttgccgtgcagaagctctttagtttaattagatcccatttgtcaattttggcttttgttgccattgcttttggtgttttaatcatgaagtccttgcccatgcctatgtcctgaatagtactgcctaggttttcttctagggtttttatggttttaagtctaacttttaagtctttaacccatcttgaattaatttttgtataaggtgtgaggaagggatccagtttcagctttctacatatggctagccagttttcccagcaccatttattaaatagggaatcctttccccatttcctgtttttgtcagatttgtcaaagatcagatggttgtagatgtgtggtattatttctgagggctctgttctgttccattggtctatatctttgttttggtaccagtaccatgctgttttggttactgtagacttgtagtgtagtttgaagtcaggtagcatgatgcctccagctttgttcttttggcttaggattgtcttggcaatgtgggctcttttttggttccatgcgaactttaaagtagttttttccaattctgtgaaaaaagtcattggtagcttaatgaggatggcattgaatctatacattaccttgggcagtatgaccattttcactatattgattcttcctatccatgagcatggaatgttcttccatttgtttgtgttctgttttatttccttgagcagtggtttgtagttctccttgaagaggtccttcacatccctacaattgtgaatgggagttcactcatgatttggctctatgttgagtaggagtggtgagagaaggcatccctgtcttgtgccagttttcaaagggaatgcttccagtttttgcccattcagtatgatattsgttgtgggtttgtcataaatagcttttattattttgagatatgtcccatcaatacctagtttattgagagtttttagcatgaagggctgttgaattttgtcaaagcccttttctgcatctattgagataatcatgtggttttttcctttggttctgtttatatgatggattactgatttattgatttgcatatattgaaccagccttgcatcccagggatgaagccaacctgatcatggtggataagctcatcagggatattggtctaaaattctttttttttgttgtgtctctgccaggctttcaggatgatgctggcctcataaaatgagttagggaggattccctctttttcttttaactggaatagtttcagaaggaatggtaccagctcgtctttgtacctcttgtagaatttggctgtgaatccgtctggtcctggactttttttggttggtaggctattaattattgcctcaatttcagagcctgctattggtctattcagggattcaccttcttcctggtttagtcttgggagggtgtatgtgtccaggaatttgtccatttcttctagattttctagtttgtttgcgtagagatgtttatactattctctgatgatagttatatttctgtgggattggtggtgatatcccctttatcattttttattgtgtctatttgattcttctttcttttcttctttattagtcttgctagcagtctatcagttttgttgatcttttcaaaaacccacctcctagattcactgattttttttgaagggttttttgtgtctctatctccttcagttctgctctgatcttagctatatcttgccttctgctagcttttgaatgtgtttgctcttgtttctctagttcttttaattgtgatgttagggtgtcaattttagatctttcctgctttctcttgtgggcatttagtgctataaatttccctgtacaccctgctttaaatgtgtcccagagattctggtatgttgtgtctttgttctcattggtttcaaagaacatctttatttctgccttcatttcgttatgtacccagtagtcattcaggagcagtttgttcagtttccatgtagttgagcggttttgagtgagtttcttaatcctgagttctagtttgattgcactgtggtctgagagacagtttgttataatttctattcttttacatttgctgaggagtgctttacttccaactatgtggtcaattttggaataagtgtgatgtggtgctgagaagaatgtatattctgttgatttggggtggagagttctgtagatgtctattaggtctgcttggtgcagagctgagttcaattcctggatatccttgttaactttctgtttcgttgatctgtctgatgttgacagtggggtgttaaagtctcccgttattattgtgtgggagtctaagtctctttgtaggtctctaaggacttgctttatgaatctgggtgctcgtgtattgggtgcatatatatttgggatagttagctcttcttgttgaattgatccctctaccgttatgtaatggccttctttgtctcttttgatctttgctggtgtaaagtctgttttatcagagactaggattgcaacccctgcttttttttgttttccatttgcttggtagatcttccaccatccctttattttgagcctatgtgtgtctctgcacatgagttgtgtctcctgaatacagcacactgatgggtcttgactctttatccaatttgccagtctgtgtcttttaattggagcatttagcccatttacatttaaggttaatattgttatgtgtgaatttgatcgtgtcattatgatgttagctggttttttgctaattagttgatgcagtttcttcctagcctcgatggtctttacaatttggcttgtttttgcagtggctggtaccggttgttcctttccatgtttagtgcttccttcaggagctcttgtaaggcaggcctggtggtgacaaaatctttcagcatttgcttgtctgtaaaggattttatttctccttcacttatgaagcttagtttggctggatatgaaattctgggttgaaaattctttaagaaggtagaatattggcccccactctcttctggcttgtagagtttctgccaagagatccactgttagtctgatgggcttccctttgtgggtaacccgacctttctctctggctgcccttaacattttttccttcatttcaactttagtgaatctgacaattatgtgtcttggagttgctcttctcaaggagtatctttgtggcgttctctgtatttcctgaatttgagtgttggcctgccttgctaggttggggaagttctcctggataacatcctgaatagtgttttccaacttggttccattctccccatcactttcaggtacaccagtcagacgtagatttggtcttttcacatagtcccatatttcttggaggctttgttcatttctttttgttcttttttctctaaacttctcttctcgcttcatttcattcatttgatcttcaatcactgataccctttcttgcacttgattgaatcggctactgaagcttgtgcatgcatcacttagttctcgtgccatggttttcagctccatcaggtcatttaaggtcttctctaggctgtttattctagttaaccattcgtctaatcttttttcaaggtttttagcttcttcgtgatgggttcgaacatcctcctttagctcacagaagtttgttattaccaatcgtctgaagccttcttctctcaactcgtcaaagtcattctccgtccagctttgttccattgctggtgaggatctgtgtttctttggaggagaagaggtgctctgatttttagaatcttcagcttttctgttctggtttctccccatctttgtggtttcatctacctttggtctttgatgatggtgatgtacagatggggttttggtgtggatgtcctttctgtttgttagttttccttctaacagtcaggaccctcagcttcaggtctgctggagtttgctggaggtccactccagaccctgtttgcctgggtatcaccagcggaggctgcagaacagcaaatattgcagaatggcaaatgttgctgcctgatccttcctctggaagcttcgtctcagaggggatgggttgtcagtcggcccctactgggaggtgcccccccagttaggctacttgggggtcaaggaccctcttgaggaggcagtctgtccgttctcagatctcagactccgtgctgggagaaccagtactctcttcaaagctgtcagacagggacgtttaagtctgcasaagtttctgctgcattttgttcagctacgccctgcccccagaggtggagtctacagaggcaggcaggcctccttgagttgcagtgggctccacacagttcaagcttcctggcggctttgtttacctacccaagcctcagcaatggtggacgcccttcccctagcctcactgctgccttgcaattcgatttcaggctgctgtgctagcagtgagcgaggctctgtgggcatgggaccctccgagccaggcgcaggatataatctcctggtgtgccgtttgctaagaccattggaaaagtgcagtattaggatgggagtgtcctgattttccaggtactgtctgtcatggcttcctttggctaagaaagggaattccctgaccccgtgcgcttcccgggtgaggcgatgccccgtcctgcttcgtctcatgctccgtgggctacacccactgtctgacaagccctagtgggatgaacccgctacctcagttggaaatgcagaaatcacctgtcttctgcatggctcacactgggagctgtagactggagctgttcttggaacctcctcctcatcatcttgcttattttcttataatttgcttatctcacctacaaataaattacagagggaaaaatgcaactaattgagcactccatttttggtagctagtagctgatggtattttaataaactgagaagctaatgaggtgaattttcatgcatggcttgtagtagcaggtgcagttctgtggtgtagaggcaatatgacatagtaggcagatgcttggatttggtttgactcctggtcctgctttatggatgctgcagattccttactttggaaaagaggaatgaagaatgcctagccctaatgtgaaaattcaaaatactccaaactccaaaactttttgagtgcggatgtgatgcagcaagtcaaaaattccacacctgacctcctgtgatgggttgtagttgaaacttttaaaattatttaaaatatcgtataaaactaccttcatgctatgtatgtaaggtgtatatggaacataaatgaatttcatgtctagacttgggtcccatccccaagattatatatatgaaaatatttcaaaatctgaaaaaatttgaaatccaaaagatttatggtcacgaacattttggataaggaatactcaacctatacctcacctgactcatggaattgtgataatcaagtgagataatacttattaaagcacttagtataatatgatatacagacatggtattggtattatatgtgatagttctctggcccaaacatgtccttaatgtctttttcagatattcacacacccttcccctctaccacccctgccccccttggcaattgtccaaataatgaaaacaagagctttgtgagacttattcttttcaaactttatggcgtcatttattaaactaacttccttttcattgcaagatggaaaacatttttacttcttttggatgattatgccttgtggcttgaaaggaaaattcattcaacaaagcagctactatgtttatatgtcaggcagtgatgactgaggcaaagtcattgcactgtggctcttacagtctagagaaaataaaaacattttataaaagccatgtataatgatataactgtttatgtaagattgtgaaacaatgtaagaagttgaaagagagagtttgaccctttaagacaggaaatcgttttggccaccgcctyttgttctaactgaagaaggaatcaacaaacactgctcagcagtgagcgatgatgaagaaactggcagatggtttcctgggactgggtatctctgtactaaaagactgatgaggattttaaaagatgcttattttgctgaattaagattaaaccttaaaataggaaaggagaataaagtacggtttgagacttctgtcaggtttctctcctaaaaacagattgactagtgctgtgagaagcacttctaaagaaaatcaatatatgctcagcaaggagcaagtaagttgttttttgtttgtttgtttttaactaatggacttttaaaagtaattttaggttcacagcaaaattgagtagaaagtacagagagttcctacttactgcttttytccacacattgacagtcaggcaccagtgtggtagaataataagcttttaatagaatgtttatctttgtgtttttcctgatctcttctaycaaaacattagccttttttttttttgtacatgacttaaaatcctttttttaaatttggaattagagtttataagtgagtattttgacatccatattttctgacaaaatgactttcactttcccaagttcccaggctatttttgctttctccatcccacccctaccccttgttagaatgttagtatgtatacagattggttttttttaatattaacattaaatcagggacattcttcagtgccactgaatttttttttcaacataattttgatagcatggttttacttcatggaaaaaatggaagattgcaaattgttaaattttcagttaaatataaccggcccttgaaattcagctccttgcattttattaggaacttgatttttattttcctttttgcaccatcactatagtaatgggattaaagttaaaaccagcaaatttaagcagatatttctatttaagcagatatttctatttaagcagctgtgattagaaaagcagattgaattcactgaagaaatgaagtatctccagattttattttactgtctccttccccatatatctgttaatataatctttttagattcgaggatttcaacaagttacttcatgttttctcaaagatttattttgggtctataattacttgcctcgagatcttccattttaagttaattactataaaatattttttactgttactaaatacctcaactctcagtgttaaccttttttttctacctttttgttgggtttcaaatcattgatattttcagatttcatagtctataaggtatggctttttaaagctgtgtagtcccatattttaacgtaagatggcagcattgagataaatgtgtagtgacaccaagtgattttagttatttggtcaattagcccattgtaacaggggaaacttgctgctttaaagttcttagaaatgtacgccaattctaggtgtttttgccaactttttgaagtcacagttccatggagtttagccaggggtatcaggaatcttttcagtgctrggaatctctgtagtgttgaaagatactggctaaatattttttttttttttttttttttttttggagacagagtctcgctctatcccccaggctggagtgcagtgacatcgtctcggctcactgcaacctctacctcccaggttcaagtgattctcatgcctcagcctcccaagtagctgggattacaggcacctgccaccatgcccagctaatttttatatttttagtagagagacagggtttcgccatgttggccaggctggtcttgaactcctaacctcaggtggtctgcctgccttggcctcccacagtgctgggattacaggattacaggggtgagccacagtgcccggccacatactggctaaatattaataagtaaaagtttatataactagcctggctgtactctgaattcatattcaaatgtccagctgccttttgaatagacactttttgactatcactagattgtaggtctactaagtagttattcattatttctgcacaattattttacctttgtacatttttttttaaaactattcttgttgaattgtatccagttttgtaagaatcactcttaaatctgttgtcatatctattcttgtcatagttggagagtatacctactctgtgctgaccccaacagtagaaccggaaggcaaatcttgtttcagttactattttaaaaaaagaaacctcacacacacaaaaccccacaactttttaataactgttaaataagtagaataggctgttttgtgaagtagtaagtgtcctattttagaaatatgctagttgaatctggataactgtgtcagagattctatggaagaaatgcttctaccacctaagaggttaggaaattatttcatggctccataactaaaggctcagttcatttcaattcagcaagcagtttttgagcacatacaatgtgtggtcacaatgctaggcattgggaatacataaacatggataagaagttatacccgctacatccaaggggctctcagtctagtaaggaagatgtcttaagaaagtaatttagtcaaaagcgaaaggatgcttgggaaagtaagtcatctctgcagttcatggtagttggaaatggcttctgtgtggatgtaagatgtaaggtgagccttaatcattgacactgtagtgtaatggaatttgcattggcataggattattaaaactcaaatccttgttcagcgtttcctaaccaaaattttgtcatctttaaaattcaggtaatactcatgtttcaaggtgttgagaaggttgagtggagttctgtgttcatgtatgtctgtgtaccacacaaatacatgtaaagacacatttatcttttactactatgctttacacaattaagtattttattaattgttattaataccatcatgacaatcattccaggcaaaatttggctagagaagaataaggaagacatcaaggaagaagagtattgagcaaaggcctatgtgggaatgaaaatgtaaaatgcccaagttaatttgatggtttgagttagacagtgttgggaaataagctgttagggtgttatctatgccagagaaaaacagtatactttacctgtcatctagatgctgatttaaaaattttcctggcctggcgtggtggctcagacctgtaatcccagcactttgggaggccaaggcaggaggatcgcttgagcccaggagtttgagaccagcgtgggcaacaggggtaatccctacctctacaaaagaaaaaaaaaattagccaggcgtggtggcatgtgcctgtagtcccagctactcacgaggctgaggtgggaggatcacctgagcctgggagctcgagtctagggtgagccgtgatcatgccactgtactccagcttgggcaacagagcaagaccctgtctctaaataaataaataaataaattaagattgttcctatttctgctttagttatttgtgttaattttaaataagttccatgtattctgaggtttacacttaaacatctctctccttaattagaacatagacaagtaaagtctattgttatttttcaagaatatttggacaaatctattgaaataaatatacagcgttttccaggttatctttgataacccactatgttcaggttatttggctggcaacagagggtatatacaaagatgaatgcattgaaattgtctccaaactcaaagtttagagaacacttataatagcactaaaacagataaaaacaaaattactgagagagaattaatttgaactctttggggtttggtaaaggctttatgaggagtctttgaagtaggctaccaaagacttttctttcactaatctcagcatatcagctcttagtaattgttttgatgtgttttttaataactcgattgaggtataattcatgtaaactgtacatatttaaagtgtacaatttggtcagtttttacatatatatatacgcccatgaaaccatcaccataatcaagataaaatatccatcacatccaagtttctttgtgaccctttctaattcactttctacccccattttcaggtaacactgatacactttctgtcactatacattaagttgtattttctaggattttatataatggaatcatagtgaatttttttttgttgggcttctttcactcaacatagtgattgtaagattcatctgtgttgctgatgaatctaatagttcattcctttttaagaccaagtagtattctgttacatagatccaccaccatttgttcaccttttgatgaacatttggttattcacagttttaaggctattgcaaataatgcttctgaatatttgtgatctttgtatgttatgwtttgatttcttgggaacctacctaattagatggaatggttgartcttaagtaggtgtatttttcacttttttttttttgagacagagtcttactctgttggccaggctagagtgcagcggcacgatcttggctcacttcagcctctgtctcgtgggctcaagcagttctcctggctcagcctcccaagaagctgggattacaggcatgtgccaccacgcccagataatttttgtatttttagtagagatggggtttcatcatgttggccagactggtctcgaactcctgacctcagataatccacccacctcagcctcccaaagtgctgggattacaggcatgagccaccgtgcccggccgtctttttcactttttaagaaactgccaaacttttcccaccaatgtatgagagtttcagttgttccacatcctgccaacgcttcatatggcaggtctttttaattttaaccattctaatgggtgtgtagtagtactttgttgtggttttagtttgcattttcataatgattagtgatactgagcatcttttcatgtgcttatttacatctatatatctagtttggtgaagtctttattttgtgtgctttttaattgggttatctttattactgtttstgtgtgtgtgtgtgtgtgtgtgtgtgtgtgtgtgtgttgtctaggtacaagtcctttgtcagatttatgctctataggaatatattctcttagtctatggtttgcctttcttaaaaaatatatatatattaatggactgattttgccccattattgaggcatttcaccctgagtatttatatgtaccctgtgtattttgaggttttcccactctggcttatgtgaaaactattctgwttttttgtgttagctttgggaattttttttctttttttagacggggtctcactctgttacccaggccagagaacagtggtgcgatcatagctcactacagcctcaacctcccaggctcaggcaatcctcccacctcagcttcccaagtagctgcgactacatgcatataccaccatgcctggctaatccttaaaaaatttttaatacatggaacttatttttatttatttatttatttttatttttttctcactgtgttgcccaggctggtctcctggtgggctcaagcagtccttcccctctgcttctggagtcactgggattatagataggagtaatctgtaattagctctgctaatttttttttttttttttacctattccttttcaatgttttttctccgggatttggatagttttctcatacgcatgtgctgttcagtgccagctgaaaatttgagggagcccctgctggtctgcagcactctcttctcaggtactcctgctgtgaattcagccagtgtggcctccctaaattctcactcccatctcagctgctcagggcgacttccygagctgtttgggcatcccctccctgtgccatagtctggaaactcggcagtaagctggggcagttgttggagtcacctcctttgccttccttttcttataactaytgttgagtgtctgaaactttgtatgttttgttcagctttctggtactttaaggtaggacagtaaatctggtccctattactccgtcttgactggaagtggaaactgtttcagtgtatttttgcttgaggaagaaaaatgtcatacttgagtcattttagttcttgatttatgttaagctgttggattggtgcttctccaaatactcactggaactgatgtttcaattagatgtggaagacttaacaacaaatttttttctggtaattttcttcccaaagcatctggcagttcatgttgcttatttgtatacttacataaatatgggaattatatgagttgtgtaaagctgtatttgatattcctggatcatgtttaaaaacatactttgcataacatcaattgagtgtgaaacgtgaattaagagcttagaaagatctagctgagtacatttggggggaaaacatgcaattattagttgttttttctggttgagctttttgaataacttgaagtagttgctttgtatcctttatctactttgaacacacacatagttatcaaccctcattaaaagacaggattttagacttaaactttgtttttggttgaagacataataaaatctcctcaccaatttctgtaagtaaaaggaggggtgtaatttggagaactgcagtaatcctcttaaccattttcacgctgttattcctaaaataagaagggttgaccagatctcaaacctaaaacattatgattctgtatatttctatccagacatttatatagattactcatttgctttcatatatttgtattaatagtttacattttcaagcaaaatatgtatcttttcaagtggttttgtcactttttggaaaatgcaacattccaagtttaatgcatttttatcaaggagagagcagagttaaaggtgtaattccttttctttgggatacttctgccaagagtctcaaagaaagaatagtcattacaatgtaatgggggatgtaagttaatttgagaactatgactagttggatcagaatgcagagcatctgaatttttcttaatttggtgttaaatattcattctacttagacattttaaatatagtattaggacaaaattatcagacatttgtggaatatatatgactttggggatataaaccaatatgggacagaattatagacacattattcctcaggatgtcacattgtaatatatagcacggggattcttggggtatagagtctgaaatcccaaaactatatttaagtttttatggaccacatgcctttctttagtacgaagttccattttcttagattctcagatggtttcatgtcctttgtgaaagttaagaaccacagatgcagtgaggattgagtgattgctttggcagccctcctttaaaaaacatttacctcttcctgtattttttgcttgtttgtttgttttgagacaaggtcttactctgacaccctggagtgcagtggcgtaatcatggcttattgcatcctcracttcctgggctcaagtgatcctcatacctcagcctcccaagtagctgggactacaggcatgcgccacagcgcctggctaattttgtggggagttttcgtagacacaaggtctctccatgtttcccaggctagtctcaaactcctgggctcaagcagttctcccatctgagcctcccaaagtgctgggattacaggcgtgagccaccatgcccagcttattcttctgttaaaggaaaaacttggtcctttctgtcatggtatcctgaacctcaccactctgtttattgaatggtagtgacaaagccacatgagaccatagataaaatatagcaatctttatgctcttagcaatcttatgacaaaatacatgcaagaggttttatataagaagagcataattatgagtataaactgagaaggaattcgtttcacatttgttgtgttttttgccctcctatacctacatgcctatgtttctctctctttctcctctctgtcagtctctctcctctctctntctctgtctctgtctctctctctgtcacacacacacacacacacacacacacamtttcttactccctcattcagacatatacacntgctcatacccatttattgttgccagtattttgggcttrttcatagaccagctttggtttgttggagaaggttggaagtgaaaccagaaaagttgtcataccatctttgtgattttggtgtattcaaagagaaactggagatttggttccttcaaatagtgattgggcatatactaactggagttcctaggagatggtttaagaaccagattggactcttttaagattaactctaaattgtgacacagggcaaagagcagcatgttcatagacttggaaccaaatcacttcttcatagaaattagtgatttactttatacagtcctggcatatacctttaatggcttctggtaaaaattggatcataaataaatacttttgtgaatttgtttttcggtgtttaaaagttataaaaacaaacaaaccctactgtatgtgcacacacacaaactccacagctgtctcagcttccaccagttgaaggtatccaagtctccatttttggtgtctgtatacttgcaatagaaacataatttgtttttccatttgacactatgctacttaactttgtcaaagaaaatagaaatgtgagtaatccttataaatgggcaaacacagctatttaagaaggattatatattagctctttggaagctcttttggtcatagataattacctggaggcagttgtttttttatrtacccgagtttgatattttgccagttgagtttcaaacaatgaagtagaaatttgtttatatattgcttagtcattcttgttcataagaagagcattctgaaattcttaactatgaatgggaccttgatttgaaccatatagtttaaaatgcctgaaaaattattggctaagtcctcttgaattttatacctcatgattatgagttagatgttttacttattccttctttgggagttgtttggaaaaaactcaaaccctgtttttcctctgccttcacaccaacacaacaatagtcaacacaacttctgcgttagtccattcttgcattgctataaagaaatacctgaggctggggaagagacacttaattggctcacagttctgcaggttgtaaaagcatggctccagcatctgcttctgatgagggcctcaggaagcttacagtcatggtggaagagaaagggagccagtgtaccacatggtgagagcaggagcgaaagcgagagaaggaagaggtcccaggcttctttacacaaccaaatctcatatgaactaactgagcaagaactgacttgtcaccaaggggatgatgctaaaccatttgagagggatcctcccccatgtcccagtctcttcccaccaggccctacctccaatgttgggaatcacgtttcaacatgagattgggaggggacaaacatccaaaccatatcattccaaccctggccccctaaatctcatatccccacatttcaaaatacagtcatgccttcacaatagttccccaagtcttaactcattccagcattaactcaaaagtcccaagtctgaagtctacaaagtctcatctggagatgagtttcttccacctgtgatcctgtgagatcagaaatgagttatttactcccaagatacagtggtagtacagacatttggtatacctcctattccaaaagggagaaatcagccaaaagaaaggggcagtaggctctgtgcaaatctgaaaccagcagggcagttgttaaatctttttttctttttctttttctctctctctctctttttttttttaaacagagtctcactctcttggcccaggctgcatgatcacagctcactgcagccttgacctctctggcacaagccatcctcccacctcaccctcccaggtagctaggacctcaggagtgcaccaccatgcctggctaatttttgtatttttagtagagaccggattccgccatgttggccaggttggtcttaacctcctgagctcaagtgatctgcccacctcagcctcccaaagtgctaggattacaggtgtgacccactctgccaagccagtctttaaatcttaaagcttcaaaacagtttccttcttgccatgtgaaacctgcttcccccttgccttccgtcatgattgtaagcctcctgaggccctccccagaagcagatgctagagccacgcttcctgtacagcctgcagaaccgtaagccaaaatacacttgttttctttataaattacccagtctcaggtatttctttatagcattgcagaaacggactaacacaaaattggtaccaaggcatggggcactgctataaagatacctgaagatgtggaagtagctttggaactgggtaaaaggcaaaggctggaagagtttggagggcaaagaagacaggaagatgaagaaaaatttggaacttctgagagactggttaaatggttgtgaacaaaatgytgatagcgatatgaacagtgaagtctaggctgatgaggttccagatggaagtgaggatgttattgggaactagagcaaatgttacccctgtcacatcctagcaaagaacctggctgtactgtgtgccctagggataccctcatcagtttttcctcattcaagatgtggcctggctgcttctaacagcctatgatctaatatgggagcaaagaaatgacttaaagttagaacttatatacaaaagggaagcagagtgtaaaagtttggaaaattttcagtcaagccatgtggtagagaaagaaaaagtattttcaggagaagaatcctagcaggctgtggagcaaccacctgaaaaagaggttatcatggccagggcacagtagctcatgcctgttaattccagaactttgggaggtcaaggaaggaggatcacttgggcccaggagttcaagaccactctgggcaagaaagtgagacctcatctctacaaaaaataaaataattagctgggtgtggtggtgcatgcctgtagtcccagctactcaggggcagaggcgggaggactgtttgagtctgaggggtcaaggttgcagtgagctatgatcactaaaatgagtttggtcatttctaagacactggattataagacatattaaaagaagatgttttaagttagtattatgtccaggtaaggtttcttaaaaataaattttttaaaaagaaaacaaagttagttttatgagagaagggggaggccccagactcttaaacaaccagatttcatgtgaactgagaagtcactcatcaccaaggggatggcactaagccattcaagagggatccatccccatgattcagtacctcccactaggtcccgccttcaacattggggatcacttttcagcatgagatttggaggagacaaacatccaaactatatcaacttctgtgacccagtgttgggggatgggggttccccaccaataagcagcagacaccagctaggtatcctctaattttgacactatctgcctggatgtagcatcagatcttacaagttgaggactcaatccccaagattgccccctgcccttttcagacaccagtcataagtctgggcctctggaacacctgactgactggcttcaagttggggttttcacagccccctctttgggttcacttaatttccaggagtggctcacagagctcaggaaaacatgtttaccagtttagtataaaatattacagaggatacaaatgacacataaaatgaggtatgggggaaaggatgtggagcttccatgccctcccagggccacaccgccctccaggaacctccacattttcagctgtccataagctctccaaaccctgtcctcttgggttcttatggaggcctcattacttagacatgattaattaaactattggccattggtgatcaacttgaccttcagcccctcttgctcttccctgaggttgagggatgggcttgaaaatgctaaccctgtaatcatgcctttgcctttttgctgaccagctccatcctgaagctatcaatcaacatgagcatgcaaaaagacagcactttggagatttcaaggattttaggagttttgtaccaggaaacaggaacaaagaccaaatatatattatatttcacaatatcattggaaccttaagaaagaagcctctctcctttcttacggagcctagaggaataaagataataataaagattactttatttatgaatagtaatactttacaaagtaatctttattatctttattctagtttgcccttgaaccattaaaggttactaagttgaattcaggctgagaaaaacaaaatagcaaagaaaaacatttatgtttgagattttagtgatttatattctgagatgttatgtaatggaaatacttttgagataaagcaaaaaatacttaacattcttttagttgttgcaacttatttaagagtgtgtgtaattcttacccttgaaacctcaacctagacatttagtgaattctgtttttgaaatgggaaaatcaagaataaagtcagattttaaaaattgtataaaacatgtagttgctaaaatgtaattttaagtcctccttagggtttcagttttatgaaccctatgtcctccttaaggtttcaggaaacctccttagggtttcatgttgatagcatattatatgaattattatggcagttttttctattttataagttgtttttctctgagataaaatttctctaagtgggatttttaatattcaagctttcttgactttttttttaaaaaagacataaaccaaaccaagtatattcttacctgtatctagtaaagatttgtgtacatacatttaggagtgatttatacatatgtcttgaagtgataatttgttttaggtgattatatgttttatacatgtttgtgttatacttcaccagtagtgatattgtcaagcaaaaaaaaatatgcagcatcataaaattaactttgttttctttttaaaaaatttattcttaagaaaccttacctggacataatactaacttaaaatatcttcttttaatatgtcttataatccagtgtcttagaaatgaccaaactcattttagttatatctaggaaatcaaaggtaaagatggagagattggcaaggagaggaggttcatgaattgagagtagaatgtgtaagaagcatgaaatagatcacatcgagtctggatacaacctcagaatccttctcaatgcagtgttccaaatagctattaattactgattggagatttggcccagatactggttttatgactaaaagttgtcatttattgacatattctctttcttctaagcaagagtaaaaatttagatgcatacacccttgtctttgttcatctgcttagaggcttacatcattagtgatcatgtcgtggggcaaaattgggattcagccccagaggccacatggttcttggcttcacggaggcaagaattcaagagtgagccaaaagactagagcgaaagcaagtttattaaaaagtaaaggaataaaagggaggctgccacataggcagagtagccttgagggctgctggttggctattttttatggttattaataaataatagcataaattaatcgtatgctaaacaaggagtggattattcatgagttttctgggaaagggtagggaattgtcaggaccaagagttccttccctttttagaccttatagggtaacttccaggagttgccgtggcatctgtaaactgtcacggcacagatgggagtgtcttttagcatgctagtgtattctagttagcacataatgagcagtgaggatcattgaggatgagcagaggtcactgtctttgccctcttgattctggctggttgtggctggcttctttaccacatcctgttttatcagcagggtccttgtgacctgtgtcttgagaaacacgttctgccgaattatctcaatcagctttttatagaactgtgcttttcactgaatatttttttcttattgcacgttcatttcagatgaaaaacctgagaaatgtggtcttcgcctttgcgttggaaaagaattgatgccttatttaagaaacaatcagctaggtgtggtggttcacacctatgatcccagcactttgggaggccgaggtgagagcatcacttggggccaggagttcaagaccagcttgggcaacaagctaagaccccgtttctacaaaaaaaaactttaaaatgagttgggcatggtggtgcactcctgtggtcctagttacttgggaggcctacgtgggaagagtgcttgagcccaggaggtcgaggctgcagtgagccatgatcacaccactgtattccagcctgggtgacagagcgagctcctgtatctttaaacaaaaacaaggaaaaaaatatcatttaaaaaaaattttgtgggattttacatgtgcttttgccaaattgcatgttgctgaagagtgttactaagcactgacaacagagtcttcctcagtcattatgttgaaatactatgtttcttcccacaaataagaactgatttgattttaaattattattattttttttccaagacagattcttgctctgtcacccgggctagagtgcagtgacgtgatcttggctcactgtgaccactgccccctgggtcaagtgattcttctgccttgggcttctgagtagcttggactacagtcatgtgccaccacacccagctagtttttttgtatatttgatagagatgggattttactaggttggcccacctgttctcaaactcttggcctcaagagatctgcccatggcctccctaagtgctgggattacttgattttaaatgattttaatcagcaatggtttgaaagtaaatttaagtgactaagaagtgactaagttcctaaattatttactctactcctcataaacaagtattttcttataaaaggcattaaggtttttccaagtaaaattttttggtataaattgtttccatacaatttaatttatggtatacctgtggttttgcttttgcatttggatctttagcacttttggatatctgatgaattttaacatatgctattcaatgaaatgagtttgttacttgataccgtgtttacctttagaataaagtgttaggtactaatattttaggagaactgacttgaactcatctcctggattctaaactcagcacaccactaatttgtgtgctgggtcacttcactgctagaactgctgtggcttttgctgccactgtggctgtttgctatcacrgattgattgatggctctgtggcaaacactaccatagagccatcgatcaatatgtgatagcaaatatgtgagtatttttctgtagctcaaatccaacagctttgcaagggaagtagcttatcttcatttggcaggaatgaagcctgagagagattgagtcatttgccctaaaatttgctcataaccaagttatgccctgtagttttcaagcttcttagtttttccctctctaaaagggtatgacagaacctgtatcatagagtaagcaattactttgctaaggctacacagagcagcatttctgttttaagacttagtaggagtgtattcatgacccagctcaaacaccacctcctcagcaaagcgcattcaattcttccttagtcacaaggatttgttctctgggtttctctaacagacacatgcgaatstgaaagagccagaaatgtttcatttgtgtttttgttcttttatcccactattcttctcccctcccctccccctccaagaagaaactagcatggtgcctggcacttggcatgaaatgacagagcctgtcacatctaacaaattaaccaaatgggtcttttgaaaagtctcttctttattacgttttggaaaactgagtgcagcttatttgcccaggggcttttgtatgaatatgagcatcatcagctagcggctttttcttgagtagcaagctatgttaagtcacaaagggtaaaagtaaaaaaataattattatgaatgaaattgtgctcttttttaatactttccattatcacaaacttaaaatatttatacttggttattgtaaaaatatataaattataaaaataaaattataagtgtattattccctataggcacatttcaatttctaagcaaaatcttgtttttgcttttaatggctctactttttttaaactattacccttgtcttattattgttttactagtgcatttaactagacctttaagatattgggggtttttggtgtgtttcaaatttgtataatagacattgctctatgtaagaagataatcaatacttacggactttataaaaagttagcacttttccttcctattgaaaattgtctggaattctaaaatacaattttaaaacaaattggattcatcaaatggtagaagacagtaatttatttttgatgggatggtttactgtgagaatctaatatataaacttccttgatttcccataaaacttccagtaagcatttttaagtataattttcctcaaatttcttctgaagaattcactgattttaacatatcactgacagtaaggcagtaaaaaaaggggggaaggtgtttactgccttttgtataaacccaaggaaccttgaaatttacaacttaaatttgagtcacagtctagatttcatttcttctgtagcttgaatgcaattaatagaactttgaactcataatttgtgcatagctcttttggtctctttccttcccccaatttatagttttcatgtgtgtgtttttatttgtcttgtatcttttctcctatttgctatttatttgattaacttttgaatctaagtatgtaagactgtccataccactgtctgtcctgtgctctccaacacagtagccaccagcaacatgtgattgtttggtgcttaaaaagcagctggtctgagcgaagctgtccatactgtaaattatgcactggatctcagacacttggtagaaaaaagaatgtaaagtttactaatggcgtataaattacttgctgaaatgacaatagtttggatatatygtcatatcttgtccccagtttattagagttcttctgtgggggaaagaggagagagttactgacagtaaattcttctggttagacagtggaggtgttgctgctgttgctgctatcctccctgacctgttttgtgtgctaatagattccatggagagcaataactgaaagttgaatttaggattgcttctggctttgaggtttctgcctaatggctaaaggatttaaaatgtaaaccagtatatttatattacttgtttttcttttaacttgtatccttattaaatttcattatttagatggtgacagtagtgttagtttagacttgaatatactcagatgtataaaggggccaggcaagtaacaaaggaatgaattcatcctatgttagacaatgtggaatgatacatgtgctgtgtaacaagtatatgccctctctacagggtgggtaaccttattcctgtttagctgattatggtcttacgggtatatatggacttgtgttgccagatctttcagatttctaagaagagcaaaaatctggatttttaagaatcttaaacctctcaatttttaaatactgataagtaatgtaaaatttaaaaatacttatgctggtcaaactaaatatggctgtgttctgaatgctaccgcttggtaacttcagacctaagagattgcttcttggaaataaatacaggttttaggtattttagatgacctaattaaagtataccagttatgaagagaggcttggtaagcgcctgttgatgaatggcttttaagttttacaccttttagagaatattaatctgaaagtagtgaataattgtcttttagtttgttttgaaatactgttaacagtttcagtgtactttttgagtatatatttctagcrtactcttatatatggaagttattctgctccttattttttcttacaygcttttctgtagttattttgatatgaattgttttcctgaacatttagaaaaaggtttgtgtcagattgcttgtctcatctcacagagcccccccgttctggtgtgtgtactgttcagaagtatgatgggttgttttctgagatttcctggctctgttcccctccccccactttcatctagacttactttttcctttatctcttctgtccctctcctgcttggctgaaattccactcccagcagtttctctagtgtgagccctgtgtttggagagttcacaggagctccaggattctctagccccgggcctcactgtaggcctgccttgcactcaycaagtcctggagaggactaaatacttcccaatttcagctgctatatccagttcacacacagcgcttccagtgaatacctgtgggctgtttgggattctcttgttctcagattgctcagatgctctgtggcttctctctgctttcttcaacagatactgataatatctagtgcttgaggttggatgctacttggagtggttcatagagaatacttttccacctagttatgttgtaaatgtttcccatgggtttttggatttgctatctgcttgctgtgtttgtgtgtgttgggggcagagggaatcaggaaggtctagaactgctgcttctatcctcccagaaaatccagatgcactaaattgataacctgatgagtggtggcaaaaagtcagacagtcatgtttgaataggtttacaaattatatttaagaaaaatattattttttctataaaggtagggaaaaggctaagcagtcattcactgcttcttaataaaaattctttaccagaaaaaaaaaatcatagaaaacttcaagaaaaagaattgattcagctcagtgttgaaagtggtttgtattcctggcactttatactcccactcccaaccagagacacattgtttcagccacaataggttacatcactaaccttttttgggttttgtaaaccattaaggattacatgaattaccatgtaatcctgttcagacttggtaagacatttactgaatattgcttgttcttattccctagatataaataaaataataacactttattcaaaagagctccatggagtaatatttactaagggccaggttgctcagttttatgcacagaaaggcaatacagtgttgaaatacacatctgtttcaagttcccatatctataagacacttctctctctttaaacttaaaggaaaatatgtatgcacacttatatggatttacaacagtacagtgatctgaatttcggaacttaactttcagtataaaaagtttagttctctgccacacggaatttcagccgtatgcttgtgtaatgtatataaagatttaaaaaaatagatgggattatttaaactaaaaaaagatgtggaagttactcctaagtgtaaatactatgttctatgacattaatatatataccttattttctcttaatttctatttgaaggtctcagccaatttcttctccagtcatcctccagtttggtcatgcagagactcttcttccactgctttctctcatgggctacttcaaagacaaggaacccctaacagcgtacaattacaaaaaacaaatgcatcggaagttccgaagtggtctcattgtaccttatgcctcgaacctgatatttgtgctttaccactgtgaaaatgcyaagactcctaaagaacaattccgagtgcagatgttattaaatgaaaaggtgttacctttggcttactcacaagaaactgtttcattttatgaagatctgaagaaccactacaaggacatccttcagagttgtcaaaccagtgaagaatgtgaattagcaagggctaacagtacatctgatgaactatgagtaactgaagaacatttttaattctttaggaatctgcaatgagtgattacatgcttgtaataggtaggcaattccttgattacaggaagcttttatattacttgagtatttctgtcttttcacagaaaaacattgggtttctctctgggtttggacatgaaatgtaagaaaagatttttcactggagcagctctcttaaggagaaacaaatctatttagagaaacagctggccctgcaaatgtttacagaaatgaaattcttcctacttatataagaaatctcacactgagatagaattgtgatttcataataacacttgaaaagtgctggagtaacaaaatatctcagttggaccatccttaacttgattgaactgtctaggaactttacagattgttctgcagttctctcttcttttcctcaggtaggacagctctagcattttcttaatcaggaatattgtggtaagctgggagtatcactctggaagaaagtaacatctccagatgagaatttgaaacaagaaacagagtgttgtaaaaggacaccttcactgaagcaagtcggaaagtacaatgaaaataaatatttttggtatttatttatgaaatatttgaacattttttcaataattcctttttacttctaggaagtctcaaaagaccatcttaaattattatatgtttggacaattagcaacaagtcagatagttagaatcgaagtttttcaaatccattgcttagctaactttttcattctgtcacttggcttcgatttttatattttcctattatatgaaatgtatcttttggttgtttgatttttctttctttctttgtaaatagttctgagttctgtcaaatgccgtgaaagtatttgctataataaagaaaattcttgtgactttactaccaggacttttctcttccccatgtcaaaatacaatcaataattgatggtaaaagtttggaaattcaagcagatttgactcacctggcaatttttttttattttttatttttgttatacttttaagttctagggtacatgtgcacaacatgcagttttgttacatatgtatacatgcaccatgttggtatgttgcacccattaacttgtcatttacattaggtatatctcctaatgctattcctcctccctccccctaccccacgacaggccccaatgtgtgatgttccccttcctgtgtccaagtgttctcattgttcagttcccacctatgagtgaaaacatgcggtgtttggttttttgttcttgcgatagtttgctgagaatgatggtttccagcttcatccatgtccctacaaaggacatgaactcatcgttttttatggctgcatagtattccatggtgtatatgtgccacattttcttaatccagtctatcattgatggacatttgggttggttccaagtctttgctattgtcacctggcaatttaaagcaattttctttgaatagaaatttcctcaaataatggatttgttaatgcattttattttaattcatatacaccttaaaggtaatatgtttcaaaggaaaatcttagatttttcttaaaaatatgtggttactcttattaaacgacatgcagcaaaatcccctactggagtctcctcttactagttttacggtactttgctttcgaggagacagaccataggaaaaccaatacatgttaagggtatccatgtgcctacgtacagattatgtacagattgtcatatgtgacttggattaggatattttcaagccaaacttcagttgataaaattggaaaaatcagtttgagacttaaaaaaaaaggcaataagatctttttttatcacccatagtcgaaatattttctagttaatgcttagtcatttgttttttagccaatgaagttatcatatgctaatttagagaaaagataaaaagatttttaatgctttctctattagtaagaaaacctcatgttgcttttggtttgcaaaatatgacccagggacacctttaaaatgatatcatattaactgttgggttatgtgaccttgccaatacctttttgaatagatcttctaaggttaaaaaaaagtagcactaatgagtaagtaaaagaaacaagctgacaaacattgggagctgtaaatatagtatgtgtgctctgaaaaaatgaaaaaggaccatttcaacatgggattttcagaaactgaattattcccgaatggatatgatacataaaatattctcctcagaacacaaattctagaaagaagatataaatgttagaaagaaaggatcctgggttgaagtgaccttgggaaacatggggttatcctatggaatgtctctggcttttaatgttctattgtgcgttatgaataaaggaggcattatagtagattacatttttttctatcttgcttgacctgagtacattctcatttatagtcatcatacattgtaactccacagcaggaaaagagatgtcgtattcttccaatgaaatttagatttatagtttgagttccatactggaaaacttgagaggaggttaactttaaaaactttaactattttgtcattactgaaataatgtattttaagatgaaaggattcttaattttattctttaaactagcctcaattcaacatcttccatgtactacattctgtgactcaccaccctctagcctgaaaggaacccaatggcatgtgttagtttaatccaaaatttttcaaagtttctcatttataatctatgacaatttacaatctatgacaattgtaaatgagaatatactttgaaaaattttggattaaactaacactgccatttgggttcctttcaggctatagggtggtgagtcatggaattaaataccagtggaggaaaaattgtactcaattgtatattgaaattatgagatgcagagatccctgatctttagatcagagatcttcaaatgaatgatgttttataaaatagatgattagctggtaaatgctgctggtgcatttatacacactgctgattctgcaaagttctggtgttctcatttctttaaaaaaatgtaaatatgcagacaagaaaacaaaatgatgagcacccatatacatcctgttttatcaaaattaacattataacatttgctttagatttcaataagctgttttgaggacttttatatacctccatgattctattacccctataccctgcctagaggtaaccatcaacataaaattcagtattcatcattgcactgcatacttgattctggaaacttgcagtattgtgggagttttaaatttttctatacaaagacttacattctctgtatcattcttgcattagtaatttattttaactgctctgtttgtttttcaaaacttttaaaaatcctgaccatttgttgcaaattaataccttcaatttatcaatgcctgttgagtacttttatataaaaacactatacatttagtctatgggcatataaagatgaatgaacttagggttttgttttttttttattcaaggagtttatcttaaaagatctgaaaacatttattgtctaacacttaatattttgtatcctttgaatacttttcaaaatatcaaagactatgaaagtttcataggaattaaatttcattgttcaataggactatatagtcatctttgaccctataaagatgtattttaaatatttcataggaaaatactgggtggaggttaagcgtggtccatttttgctagtgttacagaagttgtgatattattgtggtgttatttaggaaatgtctaaaatgagaatctcaagataaaaactaaaggtactatctaggataggatatgtgaagagttgaacattgaaaaaaatctttggctaacaagaattcattcgtaataggtgatcaaattactcagttttgccaaaatttaacttttaatgatttgacattttgatggattaatttctatggacattagccattttttctgtctcatctatagctacgtgtgcattgtactgtatttactgttttctatggtcatgtcatcattttgaagttcctgctctccaacacacacttacttgatactgcttttgtcaatgatcttgatcttaattttaacactgaaatcaaaactcaatgtgtaagggaaaaagtagttcattttttccaggcatattccactgttatatctttatttgaatgctttccttttgtaaactgcagaactgctaatgcaagcccttagagatgtgagagttacatataacctaaccagaatataaactgtacagttttagaacacgtttttgtcagatggtatttcatgtggttcattaatgatagtgggaatttggactgtcttttgccaaatgtaagctgaaaatatttgcattacttgcatatacaatttgcttatatctaactattaccctgaacttagatcacagatcacccaactctctgttaactgttctttttctcatattcatttgtttccttccattcatgtggcagcctctttcactcttcagtctatttagctatgctttgttctgtgtatgtgtgagaatagtagtatttttgacagaactccacatcaggaaaagagatgtcatattcttccagttaaagatatagtttgagttccatactggacaacttgggaagaggttaattttaaaaactataacttttttgtcattactgaaattattttaagatagaaggattcttaattttattctttaaactagcctcaattcaacatcttccatgtactacattctcagattttattttatttttatttttagagacagagtcttcactctgtggcccagcttggagtgcagtagttccatcatagctcactgcagcctcgaactcagctcaagtgttcctcccacctcagcctcccaagtatctgggactacaggcacactccaccatgcctggctaatttttaagtttattgtagagatggggtctctacatctctattgtagagatgggctcaagtggtcctcctacatcagtctcccaaagtgctgggattacaagcatgagccactgcacccggccctttcccagattttaaaccatttagacccaagcaatccatgttcacacttttgtttgttgtactgggagaataaatatttgttcgttaaaatgacatccttctgaattgggtaatactactggtaaagttgaattcggatatttattttacattatttctaagatggccaatgtggaaaattaagttggaatgaaagtatagatttttctctgcattaacaatttgggtgctttgggaaactttttcaacaaatattctggaaaaaatacagttttgatgtaaattagagaagtatatactggtgaaatatatccttggatacatacagataagaaaattatttaattgataaaaaggttgttaattggaaacagctaattttgctccagccatagttgctcttcctttgagaaaccgttagtttctttttctttttcctatttttttgtgttttttttaaattattatcttttgagatacagtctctgtcacccaggctggagtgcaatggcacaatcatggctcactgcagccttgacctcctggcctcaagtgatcctcccacatcagcctcccaagtagctgggactacggatgtttgacaccatgccctgataattttttttttatcttttgtagagacagggtctcaatatgttgcccaggctggtcttgaactcctaggctcaagcaatcctctcaccgcaacctcccaaagtgctgggattgcaagtgtgagccaccacacctgttggattctttctcttagatatttttctgtcttttgccttcctgagatgagaagcctagttttggtgagacaggatagtgtttttttctcttctgtctgtgcgactttgctccctgaagctttctgtcagtatttgcattatgaaaattaggttaagggcctggttttctaatgagtctattttagatagtcacaccacccagtgccatttatagtgggaagaaacaactgtctcarcttttcttcctacttcagtgctatgagactgaaaagactctgagaagagaaattgagatccttggggcaggacataaaaaagtaagatagaaacaacagccttctctgccttttccttgctaagagataatacacaaaactcccagatttaggtataggttccagaagcagctaggattctattaatacatccctattactctggttgcaagacttcaggtttttctagttaggaaaatgagggtagaccagccaacactgtggaacttttcaaatagactgccaatttttgcctcagtcacctgctggagataggaaagtcagtaatactcacttttcaagtctagttgctgtcagcctagctcttgaaaaacagctggaagcatggaagcatggctttcctccagccctgtggcctacatgatgtttcaaaggattgtttaacaggtctaaaaactgattatgtgaacgaaaaataaaattctaagccccccaactgactgaatggaccccttcttggctaaggaattccaagaaacctgaacaactagttcaagccatcacaggacgaaggggttggacataccttgttacatcctccctttgaagttcaggaacaactgaccagcattaatgtgaaaatagagatcgtaacagtgacaaaacagactctagcaataagataccaaattccaacctgactctggtacaggatcacataacagcaggccctgaaggaaatcaaagcattttaccccaaaataaatttctttgacatattttgaaatggccctgcaaagctgcctcttgtgaacgaaatctgcattctgtagagaatctccttcccttgctaggtcttttccagag

SEQ ID NO: 94704 - DNA, 165163 bp, Homo sapiens
taacctaggtgtttagtaggctacaccatctaggtttgtgtaagtccactctatgttgtttacacaatgacaaaattgcctaacaatgcattttttagacaatatcccatcattaagggacgcatgactgtaatgcctttgcagatgtcatcaaattatggctctggagatgtaaataagttatagatctgattaggtgggccctaaattcaatgaccggtgttcttaaaagggaaaggaaagaggaaagaaaggagcgatcacagaggaagggaaggaggccacgtgaagatggaggttgagattggagttacactgccataagccaaggaatgacgggagccaccaaaagctagaaaaggcaaggaaggattcttcctaaagcctttggagggaatgtagcactcctaacaccttgattttagaattcttacctccaaaaccatgagagaataaagtctgttgttttaagtcaccgagtttgtggtaatttgttacagcagccctaggaaattaaatacaaggatcaaaagaaaactgaggggtaatcttttagtggcacaaatgaactcaaattggcattcccacatacatagttctaaaatgtctgacacctctaaaagcaatgcttaccaaaacagaaacttctaattcacttaaaggagtcaaataattcagcatttaactcataagatcctcctgacactcaatattttacaaatttcatagaattacaaccttgacttaaactatatataaatgtgaatatatactttgcaaataaaagaaaaatttgattcatttgaagttctgtatttacttttagattaatgatataattatgcatatttacactttcaacctcttctatttttgaagcaagtaagatttctcttatccacaactttttaagccataagttaaatatttatagaaatttggaaaatagagaaaagaattgcttcaaatttcaacactctaacacaatttgcagtattttggtatatttcttttccatcttttaaaaacatggctacaagcaagaaacatacaattttgtattctacttttaaaagaaccttatgattgtatcatgtaaattttgcagcaacagtctttcaaatcgtaattttaccagccacatatcaatacccattttcccatgttggaacttaggttgcttttatgtttttattttttattttttttaatatggaacttaggctgcttttaattttttttattttttatgttttgttttttgagatggagttttgctcttgtcacccaggctggagtgcaatggtgcgaactcggctcactgcatcctctgcctcctgggttcaagtgattctcctgcctcaacctcccgagtagttgggattacaggtgcgcaccaccaagcccagataatttttgcatttttagtagagatggggtttcaccatgttggccaggctggtcttaaactcctgacctcaggtgatccacctgcctgggcctctcaaagtgctaggattacatgcatgggccaccacgcctggctggctgcttttaatttttgctatgggaaataacactgcaataaaaatcttgttcatactttcattcacccacccccatgtttctatctatcctgctagacttgggagggtgtgacatagtaggtgctcaataaacatttgttgaatgcatcttgtatttccttaggacagaatccagaagtaatattgtacaggtaaatggtttagggcaatgtctcacaataaatattgctattattatgaactattaaatgaaatttactggctcttgaaatatattgccaaatttatttattaaaaggttgtgataatttacaatgctgccagcaccattaattaattaattcaagaagtggttttttttttgtttgttttgttttttagagacagggtctcttactctgttgcccaggctggagtgcagtggcacaatctccgctcactgcaacctttgtctcctcgactcaagcaatcttcccacttcagcctcccgagtagctgtgaccacaggttcacaccaccccatccagctaatttttgtctttttcgtggagacgtggtttcaccattgttgccaggctggtcacgaactcctgagcccaaagcaatctgcctgcctcggcctcccaaagggctgggattacaggtctgacccactgcacccagcctcaggagtatatttttagcacttgccgtgggccaggaactgttcaagatcccgggggatagagcacggagcaaaacagacaaaatcactgcctttatgagttttcattctaatggaggaggtgaagttaaatatctatttaagtaatatgtaaatagattgtatataattgcttatccattttcttagttatatattttttatataagcataatacatatttatgaattatatattaaaatgtcagtttgttataatggatatgaaggaaaagcaagcaggataagatgatagggagagaggggtggttttttggataggctgatcagggaagtctgtagaggtgacatgagtagagacctgaatgaagaaaatgaggtgagatccagcaggagcagtatggctggaaggaagggagaaagagaaagagtggaagaagaatgaatactatttttagatgtctctcaacagtctgagcattattttttttaaataaaaataggtaaaaaaaatactttactctgttatgaattaatattattttctttctggtcatatggactgcattcccttactagtaattcaggagaaataatactagtaatagtaaaagctaacatttacaaaactcctgccacatacaaggcactgtatgtgtcattttactggcttcacaacagcccagtgagatatggattatgaacataattataaaaattatggctgagatgtaatattctgtaaaacagatcattagtaaatgcccttgtgtttggggggatagaaggacagaggtctgaggtaagcttatagggtttaggctctgaattcagataaaccagcaccagagatcatactcaccaatatctcatgctgcatttatacaacaaatttacattattctaataaccctaggatcccatacttgtttcatcttaaagataatcacatgctactttctaaaaccttgcaccatggtttcacagatttgtaaggttaaaaggaacatgcaaaaatgtccattccactttctacaagcaagatctatctttaaaaatattccagatagatatatatccaggtggaatagacagctgtccaccaattcatgctctcccttccacagcatgaagtagtacttgggaactcagggactatgcttcccagcacccttgtttctacgggcagagttctgttttgtgtatagtagtgctatgtggcatttcccaaacaaggattttaagaagctcaccctccctccatcttctcaggtccctggagatcagttttcactcattaggaacacttatttggactgctaaaaaggttaaaaaatacacttatattaagccactcattttaatttttatgtattatagcatcaattgtatatcttaaagatcctgaattccataacttcccttttaatgatatattctgaggcaacaagcccttaagggtaaaagaccacaaacaaaaatcctacaagaggcctggcgcggtggctcacacctgtagtcccagcactctgggaggccaaggtgggtggattactagagcccaggagttgtagattaccctgggcaacatggcaagaccctgtctctacaaaaaatacaaaaattggcagagcgtggtggcatgtgttctgtagtcccagctactcaggaggctgagatgagaggatcccttgagcctgggaggtgtagattgcagtgagccgagatgagcagagcaagatgatgtctcaaaaaaaaaaaaaaaaaaaaaaaaagccaacaagagcaatgaaactctcaaaatatgagtattttttgtgaacattcctaccatttctcatgttgaaattatgctttccttgcttaagcatcttgtcattctacattcatttctgtaacatactgttgtgggttaaatttgatccctcaaaagataagctgaagtcctaacctccagtacctgtgaatgtgaacttttttttttttttgagatggagttttgctcttgttgcccaggctggagtgcaatggcgcgctctaggctcaccgcaaaacctccgtctcccaggttcaagcaattctcctgcctcagcctcctgaggagatgggattacaggaatgcaccaccacgcccggctaattttgtattttttcagtagagacagggtttctgcatgttggtcaggctggtctcgaactcccgacctcaggtgatccacccgcctcagcctcccaaagtgctgggattacaggcgtgagccaccgtgcccggccaaatgtgacctttaattggaaatgagttctttgcagatgtaataaggttaagatgaggtcataatggatcagggtaggctctaatccaatatctggtgtccttataaaagagggaaatttggacagacacacagggaaaacaaggtgaagagggatgcttctacaaggattgccaaggattgttggcaaccaccagaagctagcagagaagcctggaaaagattatctctcagagaccccaagagagaaccaagcttactttcaccttgattttgaactggtcttcagaactgtgagacaataaatttctgttgttttaagccaccgaatctgttttaatttatatggcaagcctaggacacgaatacacacacttgaacatattctagcacagacagttcttatctaaaacatgtttttcaacaagagataaagaaacaggccaggaccggtggctcacgcctgtaattccagcactttgggaggccgaggcgggtggatcgcctgaggtaacgagtttgagaccagcctggccaatatggcgaaaccttgtctctactaaaaatgcaaaaattagccgggcatggcggcgcatgcccgttgtcccagctactcaggaggctaaggcggaagttccagtgaactgagatcgcaccattgcactccagccttggggaacagagcgagactctgtctcaataaataaataaataaataaataaataaaaataagaaaagaaaaagaaagatggcctatttgtggaacttcttctaggtactgaatattcattctagcaatacccaacttacaatttcaaaagtgcattgtttcaagttctcctgctttttaagaagttaaggctggcctaggagatccagacttcgtttttatgaatcagggactgyagccaatgtgtaattttctctgatagaatgagaccctgcaattcaagcctatctttcagggagagtgtagaaagtgatggtagccaacactgtacaaggaaactgaactggtggtggtggtagtagagtagcttcagccattgccatcaacacatctcacatcctcagactggctccagttgaggccatgggataaaataactcttcaccagtctttatgttcataattgtgatgtttcatctgctactttaaaatctccttgggaaaagagagagtaaaataataaaaagactagctagcatccatgagcacaaagacaaccaaaccaaaaaacaaagtgattttcttcattaaaaggctttgtgcacgccgaagcattctcaaaaacagttgacatcttcttcgtttgtcttcgcaaactccaactttctgtatttggcttttccctcttaaagcaacgcaaagcggcacactgcgcaggcgcctgtggccagscacccccccccccccccccccggaagattcggcgcaggcgccggtgccggggccgggaagtgggcgggctcgcgcgcgtgctctgcggttcacttccggccagcccctcccccgcctccctcgcgtggccacctccccctctgccttctcctacccagtctcttccccaactctccccacccctggtgctctccgccccgyttgcctcccgttyttccccgcccgctccatccgggtcgctgacggctgtctctggactggacagcagtggcgtccgcttttctctaaggaacccggtaaagtttcccaggggccggggrggggagcagcggagcagcggcacagacgccggaggtgccctggtgatcgtcgccactggctgacagaggagggtcccaggagccggagacgtgcttcagcgaccgcgctgccttgctctctgggcaggggccgccccccgtcaccttgggcttcccctaccctgaagggcttgggcgagttgtggccccagcgggttcgggggcgtgtgacggcgttagggaggggcaggccgggctgggcggatgcaggccggcccggcatagggcgctttctccgcgcttcctgggggtgaggggcgtggggcgagggcagggctgtggctccctggccccggggctggaatgtctcatctgcctggggatgggcttctctcaggttgaggccgygcactgccaagcctcggccgccggcctctgaagcygttgcgagcggccggttgcggtagtcgtctgcttggctgcgaggttgggtgtgtgcagatgatttctctttcccagtccccatgagctgatctgggtgcacgttcagggaaagacgggactaaactgcttctcatttccctacctgttgctggcgagaggacgcctctgtgttttaaagaaaagggtggttaaacctcgcgcgctgaagtcggggtattttcctgtattactcttattttrtttttaaatatgggaagacaatgcagaactcttgggaattatcgagttctgataccccaaaagaatgaaatcaaacttctgttaatgggatgatgggtcgtggaatgggacaccttgggcacttgctaacaggaacataggaaaattggagttgaaacttcgcaggctctgtaagaatgtggatgactgctacagaataaggctgacttcctgtaattatgatatttagtaacgcgatgtgtttaaaagtctacgtatgtatagatgaagtggactctgttatttgtgtctttctttacaagtgaggaaatattcagtcagtgtgctggaaagttctacagatttcgccatcagactatccattcctattcttgaaaaatctgcagtgctggagttatttgcaattcccccccgccaatctttaaataattgtctcagagatatagatagatatagattgcccacgggtgatttttttaatcccggttaccacttgtaataaaagaggttgaattttggagagaattgatatttaaattgcatgtttttttttctgtattataattatgcacattgatttagttttaaaattagtgaggttggaatgttagtattttgatttgaaatctgggatctttggaggtgatttaagattatggtttggtaagagaatcttcattttctctctgggctaaagagtaattgggagagtcgtttaaattgtggaaaattgctttaaatttccattattggttttatttctgttacagataagaactccattttctgttgatgtggaggtaggtattagaaagcttaattatactaggattgcaaggttatgtttctgcagttggctaaattttkcactgtgtatatttgctttttgggcagaggaaagatgtcttatttcttgttcccattgaaattatttaaagcaaaaagtagaaaaaattgtgattaatttcatcaaggtacttattcctattagtttagtctatcacaagataaccagaagtcaaaactagttaatatgttttaaattttgcaaaggatcatagaaagtgtcatattttccctaaaaatttctgtatgatacattttaaaaaatacaactgattggtttttgaaactgaatgatacttatgtagcatgttataaagtatatttaatgtttaccatgtagcaattattgtagcctagcacttgaaagagcaattatacatccttttttctttgaagtcatattaacttctttctatttcctcagacatagggtacctccaactttccggggtttcagaagagaattttttattgaaactggaagaccaaaataattacaagcatgttgtgctggggaaatgcatcctttgggcagctaggtttgggtggaattgatgaagaaattgtactagagcccagaaaaagtgacttctttataaataaaagggtccgagatgtaggatgtggactcagacatactgtgtttgttctggatgatggaacagtgtacacatgtggatgtaatgatctaggacagctaggtcatgaaaaatccagaaagaaaccaggtaagttgaaatgtttttaaaatttgctatttttaataattatatcattttaaatttgaatcatcgtataatttctctagttgtaactatatgtttatcaagctttaaaagcaaagtagaagttatgtatttccattatatgtgtatatttgtatggttctaagtactttatgttgtggtttctttttttttactactagtattataaaaccttattttgtatgacgatataaaacaataaagaaaatcagcctgcagtatataaatctttggtacagagtgtgtagtgtgcaggtcctctttaataaattctgttcagccaccctggatagattttaaatgcataatttactctgtgtttaccttactttgggaggggggaggaaaacaagacggaagctttttactttgacttgcttgcctaaaatatatttttattctttttatccctctgtcatagtattttaaatatgtaattttatttgatttagttagaaatatcttttattcctctcatcttctactttctgtagcattgctagctattaaagattttgtgactatgaagtgtcctgattttgtagtagttgtacaagcaaattaaataatttgtagggtaatgagaattttgaggaatttggtcacatttcatgttctgttcctggatattgtattttaaaatcaaatatttctacatttaggagtatcattgttatgtgagttttgctttcaattatgataactaaaagttaatgatttcaggtggtaaattcagatgagactgcagctatactgacttactgtttattttaactgtaacaataatggcacttcagtattttctgtggcagttattttatcagtttattaattaggtggtttctgttgttactcagcttttgagagattaatgtaatctaagatattcaggcattaaattaaggcacgattcatccttcacatcatctcacgaccatgccaaatctcacttttctaacttgcaaatactgtatcgttttcatcctttctttgtggttaaggtcttagtgtattttcttctgccttaatttgtaatttattttttattggataaatgatagtgacattcataaaatagatttttaattcttgcagaactcaaagtaaatggcagctttcttgtactctacctgtctaagaacattttatggattcctaccagattttcatgatctcaggcattgaggtggtcatattggtagaaatgaatggtaatttactgatacgcatttgatgattgtctctgctccagagacaaatgggccctttactatttttgcttagcttggaatgctgcctcaggttgagattttcatggtacggaggctactgctgttctttgtactttagcatgcccyatagaaataactgaacatctctctgtattactttaataatttctgaaaggccatagggcaagtagaaagtaaaaagccagcacatagaaattgccagtatagttacttaggtctactgaggtttaaaatgtttaagtgttagaggtagacactgtgtactagtagtataatgattatagtgccaggaacagcctccaactgtatagatgagattctgagaaacttaactagctagaataggcttctttgtggtcatgttgacattgtgatgattgcactgtgacatctatatcatcttgattcatcctggaaccattatttggtaatgtaaagttggggcagtgggtttccctaatttgggatacctctttaggattgcctcattgttgtcccgattacaccacagcctgtggaagagaaaagtgacaggcattagctttgtcttgagaaatttagagtctgggttgggagttaaggtatacatgaacaactggagagaactggaaattagacatgatgtgccatgcactttgagcctaggacatttaaatgatgggaaatattatgggatagaattaaagtaagatttctgggagaaaatgaaggcttacatttaattctattggtgatcacataaacagctaggaaataagtctggagctgaaatagttttgtagaaggggggggtcctgatcctgagaaaagctttttattatcagaagttctggttcgatgatatattgaagtgaacctaggtttcagagggaagagaaacaagttcaaaaagtagtagttgctgtgataggaacttcatcttttaatctcagctttgattgaatatttatttatttatttatttttatttttatttttttttttgagacagagtttcgctcttgtttcccaggccggagtgcaatggcgccatctcggctcaccgcaacctctgcctcccaggttcaagcaattctcctgcytcagcctcccgaatagctgggattacaggcgcccaccacaatgcctggctacttttcatattttaatggagatggggttttaccatgttggccaggctggtctcgaactcctgacctcaggtgatccgcctgccttggcctcccgaagtgctggaattacaggcatgagccactgctcctggcctaagatgttttttaaataatgtttttaactaaattttaagaatgtttttaactaaagttatttatatttggaataattcgttaatgatttgtgtcatttccccaacccctttttaaatttgtgaatttgaggactggattaaaagataaaaagttgttggatcttatttattttaaagtcttctggtaattgagcaagttggttatatttctgggacaatgtaataaacatagttcatttcccaggaggtttttgttttgttttgttttgtttcgttttgtttgagacagagtctcactctgttgcccaggctggaatgcagtggcacgatctctgctcactgcaacctccgcctcccaggttcaagcgattctcctgcctcggcctcccgagtaggtgggactataggggcgtgccaccatgcccgggtaattttttatatttttagtagggacgggktttcaccgtgttagccaggatggtcttgatatcctgaccttgtgatctgcccgccttggcctcccagagtgctgggattacaggcgtgagccaccgtgcccagctgacttcacaagaactttaaacttgtgtcagaaagcacatggaatggagggaactaagaattgtttctttacataggttggctttataaatatacatattccataactaataaggaatgaargagaaagaggtagccttattaaggataaattattctcgagattcataataacctactggaggacttggcctgacaatgtagtgaatagatttaacctgtggcctattgaaaagaggtgtttctgttctggactttttagggaccacacagaaagatttaactgaattcctttattatactaaaggtgcagattatgttcatgttcatctctgttgtcttgtatatgtatgtccttttctatcactactggcttttctgaattatttccagagaagtgaatgtctgtttcactttcatgtttttttcttcataagaactttaaaatactttttaagctaatgtctcaatttttaaatttatagctaacaaatatatttaatcttcagtgcgctagaccaatccatttaaatgaattgttgtttttttatactttcaaattcagttctgaagattttaagtatgggaagtatacttttctttacaagatccttttcttactgtgtatctaatcataggtataatttggtgaccatggttatgttttgcacattgatttccatttgtttcatgttagaaacagtactaaactgttctgtgaccataatttgtaaataaagtggtgttctgtttaaaaacaagccctgttatctaaaaaacagttttttgtgttttacaacattctttcamatggagtatctcatttaattctcacaacagttgtatgtagctaaggcaggtatcatggtccgcattttacagatgaggacactgaggttaaaagagattaagagactaatagggtcacttggctagcacatcttgagaccaccctaaatcttgtggtttttatccttaatctcacaaatcttttcctttgctacatttagaaggtaaaagaatatttgttcacctttgaggaagctggtttccatcagtattttattgtaattctgagggttttttattttttatatttttttgagatggggtcttattctgttgcttagggtagagtgcagtggcgtgataatagctcactgtagccttggactcctgggctcaagtgatcctcctgcctcagcttccccagtagttgggactacacttatgtgccaccatgcctggctaattttttttttttttttttttttttgaaacggagtcttgctctgttacccaggctggcrtgcagtggtgtgatctctgctcactgcagcctccacctcccaggttcaagtgattctcctgtctcagcctcccgagtagctgggactacaggtgtgtgccaccacacctggctaatttttttgtagttttagtagagacagggtttcaccatgttggccaggggggtctcgaactcctgacctcaggtgatctgcccacctcggtctcccaaagtgctgggattacaggcatgagccaccaggcctggccaatttttttatgtttgttagagaagggggtctccctatgttgcccagtctggtctcaaactccagtcctcaagctatcctcctgtcctggcttccccaaattgctgggatttatagggatgagctactgtggcagccaagaaaaatctttaaaaaattactatcttataactaagcttatacaatgaagacagcatattttattgtcttcccccttgtacacaaacttaaaaatcattttaagaactgataagaagatcgagagttctattttcaagatgtaatattgtaccaacaaaagctaaaaaattcaaatatgtatagtgtattactgaatggaagactaactcgattggcagagtttataggtaatagttttaatagtatgataaaatttattgtggtttatgttgaactctttttaaagatgatgagcattgattctttgttttccatatcctcgaatggtaatttctactgttgagtcattccaataaaagcattttggtcacatagtagtgattacttggcttgcctttcttgcttcttcatttttctgacctgttctctctgttcataaaacaaatttataaacgagctgctccttaaaatatagttgaaatttaaaaagtaatataggaaaatataactatgggaaataaagttactcacttaagggtgggttaaaaataaaaataccagattatcccacacatttcttactgaaccagaacatttaaaccaaagaagctcattgcgttttataactcccggttttcacaataccttctaaggaagagaaagatgtggatgatagatttgaaaaaagtaattacttgggtcaggagtggaggcttgctttgaacgctttactttgagaaaggttagtgcccaagaatcacagtgtcaagggtaggaaaaaaaatcataatgcaaacagatgactacygttagagaaatgtataataatactttactttgtgtaggaccctacatctgaggaatttcaagagcattacacaataactcatggttcctttcaaaatgcttgtgacacaatttgcaagaattatcctcatcttaggggataaatttacggagaaatggcagcacacgttggtaagtaacttgtcaaaatagcagatgactggtgaacagctataagttgaatctgaaagttagagtctaccagtctcctaccttattcactaaattgtgcttatgtttagaattatttacagtaatatcttctgtttgaggcaggtmaaatactagtgcacagattgtttccctgccattcgatttgatggcctgttaaatcattattttaccaagatgcttacattctgataccactttgatacttcagtataactctgtgtggtatgaagaatatttgaacaaacgaacagaaacttaactatggtaatgcccagtcttttctcttttctgttatatattgtatatatccccttgtctaactgctatgctgtactacaagccaaggtccatagtaactgacttgcagaattgatttggtggctaaccttggaacttggattagttatgttgtataaagtccgccatgtagatacatgcatctctctctaagatgcattggtttggtggatgctttataaaactcttaaaacctacacagaagacaaaaatagcagtagatgcctaatctgagcagtctaacaaagggaaacttctttaaagtacttggaaccagtgattttctcttgggtatgttagtgtttttacatgattagaagtgagccacatactttccttaaaagatcagcagtgtggtagatttggttttacaatttgggtacttagcagattcttgttgcagatggcagtctaggtagtctagttaccattatctccttagtaaagattcttaggttctgtattcccaatatatcatacaaatgtagcactgtttttaaagctcatttctcacaaaggcatgyatttttaaaactgctttgaagacacaaaagttacttctgtattcctaggctataaagtatatcaagtgcttgggatatgtatgaaagaatctaatagaggaggtgtactcaaatgtttatataagagtttatttgggcttggataatgttagtagaaaaatgggtaacactaatgaggaaactatattaatgagctcatggttgaccttctttctgttcccctggatttttttttttcattttgatgaaatttaaaaggcaataattaattttaaattgtaatgagttatgataattaccttatatgcgagaaaaacctatgctgtgtgtaattatacagacattttattggagttttgttttgtttttttagacaggatcttgttgtcactggagtacagtggttaaatcgtggctcaatgcagcctcgacttccctgggttcaggaatcctcttatctcagcctgctgagtagctgggaccacatgtgcatgccaccatgcccagcatatttttgtattttttatagagacagggttccactcttttgcccaagctggtctcgaagtgatcctcgcacctcagactcccaaagtgctgggattataggcatgaaccaccacgccaggccttattagagtttgtttgtttttgttttaatgggaaatttcttgcatttcggtggcttattctttaaaccataagttttatttgcctagatttactcttttgtgttcatttctagcatggcagaattttggtttagcctttcttggccataagacattctggaatcctttagaatgggcttttcacaaattatttgaaaatatattaattacttttttattcatatctaagttttgcctcattttattcctttgctaggtgttatactattctgaaataacatatttttagtttttcataattgttttctattataaaagtattacatgttcttggtagagaattactaatacataggaaagtaaaaactataatgccatcatgcataggtaaatagtattgtcacctgagaccttttctatattcatatatgtttctgattacaaactgggaatgtgttcttgtatctcaacttttttcccccgataataatttagcattttcccatgttttaaagttttaggaatattgggaatatttaggaatataattaacatttcatcatttagatgtaccaaaatttatttaagtattctattttttggatttttttttttttttgagatggagccttgctctgtcacccaagctggagtgcatggcgcgatctccactcaccctagcctctgcctcctggattcaagcgattctcctgtctcagcctcctgagtagctgggattacagacgtgtgccaccactcccagctaattttttgtatttttagtagaaacaaggtttcaccattttggccagggtggtctcaaactcctgaccttgtgatccacctgcctcagcctcccaaagtgctgggattacaggtgtgagccaccatgcccagcctattttttggaatttatttccagatttttgttataagtaatactgcaatgaacatatatatatcaatttagtttttatgtctttttttctttttctttttttctctctctctctttttttttttttttttgagagagaatctcactctgttgcctattgtctaggctggagtgcagtggtgccatcttggctcacagcaacctccgcctcccaggttcagatgattctcctgcttcagcttccccagtagctgagattgcaggcatgcaccaccacacttggctaatttttgtatttttagtagagatggggtttcaccatgatggccaggctggtcttgaactcctgacctcaggtgatccatctgccacgacatcccaaattgctgggattacctgcctgagccacggcacccggcctatttctttcttttaattattttttatgttttggggacagggttttgttctgtcgcccaggctggagtgcagtggcatgatctcggctcacggcaacctctgcttcctgggctcaagcgattcccctcagcctccagagtagctaggattacaggcgtgtgccaccatccctggctaatttttgtatttttagtagaggtggagttttgccatgttgaccaggctgttctagaactcctggcctcaagtgatctgcccacttcgccctcccaaagtgctgagattacaggcatgagctaccatgcccagcctctgtttcttaattattatttgagacggagtttcgctcttgttgcccaggctggagtgcaatggtgcagccttggctcactgcagcctccacctcccaggttcaagtgattctcttgccttggcctcctgagtagctgggattacagatgcccgtcaacatgccctgctaattttttgtatttttagtagagacggggttttgccatgttgaccaggctggtctcaaactcctggcctcaggtaatctgtccgccttggcctcccaaagtgctgggtttacaggtgtgagccaccacgcctgacctacctctgtttatttatttaggaaaaagaacatctttaattttaaggagtgagaactgaatttattttttaagcacagttgtgtctcattttatgaagtttatacacataagatatttgtaaatgaaagtttttaaaatgtatgacaaggctgagtgcggtggctcatgcctgtaatcacagcactttgggaggctgacacaagtggatcacaaggtcaggagttcaagaccagcctggcctgtgtagtgagaccccgtctctactaaaaaaccagaaaaattagctgggcatggtggtgtgcctgtagtctcagctactcgggaggctgaggcaggagaattgcttgaacctaggaggcagaggtagcagtgagctgagatcatgccattgcactctagcctgggttacagagcgagactccaactaaaaaaataaataataaagtaaataaataaaatgtatgacaagctttctattacaacatgatgaatatcatttaatgatctagtagggaatagaaaacaaatgcacaaataatagaaaggcaattaaaatatgctaagtgttacaggatgtataaacaagagtgctgtgtagagatagtatactaagcagatggcaacaggcaagtttgaggcttactaagggaagagtagtccatgtaattgagatgtcttgagaatagtgagcaggaaggttaggcaaaattgaggtcagattgtagaaataaattaaggagcttgaatttaatttggtgaatatctattcactcatagtttgtaatgggaattaccatggatttataaaggaaaggttgaaagggagagaaattggaggtaaagaaatagttaggctgtgatggtagtcctttattttttatttattattttttttgagatggagtctcattctgttgcccaggctggagtgcagtggtgcgatcccagctcactgcaacctccgcctcccgggttcatgtgattctcctgcctcagcctcctgagtagctgggattacaggcacccaccaccacacccggctaatttttttttttttgtatttttagtagagacagggtttcactgtgttgaccatactggtctcgaactcctgacctcgtgatctgcccgccttggctcccaaagtgctgggattacaggcgtgagccaccgtgcccggccgatggtagtcctttaaagcaagaaaggagcaggtagatgatggagacttagagaggcagaaagaatggacaggctttggtaaccagatggaaataaatagtaaatgtaacggaaagagccaggtatgatcctaggtagaatcattagctatagattagtatattcattagtatagaaataaggaatccaggaagaagagaaatattctcttttaagaggcaagttaaaagattytggtaaggtgaattttgtggtaaacttaataatattaagtgagcagtaagaaatgtagtattgtaagtggggagaaagatcagggctaaatgtgtgaagtgtttattttcgattttgttttattttcagttcagataggctgacattccaactgtagacttytcccagttytaacctgttaagtaattaataattcattaacaatacttaactttgtgcttttggaagactgcttaaggcacatggtgatataataccgttgtaaatttaaagtaatctaaatggttgccacctctatctgttttgtaaacctgaatttttatatacagatttttttttttttttttttttttttttttaaatggagtctcgctctgtcacccaggctggagtgcagtggcaccatctcggctcactgcaacctccgcctccaaggttcaagcgattctcctgcttcagcctttcaagtagctgggattacaggcacccgccaccatgcccggctaatttttttgtatttttagtagagacgtggtttcaccatattggtcaggctggtctcgaactcctgacctgaagtgatctgcccgtctctgcytcccaaagtgctaggattacaggcgtgagccactgatcccagcccatttgcttattctttcgctgacagaaacctattccttttttttttttttttttttttttttttgagacggagtcttgctctgtcgcccaggctggagtgcagtggcgcgattgcggctcactgcaagctccacttcctgggttcatgccattctcctgcctcagcctcccgattagctgggactacaggtgcctgccatgactcccggctaattttttgtattttcagtagagatggggtttcaccatgttagccaggatggtatcgacctcctgacctgatgattcacccgccttggcctcccaaagtgtcaaacctattcttaattactgtgtttgacttcaggacttccctccaggtcttactggaaacaaagcttttgcagtcagaaggtgcaatgacataggtataagttgcttttggttccactagtagctgaagtarttttaactataagttgtatatatgcgggcaatgtaggcaagagctattgggaaatacaccttttgcgataatgctgttggttctgtgaaagggaaacggtgtggggaagaaagaggtgaggctaaaagcggtcctaaagagcagaattaggagtatctgaaaagcaactggaagaaagtttagctactttacctatacattattagaagacatttgtgacttttttttttttaggatggcataacgaggataaagtagatcttaaattgcttcccacaattgatacaaagtacagttgatcaatcagcatatgtgtaatttctaatccaagtattgcttagctatagatttcataactaggctctctaataggaatgaaccttatattttgaagagttactaggtagaagcctgagtggttgatgttacctgtaccagaacatagaactattcatattttcagttaggaagttgaatgagcctctgcaactgagaataaggggaaaagagaacacattataagttgrtactgcattgtatagggtgaagaaacacataaaccatataattggagagaaatttagtgttgaaatatttagaatgtattatttatggctggacgcggtggctcacgcctgtattcccagaactttgggaggtcraggcgggtggatcacaaggtcaggagtttgaaactagcctggccaacatggtgaaactccatctctactaaaaaaaatacaaaaattagctgggtatggtggtgtgcatctgtaatcccagctacttgggagactaaggcaggagaattgcttgaacccgggaagcagaggttgcagtgaattgagatcgtgccactgttatttgtgtcactgcactccagtctgggtgacacagcaagactctgtctcaaaaacaagcaaacaaaaagaacattatttacaccttataatgctgatttaaaaaaataataacagtaaacctccattatrtgccaggtactgtgctgaatcctttattcattatccaaaagtcttgtatctrtcctgcaaaagtatgtgttttggtgagaacagtcagactccagaagattaagtaattctgccaaagttgaaattaaagctgagtaggaacaagagccaattagaacaatggaagaaaagaaaccaaattattataatagcaagagaaacaaaatataatataatattattataatatataatattatgatatataatattattataatatataatattatgatatataatattattataatatataatattattatgatatataatattattataatatatagtattatgatatataatattataatatatagtattatgatatataatattataatatataatgttataatatataatattataatatataatattataatatataatattattataatatataatattattataatagcgagagaaacaaaacaacccaggaataaagtagtaagaaatgtgcaagacctatatgatgaagacttgaaagcattactgaggagcacaaaaaacttgagcaaatgaaaaccacatttatggatagggacactcaaccacatcaacccgtcaattttctctaatttgtaaatttagtatgatctcaatgaaaatgtcaaatggcttttgagggaagtagacaaatatatactcaagttcatatggaaaaagaaaaagctaggaaaattctaaaaacacagtaatacgtattaactttttttaaagacagtttctaatatacattaagtaaaatgagcaaggtgtagagagtaatgtatagagagctacattttgggttttttaaacaaggaaaaatacacacttgcatttgctttatagatacacaaaaaaccctggaaggatatatacaagtaataacattggtaactgttggtgtagaggtgggaaaagaagtggtgagagttagattgatggagaacatacatagtagactctcactgcataccttttaaaaaacaatgtaaatatgttacccattcaattttttttttttttggaattagagtgcttacataaaaatcctggctctgttgctagatctgttttcttggtcacattgcttaacctttctgtgcctaggtgttctcttctctaaaattaggataatcatgccaaactcctagagtagctgcaggagaattacttgaacccgggaggtggaggttgcagtgagccgagattgcaccactgcactccagcctggtgacagagtgaaactctcgtctcaaaaaaataaagataaaacctaacagtgcaaagaacaatgcctagcgtatggtgagtattcaataagtgtttgcctagaagaaaaaccaatattagagtgggaatttaaatttaggtctgccttacggtaatgtggtattatgctgtttcatatttgcctaatgactgtatattgtcctgtagggaaactatattgctttcataattacctccagatatacaatacagatcttttcatttatgcctgaagttcagacatttattcaacagacagttgtcttcctgctgtgcccttgatattgtgctaggcatggaagtacttctttgcctttagtcttcaattaaccttactagagctcttattcaaagactatgccaaaattttaaaaaattatttgtttatggtacttagaggtaatgctttattggagcgatataaaatggattggattcctttaccttcagactttaaagatacaataatgtgaccaaaaaagaaaagaattaaagatgcctttttttttcttgtgagaagcacatacgtgatggaagttagattgatcattgattttaaaaaggttatttaatgattaataattataaggtggccaggcatggtggctcacacctgtaatcctagcacttagggaggccaaggcaggcggattgcctgagcttaggaattcaagaccagcctgggcaacatggtgaaatcccatttctactagaaatagaaaaaattagctgggtgtggtgatgcacgcttgtaatcccagctactcaggaggctgaggcatgagaattgcttgaacccagaaggtggtggttgcagtgattgcaccactgcactctatcctgggcaacagaacaagactctgtcttaaaagaaaaaaaaaaataataaggtgtagtttgtttactgatattttgaggatcataggcacttgagtaaatatacttagttatactttttttttttttttgagacagagtctcaccctgtcacccaggctggagtgcagtggcgtgatctcggctcactttgacctctgcctcctgggttcaagcgattctcctgcctcagcctcccaagtagctgggattataggcgcctgccaccacgcacggctaatttttgtatttttagcagagacagggtttcaccatgttggccaggctgctctcgaactcctgaccttgtgattcacccgctttggcctcccaaagtgctgggattacaggcatgagccaccgttagttatacttttaaaaccagccctgcccttcccaaaatgatgagctgaccttaaaatgtagaatgcatggtttgatcatacttctgtactcttattttgcatttgctgttattttcacaccaatctgaataatattttggcttagtgtgttgttgataarctgtgtacccactgttatacagtgcttgactgtgagagaaatttatatgtcaagaaaatcaaggacaaatatatatatatattacatggatgtttgaaattgtataaaactgttaagttgtggagaacaaaaaaaggaacatttaaaatggaagccattgcagttagctatctttatctgtcaaaacaaaatgcaaaaacaactccttttccttgtttgttaatgcttgcacttacttrggttcagaccttaaattcactttaggatcttttcctttcccgtagcaccaacattgacccagttgccagattttggttatttttctcagtgactgtcttgttttttaatttcctttgcaaatagctaactgtgtcgttttgagttaattactttaaactattgggtccttagtttcctcctctctcaatctaaaattctttgttttcattctggactattactggtgtacatgagaactgtggccagtagctctttaactgatctccctgctccagttcattcttattaattccaggttaatctttccaaggtatatttcagtttctctgtcttgaaatttgcccagctaaagtaccatctccatcattactccttggtcactcttataagaattcaagtcacacattttgtgtactaccaagtacagcccatggaattcaataacttaataaattgcatcgctgtcttcccattacaatgatcttccctaccatgtcatctcctggatggtggaaaaccttgtcttacatgtctttgctaaaaccacagtgaaatactatggtgcacatagaaggaactcagggcagggttgttgaatgaacacatgatcaatgtattttattggttgtgtcttaggaaaggaagatcatagactcttgttttaatgaacttgatcaccatcagctacattagagcgaaaaatttaaaatttaaaactctactaatatattctgagggttcattcttggcttgtctttgaaagaaattgaactaaagcaactatatgactgtattgtattatgttggagtctttatatttcacctttaccccttctttcctcttcaaagcaactaattttagcagttcatagacatccagatagtacttctttaaaagaaaagggccaggcgtggtggcttacgcttgtaatcccagcactttgggagactgaggccagtggatcacctgaggagttcaagaccagcctggtccaacatggtgaaaccccccctctactaaaaatacaaaaattagccgggcatggtggccggtgcctgtaatcccagctactcaggaggttgaggcaggagaatcgcttgaacccaggaggcagaggttgcaatgagctgagatcaggacactgcactacagcctgggttacagagcgagactctgtctcaaaaaaaaaaaaaaggatattgtaatgcccctaagtaaaaataaaactatattttggaagtaaattattgaaacataactatgttatatttgaatattaacaaaaggacagtggttcaataaatacagaaatgtttataacttagtgcctttatctgtgaagcttaaggataacttcctcatggtgttatgaggattaaataagattaagtaattaaagtgctaagcttagtgccaggcacataagctctttatatacgttaattgtattcctctgtataaatatataaaaggggtatgaacttgtcaacatatgcattacaaataatttcttaatcttgttagatgtttcttcatataaacattttattgtttgctgtcaactaagacacataagttagtgtatattaactttagattttatcagggaacccactaaaatactttcttggctatggattgtaccattccaaattgctactggtaattattagtaataattagagggaataaaaattttaatttattgatgttttagttttgtttgtttctttaattctgaatttgtcttaaagtttgtgatgattgttaagtccatcatgttagagatccttttaaaagtatcagttaccatcagcctgggcaacatggtgaaaccccgtccctaataaaaatacaaaaatagccaggtatggcggcacacttgtgtaatcccagctactcaggagcctgagtcaggagaatcgcttgagcccaggagctggaggttgcagtgagccgagatcgtgccactgcactccagcctgggcaacagagcgagactctctcaaaaataaaaacaacataaaaaaataaaaataaatataaaagtattagtaaacaatagttgcactttgttttatttaaacaataatttcactgttatttttcagtaatagggaagtttatgccttgagtgaagtagcctttggttatttttctctgcaacaaaatagcaatgtaattatttaaagttatttaaataattaaatattaaagttatatttaaatctgaattactcattgatgttattcactaatcccaagtgattaatatctttatctttaaaaagtcagaatcataaaatgggacagatatatgtctcatgcctgtaatcccaacactttgtgaggctgaggtgggtggatcacttgaggtcaggagtttgagacaagcctggccaacatggtgaaacctcatctctactaaaaatacaaaaaattagctggacatggtggtgccggctgggcgtggttagctgaggcaggagaatttcttgaacctgggaggtggaggttgccgtgagctgagattgcaccactgcactccagcctgggcaacagagttagtgagactcggtctgaaaaaaaaaaaaaaaaatcattaaatacttcaactgcacattcagttgtttaataaaacaaagaagaagaaaagaaaaaaaaattataaaaaaccagtgttaaatttggtaatcattttcccaatcttttctctgcatacatgtgtaagaatggagctctacagtatcttttttattttatagtatggtatcttgagaactgtaaagttaaatttttaggcatggattttaggtatactctgcattgccctagtttagagttttgagttgttcagagagaagagaaggggaaatctgtatttttaacaactaatgaggcatggtaggacagaggattttgaaacttaatctctggtggttttaaacatgtactaaagagttgaaatgatctctttaaaataggtatttgacaacgtatattccttctgacctcagtattaaaatttttcagtgtggatatacttgtcgctcttcataaagctattgattctagatcctgttaacgtgaacacaaaacatcaacagagatttttgttctctatataaaatgatcaatgttttagtttgtggtcattcctggacatgggcattcacagaactgccaaatacttgagtcagcagatgtgcactttatcaggggaggttcaaggcagtgctctgcctttttgttctagctgtcattacaaacaagtggcctttttgtgatatatttaatgccacattttttgtatattttgcccatcttattggtgattttgctgtttaaaatggtccccaggccgggtgctgtggctcaaacctataatcccagcactttgggaggattacgtgagtccaggagttcaagactagcctgggcaaaatagggagaccacatctctacaaataattaaaaaattaatggggtgtggtagctcatgtccgtggtcccagctactcrggaggctgaagcaggaggatcacctgagcctgggaggttgctgctgcagtgagctgtaatttcaycactgcactccatcctgggcgacagagagacctggtctaaaaaaaaaaaaaagtgtagtgcttaaatacatattaaataagatgttttaaaacagaagcatccctaaaacgagattatgtatttatcagttgacaaaaatgttctgaccagaggcttgcaggaaccttaccttgtattttcttcgggggcaatgattcaatatttgctaagtcaatgttcrtggtgattttataggacataactactgcagatagtgagaattgattattcccagctagactagaataaaaagactaataagtggaagaatgatgtggtttcttagaaggatgatgcagtagtgaaataaactatcagtatatagcatccttctgtttcttcgtgcattgtacagagtattgtgtcattttttaagaaggtataaaacaagtctggagtctctatctttgtagcttttatttttctctttttgtagctttcgttttccacaattaagaatatagaatttttcactctgtgttcataatggcaaagagaagaaaattgacaagagggagatgtttcacaattcagacgttatcagagagagcagcactttatgatggtgaaattgatcatataagtgaactcttacacaatgaattggagttgatgatactctatatgaattttcacaagcttaattgataatatttctgaggtcccagaggacataggatatttttacccagttactcattcaacaggaagtactttgttatgtaatattttgcaacaagaacctggacytgtctatcctgtatgtgagacagtattcttttttttaatgatatttgtgcagaaaaatgtacttgatgtagttcgtaagcaaacaaacactgaagttggatttgcctacaaaggtgattggaaggacacagatgatgtagaaatgaaaattttcattaggttgatcattttaactgttttaaaaataagcctaaaaatgaaagtctttctttaagaagcaaagaaggatgccctctttctcctcggtaaaatgatgcgccattagtgttttcaaaagtatgattaattatagaagtgtaagaagaaccagaagtaatgatgaacaaggacctattagagatgtattcgaagtcgttatctacaaagtggatatgtttcatctgtctagcactttatcttttcaggttttgcctatgtctctgaaaaatgaattcaraaggcawttttttccacttgtgttttcctttttgtgcctccaaaaattaaatgtctctttttttttcttgaagagaaatactgtgactcataaatactgataggaacacaatgatacttttttttcaccctttttatatgaacagtttgaagcataaagaaaagttgaggctgggcgcggtggctcatgcctgtaatctcaacactttgggaggctgaggcgggcgtgttgcttgagctcacgagttcgagatcaccctgggcaacatagtgaaaccccacctctaaaaaatacaaaaaattagcctgtagtctcagctactcaggagcctgaggtgggaggatcacttgagcctcggaggcggggttgcagtgagccgagatcacgccactgcactccagcctgggcaacagagtgagatcctgtctcaaaaaaaaaaaaaaaagaaaagaaaagttgaaagaatagtgttaacattggccgggcatggtggctcacgcctgtaatcccagcactttgggaggccgaggcgggcggatcacgaggtcaggagattaagaccatcctggctaacatggtgaaactctgtctctactaaaaatacaaaaaaaaaaccaaaaaaaaactagctgggcatggtggcgggcgcttgtagtcccagctactcaggaggctgaggcaggagaatggcgcgaacccgggaggcagagcttgcagtgagccaagatcgtgccactgcactccagcctgggcgacagagcgagactctgtctcaaaaaaaaaaaaaaaaaaaaatagtgttaacattttgccatatgttttgtctgtgtgtatttatatttttaaataacatacctttttatttcagaattactgttgactataatgattatatgctgttattaaacctttccaacaagtttagcatcaaacatttgtaatttcaacattttgtagcccttatttatcaaaggattcaatagtttttttaatggacttgtgtggcaagttttttctttgtttttttttttttttggtctttgggtttttctactgatcatcaattgatgtggtttaatccccccttaactctccgttttctaattgtgttattggcctttaaaggtaaatgtactttggtgatagtacctggaacatagtaaataataaatgttagctgttagatttggcatgagttttttttgcatccctttcttacacggaacattactgggccaggctttgtaagtgaatttttttgtttgttttgctggattcatttatttctcttcattcttgcttgtcattatctccctttttaggccatcttgatttgagtattcaaccagaatttgacttggatgtaaaatgtctcaacaaaccattgatatgactttctaggatactggggaaaaatggttgagattattcactttgatgagccatttggaaaaaaatagataactttttaaaaattatagtgaagttatcagttttgtgtatttgatgkmtaaaaagtcagctattaaatattattctcaagttgtgtgtttttataataatgtattgctgaagtcattatccattttcaaagttagtatcccaataatttgatggggctaaaattctgaaagaacaaaaattatcttcagtatttagtatgttgaaaaagattaaagagctcagattagttttaaaatgaaaacaatggttttaatacattgctttaactacttactctaagcgtctgtttcttttatattttttaagttatattttatttattgtttgttttgaaaagacaatatatattcacatggttcaaacatcaaagcaatttaaatayacattgagaagcttggctcttacatttgaccacgctattgttccctctgcctatatcccttctaagtaactacgcttgttagttgtttttttgtttttgagaaagggtctcactttggttgcccaggctggagtgcagtgatgcagtcttggtcactgcagccacaggctcccaggatcaggtgattctcctacctcagcctcctgagtagctgggattataggtgtgcatggctaatgttttgtttttttagtggagatggggtttttgttgtccaggctggtcctgaactcctggactcaacaatctgcctgcctcagccttccaaagtactgggattacaggcataagccactgcgtctggccttgtttgttttttgttttgagaccgtcttactatctcccaggcttgagtgcagtggcacaatcacggctcactgtagccctgacctcataggcttaagagatcctcccacctcaattccctgagtagtggaaactacaagcatttgcccccatgcctggctaatttttaatttttttgtagagacagggtctcattatgttgccgaggctggtttcgaactcctggattcaagccatcctcccgcctcagcctcccaaagtgctaggtggcatgagccactgtgcctgttcgtttgttagtttccaaagtgtttttttttttttttttttttttgkggcagkgtctcactctgtcacccaggctggagtgcagtggtgtgaatttggctcactgcaacctctgcctcctggattcaggcagttctcatagtgagattacagacacccaccacctaggctggtctctaactcctggccttaagatctgtccacctcagcctcccaaagtcctgggattacagatgtgagccactgtgcccgacttatctttccaaagttttaaaaatgtagataaaatattagcaaatatgaatatgttttcttcttcctcttacacaaaaaatagcaaatcatgtacactattccacatcttattttttttcttccccaatggataatatatcctggggatcttttcataacaatgtgtagtttcctcttttcttgatttttttttttaattgcagagcataatatttcagcgtgtagatggaatcttttggatactggagaatttccagtgttttgctattgtatatagtgctgcaaatatatatatatacacatacacagaggtatatctgtagaacaaattcctggaattggaattgctaggtctgaagggtgaatgcatgtgttttgttagatattgccacatttctcttcatagaggttgtactgttttgtttttaractaacagtatacaagagtgcctttttccccatgaactgttatcaaactttttgatttttatcagatgaataaatggtatcttggtatgtgggttttttaaaaaacaaatttaaaaaataccctttctttttagagcagtgttttaggttcagggcaaaactgagcagaaaataaagagttcccttctacttcctgtcccctaccatgcaccacctccccagctttctggatgttctgcagcacaatggcacatttgttaaaatcaacaaatctacattgatatatcattatcacccaaattccatagtttagcgttcatttttagtgttacacattaaatggattttaacagatgtataatgacatgtatccatcattgtaatatcatgtagaatagtttcactgccctcaaaatcctctatgctctgcctgttcatccctccctccctgtatcccctggcaaccactaattattttactgtctccatcgttgtcttttccagcttgtcatatagttgggatcatgtagtttgtagccttttcagattggcttttttactattaagtaaatttcttccatgtcttttcatggcttggtagctcatttctttttagcactaagtattccattgtctggatgtaccacagtttatccattcacctactgaaggacgtcttggatgcttctgggttttggcaattatgaataaaactgctagaaacttctgtgtgggctgggtgtggtggctcatgcctgtaaatcctaacactttgggaggctgaggtgggaggagcacttgarcccaggagttcatgaccagcctgggcaacatagtgagaccctgttgctacaagaaattaaaagattagctgggtatggtggcatgtgcttgtagtcccagctaccctggaggctgaggtgggaggattgcttgagcctgggaggctgcagtgagccatgattatgccgctgcacttcagcctgggcaacagggtgagaccctgtctcacamaaaaaaaaacaaaaacaaaacattcatgtgcaggtgtttatgtggacataagtgtttgagtaaatatcaaggaattgggtcatatggtaagagtakatttacttttgtaagaatctgccaaactgttttccaaagtggctgtaccattttgcattcccaccagcagtgaaggagagttcctgttgcttcacatccttgacatcacaactggtgttgtcagtgttttgtcttgtggccgttctaataggtgtgtagtggtatgttgttttaaattgtaattcccatgggacataagttgaacatataagttaaatatctgtttgtatgcctgcttgccatttgtttatcttccttggtgaggtgtcagttttggtcttttacttgtttttaagataggattgttcgttttcttattgttgagttttaagcattctttgtttactttggattaatacttctttatcagctgtatcttttgcaaatgttttcccctgggctatggcttgtcttcttactctcttgatagattttttattcaagcttaacccatatggaaaagtgcaaaattgaaaatatatgtatagcttgatgagttttctaagtgaatctattattggcttctcagtgtagtttgaatttgcatttctccacrggccatttctgtttctttctctgtgaacttttggttcacatctcttacccacttgtcatgcgaattactgaccttttttttttttccctaagaagtcaataaaaactggggatgttattcttttgtctgagatgaatactattttttgtctgatttttttcatcagttttttgactttgctgttggttttgctataacaagtaattcaaatttcctcaaatggatacatggactccttctcttacctcagctcaggacttagctagttttcactgtcttccaaaattcttcatgtttttttttgtttgtttgtttgtttgtttttctggagacacagtctccctctatagcccatgaaggaatacagtggcgtgatcacagctcactgtagcttcaactgcttgggctcgagtgattctccccactctgtctccccacagatgtgtgccaccacgcttggctaattttgtaaaaaattatttgtagagacgaggtctcactatgttgcccaggctggtctcaaactcctgggttcaagtgatcctcccaccttggcttctgcaagtgctgggattatagatgtgagctmcctcgcctggactatcttttaagatttacataaatagctcatattcctttaatgccttttgtatatgtttatcttagcatttagtcacaatctttatctcacctccttttccataggctgtaaactcattgagggctaggacgcttattttattctctctctctctccagtgcttggagcacaagaagtgtacaatacaactgtttaatataaatgattgcttctttgtttcgtggattttggtacctttgactttacattgctatctttgactttacattgacatttggtacctttggtacctttgactttacattgctatctttatagctgatgctattaatttgttattgttgaaccaaccaagcagtcttacttacctgtcttgtcatcctatcattttctgctacttcctttgaggattgttctggagagaacttgactttttctggagcctctgagataacagatcttttaaacatttacttcttcataattaagatttatgggaatgttttgatataaacaaatgatgcttctaagtattttttcttttttttttttggaacagtgtgtgtcatatcttgcttgccttttttgtttttgtatgtttctgtaaaatacttttttaaaagctatacaaaaaatgagatattagtgtaataaacttcatgtactggaagcttcaggagtaggtaagtacttaatacatcattagagttgtgcaggttcctagaggctatatagggctaacctccctctccaaaatgcaagatagtaatctagatacaatttgaatttctgtatagataggaatttcagcctctttggttcagtctgtttcattattgaacagctgcatttgtaaattgagctaaactatgcctctgaagaaaccctgattgatccagttttaaccactttcaacataagacttttagtttgttgaagacaatgattatagctttcttattaagctgaaagaaagttaattttaaatggtatcttttaaaaaacttgtgatactrgtaaaaaaacctgacaaacacatcttgaggactaagagaaacaaattcactttccttattgatttgtcaattgatggctactggtagtagggccagtattttaagggccaatattttaagttaatttctgttttaaaaattgaacatattttaactacatgtatcttttgatattaagttggcagtccacaaatggaaaccctgtcagtcatggtttactgcctttcagttctctactcaccatatctaatagatgctttatttatgagatctttaaaaaatttgttttccattcagaaattgctaattcagattatttccttaatttcctttttttatcttgagacacggtctggctctgtcacccaggctggctggagtgcagtggcatgatcttggcttactgcaacctccatctcccagattcaagcgagtctcctgtttcagcctcccgaatagctgggatcacaggcgtgcaccaccacacacccagctaatttttgtacttttagtagagatggggtttcaccgttttggccaggctggtcttgaactcctgacctaaagcgatccgccctccttggcctcccaaaatgctggtattatgggcgtgagccagcacaccgtgcctgtttccttaatttcagaatcacttcatggcagcatatacattgtaatatatgtgtcagttatgatcttattgttaaaatcaagcagcccaggttatttaaatgatttcttcttttttttttcacctggactcttttattagtaatagatttgaatagaaggtacattctgagagaatctttataaacccttaacttcttcccaaaatgttcaggtcacttgatattctgagttgattatgccctatgatatatttatctgtggtttaccacaatgagaattacgtttggaacrtatttgttgaatagttcaaaataactggttatatctagtgtgtgtttaagcatttctttagcttgtttgtataaaatgaagaatgtgttttgttcttattggaagttcaaaactagaatgcaatatctttttccttgatttctgtactagaatgcaatatttctcttcttgatttctgtagagcaggttgttgccctggatgcccaaaatattgtagctgtttcatgtggagaagctcatacgttagcgctaaatgacaaaggccaggtgtatgcttggggtctcgattctgatggacagcttggcctggtaggatcagaggaatgcatcagagtacccaggtaacaaaggtgaccagaaagaggtccttaacaatcttttaaaataaatttgttaatctaaattgttctgcttatctttgggcctgtaagagttgacatctcattatttctcccctttgagtcctttgataagagtttggttcttgcttatgatgttgattgagctattgattgatttgctatttttatatactctatattttctctataatcaatagaatttatgtctgtaaaaaaagcatagggaatacttgcttcattacaaatttttttagtgggttatactaatttaaactactactatcttgagtattcctgctattgaaatatttattaaatattggtttgttgaatgtttttcactaacttgtcctttttttagtctttattgtttctgttgaatatagaagtccaacatgcttactgtaaaaagaatttagtcactttccactttgtacatagcagtgagcccaatttaattaattcatcatataattatttcacaattaaaaaataagcagtgcctcatcaatgttttagtcttacacagttacatagggcataatcgttttttgtttgtttgtttttgagacagagtctcgcactgttgcctgggttggagtgcaatggtgtgatctcggctcactgcaacctccacctcctggtttcaagcgattcacctgcctcagcctcctgagtagctgggattacaggcgcccaccaccacagctggctaattttttgtatttttagtagagatgggggttcaccatgttggccaggctggtctcgaactcctgacctcaagatctgcccactttggcctcccaaagtactcatgattataggcgtgaagcactgtgcctggctaatcattgttttaatattaaaaactctaacagcatgaattacataggtaaaaatatacagatttcagtattcagtttatttcagatacataaataatacattaactcatacttagttttaaaatttacacaaattctgacctctttaaactcttttgttctttttcctagtaatagtaattcttatagaacaggattttaaatttaagatttttaaaaaactgtgtttaggatgaaaagagatttgcatgttagatcttctgagtcagtattctcaaaaccatgattcatggcaaaactttctagtttcctttatttttactctaccagtctgatgattctcatacttaaacttttgttgctgttcacttttaagggactttagtcagtaatacataggtaaataataaatggaaagaaagttaattataaggagagaattttattatgtataaaatttatatgagggttgtccaataataacaactatgaacctggatggggacctgaaagagaatttacttgagttctttggtttcaacatctttatttttgtatgtgctcaacatctgtattaactttaagctgtatrttaaggtatttctgcttttcatccttctcagtttttcaaaattttatggcttgatctgatttgttgtaacgtatacatagtttttactgatattaccagcttttaaagggccatttagtatttcagtggaaatgtttttttataaaaggaagagtgccaagagagttttggttttaatttcagtaccaaatcatttttcagatgtaaggctttttctaggtggcttagagatgtcagccagctttgtaaattttacatatagtatctataaacagatttctaaaaattggtgtttatagatttttgtttgtttgtttcttgagacaaagtctcactctgtcacccaggctggtgtgcagtggcatgctcacagctcactgcagcctcgacctcctgggctcaagccatcctcccaccacagcctccctagtaggtgcgactataggcgtgcaccactatgcttggccaattttgtattttttgtagagacagagtttcaccatgttgcccagctggtcttaaattcctggactcaagggattcaccggctttggcctcccaaagtgttgagattacaggcgtaagccactgtgtcctgcctagtgtttatagattttcgtaagagtaatcagaataggctgggcatagtggctcacgcctgtaatcccagcactttgggaggccgaggtgggtgaatcacaaggtcaggagttcaataccagcctggccaagaaggtgaaaccctgtcttttctaaaaatacaaaaaattagccaggcaggcgcctgtaatcccagctactcaggaggctgaggcagagaattgcttgaacctgggaggcggaggttgcagtgagccgagattgcaccactgcactccagcctaagcgacagagcgagactccatctcaaaaaataaaaaaaaagagtaatcagaaaagtgaagattcgcattaggttatacttttgtgacaacaaaacccatttttaatgccagtggatggataatattaaagaagaatgtgaaattaacaataggatataactgaaacagtttgataatgaattgtttcctacttctaattttgttttgttttgaagtcactactttgggaaagaccaagtattttaaatagtgtctgtagacctgcatttctggctagatgttaatatagaatatatattacaccattttatttaaaaaattgacccaaattttattatcgtagtttaatataagtggaaacacataactttgcacacagacttcagaaaaataattgttggcaataaagatgtagtttatcttttaaaagttctgcttcttggacatatacattaaaaaattatggcaagatagtataagattattatttttgtgagtacagcaatttctggactatacaaactaaacatatttgaattattagcttggtcaaaaatacaatttattttcttgttattcattttaagatatattacaattcctgcctaattttagcatctgaaaatttggaacattatagattaaaaagaaaaattaaagagtagtttttaatggtatagagtaggtcagtttttagtctaaatttttcatttttttaaaaatctactcccctattctgagayaaatttttcaaaattgaaatgagttggtgttaagatttttcttaaattactaggaaagttgtggcttaactggaaaatagaaaattggtaattgtgtttaattgcaaaatatttaatactttagctcctcaaatgtttaattacataatataaactttttactaaacattagtggttggaattttgtcttcagaaacataactaacaatgcctgatttctgcctatattgccgctacacattaagttgggaaaacagaagaatacaacagtatacatattccataattratatgctttagcagagtcccaaaggaagggtatataaatcttatctccaatgtgtgtgtgtgtatatatttttttaatttacaaaatttattctggcttctttttctttttttctttttctttcttttttttttttttgagacggaatttcactctgtcacccaggctggagtgcagtggcgcaatcttggctcactgcaacttccgcctcctgggttcaagccattctcctgcctcagcctcccaagtagctgggactacaggcgcctgtcaccatgcctagctaatttttgtatttttagtagagacggggtttcaccattttggccaggctggtcttgaactccttaccttatgatctgctcgccttggcctcccaaaatgctgggattgcaggcttgagccaccacgcccagcctttcttttgcttttctgttcagtgtatttgaatattcaaaaattagaaatgattaaacacattatcttttttatgtgacaaaggggattacttttgatgagttctaacaaatttatttaattattttctaatttatctctttagaaaaaatggaacatgggaagccttgttttaccattcacagtattttttaatttctaaaagctaaaacaaagaaaacaaagccaatatcccccattctttagggtattaatacatttatatgaagatgaaaggggatagttttttctttaacacagtaatgacgcagaagaatatacttctggtctctgtagcatataatggtaaaagatattagcatttaatgtgtgttacaagccttaggttagtattttggaaaggagagtaactgagtataaattgctatgcaaatttagaaaatttttggcaaattttatgactaatactaaagcctccaagaccttacaaatgtagttatcctttaacagtatattcattacgtactattaattaggcactatagtaggtgccaggcattatcatgggtataaaacacatagtctgccttcacagaacttactgtttagcagaggagacaaatattaaatgaataggtacctgtggttagtagcgataaatgctctgaaggaaaaaacatacagtactgtgagaatgtagtattttgaaatgtttcatttgcaaaattgtacttgatactcagaatagtgtttttttttcctaaaatacttaatatgctgaacaggtcaatgtatcatctgcctagtatgcataaacaataacagtaaatgtttagtaatttgagcacagttgggtatgttcatgtattttttattccttactctgtttgcattgccagtgtttgattttgctatttcaaagaaatggcattttgttgagtttgaaaatttgaaggtgcattggatcctgctaatttgttggattctgctaaattgtagcagtacagctctcaggttttgtagttaagagcataacttcactaaataaaaatatttttaatacaataatatggaatcagagtaactctcctttttcctgctcaaactttgatttgctgaagctgcttcccgaaaatcatgtgtgtcgactctctggtcagaatttgctccggactctcttatggcagaatcaggtcaggtgacagtatcaggtaaagggaaataagaaacatattgtgtacctccccatcccccgttttttcttttctttctttctttttttttttttttttttgagacagggtcttactctatcgcccattctggagtgcgatggtgtgatcttggctcactgcagcctctgcctcccaggtccaagtcattttcctgcctcagcttcccgagtagctgggactacagcgtgccaccacacctgctaattttttttttttttttkkgtattttcagtagagacagtgtttcaccaggttggccagtctggtctcaaactcctgactgacctcaagtgatccgcctaccttggtctccaaaagtgctgggattacagtaacccacctgtaatccgcatctggcatcccccctttttttcttgaaaacattcattcaggaaaaacagtaacatgaccaggcaaagggaaagaaccaatggagatgctgggatggttgatgtacatacaaagttaattgagttttgtaatgttttaaaaatgagcctttaaagttgcgttgtggtaaaacaaaactcaggaaaggggggaaggaaattacgaaagtataaggacaaaatacaagacagaagaaaataagacttaacatattagtaatgattgttataactgtgaattgagtaaatttcctgagtaaaaaaattgaatgtccctgatttagacgtaaagcaaaaggatagcttgtaaggaataggtttcataatttgagagttggtagaacatacaagaatccctgttggttcttaagaaacccgataaaggagaacgtgcattaaactaggcaaaacaccaattttagacaaattagataatgtacatttgctttccagatgtattgccaagtttctaactgtaagctgatgatttaaaaacacgtttttataatgaaagaaaatatctgaattataagagcactctgaggagtacttgaggtatgagtatagctcactttgcttaaatactgtctttccaagatgtgttcttttcacccctttaatttttttttttttgtatctagctcttgtttactgattttagcataaatttttggtacgctaaaattgagcttgtatgaaaaaaaataatatgacctatgtgcatatagtaggccatcaataaataacataaatagcattcaagatcaatttgttaaatggaattaactggtcttgatctgtcttcttcttttctagaaatattaaaagtttgtcagatatccagattgtacaggttgcttgtggttactatcattcacttgcactttctaaaggtaagcattagtttttattttatttctcttcagttttattacttgatacttttttgattgtgcatatagttctccagctttgctcatctttctgcaagattgccctggttcttgatccttttcatttccatataacttttagaattagcttgtcagtctgtacacacacatacacacacaaacacacacacacactgctaggaatttgggattttgttgtctctataaatcaattcaaggaaaatctttacagtattgaacctttcaattctagaacacggtatatttgtccatttaagtctccctttaattttttccattagcattttgttttccctggacaggtcttatacaccttcgattagactttcccctaggtatttgattttttgttgttgtgaatggtgtcattttttgtttattatatagacatgaaattgatttttgtgtctgtttattaaacagttaaaaactcttcatagctgcaactggggaagattgcttccccaatctcatttaatctcatagatgaactttctatgcatagaaataaagaargctaaacatcatatttattagctttgtttgcattcctctcttaccagtttaacttactagtatcctagctaaggattggaacatgggctagtaaagaatctgccatatgtatgttttttaccattaaaataaataggtttgctgggcgcagtggctcacgcctgtaatcccagcactttgggaggccgagatgggcagatcacctgagttcaggagttcaagaccagcctggccaacatggtaaaaccctgtgcctactaaaaatacaaaaaattagctgggtgtggtggcacacacctgtagtcccagctactcgggaggctgaggcaggagaatcgcttgaacccgggaggcggaagttgcagtgagccaagatcacggcactatagtccagcctgggcgacagagcgagactctgtctcaaaaaaaaaaaaaaaaaaaaagaagaaataggttccatttgctccattgttactatttagtgttactatttagtgaagcctactacaaataaagcactaggaaccatggggaagcacagataaattaagagacaggtttagggatcatacaatctagtgaaagagacagacatccaagtaaataactgtagtctgaggcagaaaaaaatatgtactatttcagacaaggtaaaagtaaaatgctgtgacaatgatataattgtttctaattgatataattggtaataataaggaggggattagtatttgatgcaagtctttaaagatttattaaagattaatttttttattaataattggagaaatgttgagaagaacaaggagaaatgttgagtggctaagggggttgtgctggtgtaaaggcatagagttaagaaagtggtgtatttgaatattggcatgtagttttatgtgggtgttgtgagggagtgggagacatactcatacttcagtttaggctgaaataaaaagagaartctgttataaagggccttaaatgtcatattaaggaatttggacttctataggcagttaggaacatggaatctctgtgtattctttgttgttttgccaactcctcttttgatattttggtaggtggatctaacataaatttaaactcaaaggttttactgaggacagtttttcatattgacctttttgtttgtttgtttactcagctttgtggtgtaggcaatatcttattcatttgctaaactttttttttttttttttgagatggagtctccctttgtcacccaggctggagtgcagtggcatgatctcggctcactgcaagctccgcctcctgggttcacgccattctcttgcctcagcctccctagtagctgggactacaggcgcctgccaccaggcctggctaattttttgcgtttttttttagtagaggtggagtttcactgtgttagccaggatggtctcgatctcctgacctggtgatcctcccgcctcagcctcccaaagtgctgggattacaggcgtgagccactgtgcccagccgctaaacattttttagagcccttagtatgaactaggcatactacagtatacagtaataagcagtatactacttactagccttcgtgatatagtcattcaataatgatataattacatactatgataagggctataaagaaaaacttcagggtatttagaacataggacagcggtactagacctaatctgggagatcagggaaggaaggctcctgctgggagagagttgaaatgaactggacaaagatgagggaaaggtttaggtagagagaacagcaagtgtgtgagaactggccattggagaatataaaggaaggcaatacggctagagtatagtgagtgactgatatgagaagagattggaaacataggtagatcatacagcaccttataggccttgtttaaagtgtttatcccaagagcagtgagaaagcactgaaatatattttttggggtgagcaatattatcaaatctgcatttttacaatatctctatgcatgtatacaaatgtctatttatatgtgcatagaacatttcttgaaggacttaccagtaattggtaagagcgattgtcccaggctgggtgtggtaactcacacctgtaatcttagcactttgggaggccgaggtgggcagatcactaggtcaggagttcgagaccagcctcgccaccatggtgaaaccctgcctctactaaaaatattttttaaaaattagccaggcatggtggcacgcgcctgtaatcccagctactcagaaggctgaggcaggagaatcacttgaacccgggagatggaggttgcaatgagtgaagattgcgccactgcactccaacctgggcgacagagcaagactgtctcaaaaaaaaaaaaaaaagagtggttgtctcttgaaagaggaaccaggattctgatttttttggaaggaagcttacttttaagtgtgtactattttgttgtttcaacttaaaaaaatcagttattagtgtatcagttatttagtgcagttgttagtttaataaaaggatgtctaaagttgcaaaatacgatggcaatatgggagcaaaagtgacaggcagggaaaactattataggaatcagttaagatggtgaggaatggatctatttgccgtatttttctttaggaagaaaactggatgtaaatttggtgatatatgatagactggatatgtgtgaggttaaaaaaaaaaagagagaggagtattaaggaagactccctaggtttataatttttgctactgagtcacttaggatgttacttaccaaaatggggagcactggaaagaggtccagggaagtaggatgggggtcatgaattsagtctggggcatcctaagttagaagttcctttgaaatttccaagtatagtgtcaggtaaacaatgggttatgtgggttttttgctcaggagaggtttgggctagtgttaaaattttgaatgtgatcagcagatagttattaaagtttgagcttgaatgagtgcctcttgggagaaactataaaataaaaatgagacttgaatattaaaaggagactgttgaggggcataaggaaatgagattaytccttgttatgtgattcaccggttcatctgtgtagtcaatcaaacttaaagtgtactaatactgaatgttcttctaggtagtagtatatgttcatataagaaataagtataattgctaaaaataatatttatattcttttgatgataggcagaatgtcccaaaataatattctttatatgaaatttgaaatgaaatgattattttcaaattaaattttttgcatgtgagaaaaatggttaatttttccattactgttttacagcaagtgaagtcttctgttggggacagaataaatatggccaattgggtttaggtactgactgtaaaaagcaaacttcaccgcagctgcttaagtctttgcttggaatccctttcatgcaagttgcmgcaggaggagcccatagttttgtactcaccctttctggagctatctttggatggggacgcaacaagtttggtcagctaggtcttaatgatgaaaatggtaggttctcattatgtatagtttaagtgtactttttgaaagagatggtcttttgagttagatcagtgattcttagtrtaagagagaaatgtatcttccctggtatagaggtggggatgagatgttatttaaaaattccatttggggaatgcagtgggaagatacaaaatatcctttattcattaaagaactataaaaagtatatctggacaaaatgtttagtattggatgtttattaaaagacaattgaaaaacattacttcaaattgttaatccattattggccactgttagtggaaaaaagctgtaaaattattctggggaagtaacatgaagtgttaatctttgagtttttcaaggaaatatttaaatgatttgggctgttaaattaatctttggttgggcttcacttttaacattgatgctaaagtcttaaacattttgaatttgaaaaaattgtaactgaaacaagttgggatcttggaacttatttttcatgattacattgagttgaatgccagtatttgacttacaaaagctaatttcttatagttcagtataattgtaatgactgaaatggacaaaagtgagttattaatctagtaacaactagtaatgataagcaaacaatactttcagaaagaattaaagaataccttgttttgcataagaaaaatatgtcatattaggatatcatgtatcttttctgctacaaaacagcctaaagtacatttttttttccaggcttttaagtaggctcctgtgggtrtaactatcatgaagtgaatataaagaatgatgtatgtgtggaaaattagaagcagttagataattttgaaatttcttgatttctgagtcctttgcatactggcatattggctgtttagcacttaactcttaagtccctcctttatcacaatagtatggataggcctgggaacctgacttagtaagcttgtactacaaaatcatcgaatcatagttaaaattatttagtcacractatctactgagcttggcaagctgtagaggaaacacatctagatgagttttgatttttaaaatactattaacatctcttgttggaattttcagataggtatgttcctaatttactaaagtcactaagatctcagaaaatagtttatatttgttgtggagaagatcatactgctgctctaaccaaggtattgtacttctaaaacttctwtattattactcatcatagttctttcataattaatgaatgttctcatggtattttctcaagttttaacttgagtgttattggtatttcaaaaataatttatctgggaaaaaagacttagattattcttgaaaaaaatttaccttatttttcaatgttgttttatgttattaaatgtgaattctgatatactattatatgtgatgatagtatattgctgaatttctcagctttatatgaaatactgcttaaggtcatactttgaataaaattattccgttttagttcattaagcttgccatgatatatgcatcaaacccatttatatcgtgtagctcagcctaatttgaatgtagtttccatttggcttataaatacttcatacaagcaatagaggagatgaatttctctgttattcataggccaagtattgtgcaagcagttacagtgatcacagtcttatcaatggctttaactctgacctctcactgtcttgggtatgtgccaattgagtatcagtactgtttagttcttgagtgactagaagttagatgaaaatgaaagcattcagttaacstttaccagataattatttattgcagtcatgttaatgtaaagtttttcattggtcaaattagaaactggttaaatttctttatcttttttggtcttacatagtatataaaattggtaaaaagacattaacgtccgggcacagaggctcatgcctgtaatcccagcactttgggaggctgaggcaggtggatcacctgtggtcaggacttcaagaccagcctggccaacttggtgaaactctgtctcttctaaaaatacgaaagttagctgggcatggcggcaggcacctatccccagctactccggaggctgaggcaggagaatcagttgaacccaggaggcggagtttgcagtgagttgagatcacaccactgcactgcagcctgggagacaaagagtgagacctcgtttcaaaaaaaaagaggcattaacttctaatcaggctttaaaattctacattatatttctacttgggaattttagcaggacaataattattcttcgttattgtcaaatatagtgaactcaaggcacttttaaaaatataatgaccaattatgaaagttaattttaaagtattttgtagtacttgccttttagtaaggaaggattattatacctgccaatcttattattaggttggcgcaaaagtaatttcatttttttgccattaatggtaaaaactgcaattaattttgcaccaacctaatatcatattttattgattttggcattcagataacaaatgtaatcactgaagtcttatttattcctgttggcragtcttaaattttactcgtcctttttcgttattggtatttggaagaaatttatcaaaatataaaaaatatcatgtgtggtgtcattccaaaaactaattttatggcagaaagactaacaatgttaatgcttttcaaattcagcctttcagataaccattcatcctaatgttctaggataagtaactttttatgtctatttagttttaagaaatgctaattstcttaatcttttgtattcttctctcagaagatagtagctagtgatatttgtttattggaattttgggtgtacattawttttaacaaaattagatagttgttaatatccccaaagtaaaatattttattttccctttatttaagttaaaatacctgttccatatccatatgtcttgcttttctggaagaatttcttggaaatagtaaatagattaagattgctttatgaagcagttttctgtacaaaacctaccttaggaaaactgcattaggaaagattttaaaaccaacttttaaaaacagaataaatggaaagacataccatgtttatagatatgaggatacttccataaagatgtcacatttttttcaagtttatttgcagatgtattctgtaaatcacatacaaatacacattttgatgtagcagtcccacttttaggaatctaccccaaagatttgaaattgtgtgtgcacaagaccatttactgtgaccttttaatggcaaaagactagaagaaatccaaatgtccatgagttaaataaattgtggtacatccctgtaatgaagtacagtgaagtgtaaaacagaatgaggtatttatgctgtggaatgatttctaggatatattgctaagtgaaaagagcaaggtgtatggaacagctttctgtaagaaagggaccaaaatatgaacatatatcatatgccatgtatatttgtttgtttttgtttttgtttttggacacggtctcactctgtcacccaggctggagtacagtggtgtgatcttggctcactgcaacctctgcctcccaggttcaagtgattctcatgcctcagcctcccaagtagctgggattataggcatgcacgatcacacccggctattttttgtatttttttgtagagatggggtttcaccctgttggccagggtggtcttgaactcctgacctcaagtgatctgcccgcctctgcctcccagaatgctgggattacaggtgtgtaatcctgcacccggccttatatgtttttaaaaatacagtaaatttaaaattaatagccagaacaaatgtgccttgccttacaatttttgactttggaatctagaaactgttacatgtgattaaaaagcaaaattatggctgggcacagtggctcacacctgtaatcccagtgctttgggaggccaaggcaggcagatcacgaggtcaggagttcgagaccatcctggccaacgtggtgaaactctgtctctactaaaaatacaaaaaattagccgggcgtggtggcaggcgcctgtaatcccaggtagtcgggaggctgaggcaggagaatcgcttgaacctgggaggtggaggttgcagtgagctgaggctgtgccactgtactccagcctggtcgacagcgagactctgtctcaaaaaaaaaaaacaaagtgttatatatatatgtaaaaattatatgtaaattatataaataaaaatatatataatatataaaaattatataaatattygtccttaaaaattgaaaactaacaagttagtggcacaactacaccagaaataattattttaggtgattttaaaatacagcattttgctgtatatcactagggggaaatacactaaggataaactaaatccacaaagaaatcttaaattgcattctttttcttttttttttgagatggagtcttgttctgtcacccagtctggagtacagtggtgcgatctcggcccactgtaacgtccacctcttgggttcaagtgattctcctgcctcagcctcctgagtacctgggactacaggcatgcatcaccacacctggctaattttctgtatttttagtagagatggggtttcaccatgttagccaggctggtcttgaactcctgacctcaagaaatccatctgccttggcctcccaaaatgctaggattataggcgtgagccactgcgcctggcccttaaactgcattctgtaacttttttttttctgagatgggggtctcactcttgctcaagttggagtgcagtggcacagtcatagtgcactgaagctatgaccgaattcttgggcttaagcagtcctcccacctcagtctcctgagtagctggagctacggkcgccactgtgcctggctaatttttttattttttattttttgtagagatggtgtctcgctttattgcctaggctggtctggtactcctggttttaagcgagcctcccacctcagccccccaaaatgctggaattacaagtgtgcattctgtagtcttactgctagaagtaaatttgctaatagcaaataaattccaatatattacatataaataggagaaagcaaagaagtagttattttactgtattataaactatgattttcagcttaagagaaaagagatagatctaaaactataggaattaaaaccttgtgatctttactttgaatcgcaagtgttagtatgaactcatttatttttctccaagaatatgctttttgttttgtttttgtttttgttttgccataacgagtgaaaggtcctagaagtgatgaaccatgtataatctggacacaatgataatcccttgattgttgtagattctccactaaaaggaaccagggcttcttagagaagagtctgatcccatgtctagggcaaaaaatatgtataagaatacctttgggcattttgtgttacaaaaaagcaaagattactacggtsctctcagaagaacaacttgaaggagctttcactggatatcgagaagaaataatgactgcaaaaaatggaaaacatcagatctataaaaaaatccatgaatttttgtagtgatcttctcttcttgcaaatcaatatragcaaaacttattgcttacctttggaagttgctaggacaacactcatttttttttttttaactggtcaataatgggaaagaatcaagtattctgcctttcatttgcaaattgtattttaggtaatttaatagttaatgagttaagttatttatagaagaattccagctcataackctaggaaaaataatgcaactagaaaaatcaccattttacactccctgatgaaataatggatctaggcaaagaccattaaacctaatggggatgtatcaggctgacacactttgacttatttttattatatatatatatatawaattaaaaatataataaatatatatataataaaaatatgtgatatatatatataatttttttctttttgagatggagtctcactgtgttgcccaggctggagtgcagtggtgtgatcttggctcacttcaggcttccatctcctggattcaagtgattctcctgcctcagcctcccgagtagctgggattacaggcacacaccactacgcccagctaatttttgtatttttagtagagacgaagtgtcagcatgttggccaggatggccttgatctcctgtcctcaaatgatccacccgcctcagcctcccaaagtgctgggattataggcgtgagccaccgtgccccacccgacttagttatttttaacttcactaacaaagcagacatatgctttgtgacatgatgcaataaaataatcaggaagatttaaacatggcctagttattagctgatattaagaaattagtattgattttgtgaacgtggtatagtatggtggttatatacttttgtcggttacagatatatgctgttgaagatacacatttgtgggtgaaatgatttgatgaccacaatttgctttaaagtactcaagttctttttgttttgtttgaaaatacccccaaaagggaaagggagacaccagtgaaacaaaataaccaaccttttgccagttattgaaactgagtgatggttatatggtgatttactatattttctctttaccttgtgtatttgcttgaaattttctgtgataaaaaaagaaaaatgaatgttctcatataacagtatgtagtaacgctattaaatgatgaaagcaggatataaagttgcatatatagctacagttatgaagaaaagcagttgaactgaagaatactaattgtgattgtgttatcacagattttttccaatacagaacttctaatttagttataatttagttatttaattagttatatattatatgtttttttgtttgtttgttttgtgacagagtctcgctttgttgcccaggttggagtgcagtggtatgatctcggcccatggcaagctgtgcctcctgggttcaagcgattctgcctcagcgtccaaagtagatggaactacaggcacccactaccatgcctaactaattttttttttttgagacggagtctttctgtcgcccaggctggagtgcagtggcgtgatctcggctcactgcaacctctgcctcccgggttcaggcaattctcctgcctcagcctcccaagtagctgggactccaggtctgtgccaccatgcctggctatttttttgcatttttagtagtgacagggtttcacctttttagccaggatggtctcgatctcctgacctcgtgatccacctgcctcggcctcccaaagtgctgggattacaggcgtgagccaccacatctggccctaatttttgtgttttaagtagagacagagtttcaccatgttggccaggctagtctcaaactcttgagctcaagtgatccacctgcttcagttatatgtttttatagggagttttttttaaaaacatctgtatattatagcagctgtatgctaaaaatttctataaggccatgcatggtggctcatgcctgtaatcccagcacttcgggaagccaaggcaagaggattgcttgagcccaggagttcgagaccagcctgggcaatacaggaaaaccccatctctacaaaaaagtaaaaaattagccagatgtggtggtgcatgcctgcactcccagctacttaggaggctgaggtgggaggatcacctgagcccacgaggttgaggctgcagtgagccatgatcatgccacggcactcaagcctgggtgatagagcaagaccctgtctgaaaaaattaataagtaaataaaaattgctctatttatgcactctggttacatgtactctttttgcagcgcatttatgtaaggcagtaactaccttgaaaagtgaagatgataccgtttttaggtttcgtgaaattatatatatgtatgtggaattcagcaagacagtataatgataatgaaaggcaatgcaaataaataattatttgtatctcttcagtgtctaaatattttataacggtgaaaacatcattacctggaattctcatagttttatgacattttactttgaaagagccatctgtctgttaaattgtgaagacagttcttagaagagaaaaaactgagtttatattaaagatttggacttatttttctggagatcagttattttcttttatcatgccttctaatgataaggggttttgtctttttttaggaaggtggagtgtttacttttggagctggagggtatggtcagttgggccataattctaccagtcatgaaataaacccaaggaaagtttttgaacttatgggaagcattgtcactgagattgcttgtggacggtaaggtgttatgtaaaagagcattttggtctctaaactgcagttgtttagggattgcttattgaattgtttcagagatcctaataatctgaggaaacacattctgcccccaaatacctattttgccactgaggagtcatagtaacaggagaaacatcttttttactgttattttatttatttttacttgaacagatttagctgaggcaagatgttaatagtgtatatgtaatattatatttattgtagttgatatcacactcgaaaggcttctttctttctcttttccacctttttttcttttcttttctttcctttttggggtgatagagtcttgctctgtcacccagtctggagtaccacaattatggcttattgcagcctcaatctcctgggctcaagtgatcctcttgcctcaggcttttgagtagctgggactgcaggcatgcactaccatgcccagctaattttatttttttaatttttagtagcaacaaggtctcattatgttgcccaggcttaccttttttccttaaagggtgaagagatcgaccagttaattaagacagaattaatgtgatgaaagtttgattggcataattaaaccaataatctcctaattctccttattctgagttcttgggagtaaacagaagagtctttgacattgagcttcatctgttgattcttaggtcttgggaataaatagaagagtctttgagttgagcttcatctttgggggaattaaattgagcagactcccaagtagcaaaatgtaccttttttgaccacataacttaattttgatcaccttgcttaatgtttttctaccttgtatgtatagctatacaatagtttagttttatcaactattagcttcaaatgcatgtaatcacactgtaagtattctttggtgattctttttttcctcttaacatcagacttttatgatttttatgtagttatggttctccatcattaggcctcattaatgttttttattcaattttatacatatataatatactcattctattgctgatggacatttgcatgttgccagttttggcaattatgaataatgttgctttgcacttttattatatggtatatgttaaccttcatatatacccagaatggaattactgggttatagaggacacttaatttgaattttgtaggttaaaccatatttcccatgtggttttaccagtttgtattcccattagcagtgtatgagaattcctgatgctcttgtacttatcaccagttagtattgtcagactttttgctaatttcttggatatttattgttatttcataatttgaatatacatttccatgacttacttgagtaccttttcatatgtttattggccacttacatttcctcaggatataaaaattgattcatagtagttatttatatagtgtagatacaagttcataatgtttctcaatacagggataaaagttctttattgggcatatgttttacagatgtctttccatgttttgccttaccttgtcattttcattctgttgtctttcaatgaacagaagttttagatattaatgtagatgaatttattaatattttacttaatagtgccatttattttctaagaaatattttcctacctgaaggcataaaagtaatcatctctgttatcttcaaaaacatagtgttgccttttacatggaggtctgtaagttatctgaagttgatttattttgtggaggacagtataatgttcaagtaaggaatcaactttttaaaaatataaatagtcaattaycctagcaccattaaaagtttttgtgggaaatacatacaacaaaatttaccaccttaactatttttaagtatacagtccatggtattaagtacattaatattgttgtgaaaccatcatcaccattcatctctagaattctttttatcttgcaaaactgaagctctatacccattaaacaatgactccctattctccatactctcttgtggcaaccaccattctacttcctgtctctgtgaatttaactcctgtaggtatctcatataggtagactcttacagtgtttgtcttttggtgactgacttatctcactcagcgtagtgtcatcaaggttcacccatgttgtagaatttccttctatatatgtcagaatttcctccctttaaaaggctgaacagcattccattgtgtgtatatgctaattttgcttgtgcattcatcttttgatggacacttgggttacttttgtgttttatcttattgtgaatattgttgctatgaacatgaatataaaaacatcccttcaggaccccactttcagttcttttgggcatatacccagaagtggaattggtggttcatatggcaattctgtttttaatttttgtaggaactgccatactgtttctcatagtaactgccctgttttatatttccaccaaaagtgtacagggtttcagtttctctacatcctcaccaacactgttattttctcattttgcctttttctttttttttttataatacctattttaatacgtgtaacatgttatctcctgtggttttgatttgcattttcccaatgattagtgagctgagcatatttttatatacttgttgaccatttgtacatctttaggagaaatgtcaattaaagtgtttttcccatttttgaatctggctgttttgttgttgttgagttttcagagttctctatatattctagatactaatcccttatcagatatttgcagatattttctttcattctgtgggttgtattctatagatagtgtcttttgatgcatgaagctttaaaattgtataaagtccagtttgtttattttttcttttgttggctatgcatttggtgtcatatctaagaaatcattgccaaatccaatgtcatgaagcatttccctgtttgcttcttagagttttatagttttaccttttacatttaggtctttgatctatttgaattttatttatttatttatttatttatttatttatttatttwttttgagatggagttttgctcttgttgctcaggctggaatgcaatggcatgatcttggctcactgcaacctctgcctcccgggaccaagcgattctcctgcctcagtttcccaagtgactgggattacaggcatgcgccaccttgcccgactaattttgtgtttttagtagagatggggtttctccatgttggtcaggctggtctcgaactcccgacctcagttgatccgcccacctcggcctcccaaagtgttgggattacaggcgtgagcccccacacctggccgagtctgtacattcttttgggtagcattgacatcttaacaatttgtcttccagtccatgaccatgctgtttctttccatttatttgtctctaatgtctttccaccagtattttttagttttattttacaaatcttttgccttcttgttaattcctaagaattttattctttatgataggttttaaataaaattttatttccttccaaattgttcattgttaatgtatagaaattcagctaatttttgtgtgtagattttgtatcctcctgctttgcaaagtttattagttttaacaatttttgtgtggaatctttagtgtgttctacatatatgatcatatcatctgcatacagagattttttttttctttccaatttgaatgaatgccttttatttatttatttatttgaggtggagttttgctcttgttgcccaggctggagtgcaatggcgtgatctcggctcaccgcaacctctgcctcctgggttcaggcgattctcctgcctcagcctcccaagtagctgggattacaggcatgtgccaccacacccgactaattttgtatttttagtagagatggggtttctacatgttggtcaggctggtcttgaactcctgaccactggtgatctgcccaccttggcctcccaaagtgctgggattacaggcatgagccactgcacgcagcattttatttcttattcttgcaaaattgctctggctagaacttccaagattatgttgaatagaagtggtgaaagcaggcatccttattcctgatcttacaggaaaagcaagtgctttttctgcatcaattcagatgattgtgtgtgtcttttcctccttcaatctgttaatttgatatattacattgattacatatattaattttcatatgttgaaccaggtttgcattctaggaataactctcacttggtcgtggtcatagtatgtaacccttttagtgtgctgctgaattcagttcttaagtattttattgagaatcctttgtgtatgacaacctgcttctttcatgctgctttcaagattctttgtctttcagcattttgattgaactgtgtgtctctggtctctgagtttatcctgcgtagaattcattggrgcttatggatgtttagattcatgtctttccccatatttgggagttttkggctattacttcttcaaatagtctctctcttgctctattcttctgagaattctacagtgcttatgttggtctgcttaatggtatcctatggttcccctaggctctctgcactttttttaagattttctgttccacagactcaataattgcaactgtcctatctttacgtttgctgatttttcttctgcttgctgaaatctgccttcaaatctctctagtgtattttttatttcaggtattgtactttccaactccaaactttttttttttttttttgagacggagtctcgctctgtcgcccaggctggagtgcagtggcgcgatctcrgctcattgcaagctccgcctcccrggttcacgccattctcctgcctcagcctcccaagtagctgggactacaggcgcccgccactacgcccggctaattttttgtatttttagtagagacggggtttcaccgtttttttagccggggtggtctcgatctcctgacctcgtgatctgcccgcctcggcctcccaaagtgctgggattacaggcgtgagccaccgcgcccggcccaaactttttttttagtttttctttttgattgatatttccgttttgttcatacattttttttttctttttacacgtcttactctagttctttgagcatctttaggatgtttgatttagtctttgtcttttaggtctgccatttgacctttctcagggatagtttctattgttggcttatattttctttgaatgggccaccctttcctactactttgtatgtcttgtgatgttttttgaaaactggacatttaataatatggtaactggaaatcagattctccccctttgccagagtttgctgatttttggtttttgatcattgtaggttttatctgtgtcaggagtcaccctgaggtataaaaatgaggtcttttcttagcctatacctttccctgctaatgcacagtgacattctaaattcacccataaatgtggttgctttttaatgttgtagaccttaaatgcctggctccccaaagaaacaaggaaaaaatgaaaggtgggggtggaaggagagtagaagaaaaaaagagaaaggcatcagccctttgaattccttggaagtctctttagccagaatgggagagtatacaacagtgattgcctgcctttctgcaccttggtgatcagaagcaccaatcattgatcagggcaccagttcctaaaacagacaaagtcgttattgcccaccctggcttctacaagttgcatacaggctgctcctggaagctgttcatggctgcattacacaggagtaaggagtgggtaactgctaccatgctaagatccgaagttgaaattaaccagaatttgccatccaactcttctcttggaaataacaaaccgtgcatagactccagagttgcagaatggttctctcagacagattctgtcagtgtaattgttgtctaggtgggaaacagattctcggtgcttcttattccacgattttccaagaatccccctgtctagctccatttttgaaaattcttcaccctcctactgtatggtgtcactgttgccataagctgttgtatgtacatggatctctttctgtgatctctaatttttcaatctatatgcctgcccctgtgccactaaacactatatagacaccataataacttcttctatttggggtaaagtgactccttgttattcttctgttctttaagaatgctttggctggaccgggcgcagtggctcacgcctgtaatctcagcactttgggaggccgaggcgggtggatcacctgaggtcgggagtttgagaccagcctgaccaacatggtgaaaccctgtctctactaaaaatacaaaattagtcgggcgtggtggcacatgcctgtaatcccagctacttgggaggctgaggcaggagaattgcttgaacccaggaggcggaggttgcagtgagccgagatcgcaccattgcactccagcctgggcaacaagagtgaaactccatctcaaaaaaaaaaaaaaaaaaaagaaagaatgctttggctgatgatgacctttattactttcatataaattttagcataggttgtgaagttctctcaaaaaaaaaaaaaaaaaaaagccttgtggggttttgattggtagtgcattgaatctctaggttaatttggggaaaagttgttatctttgtaatattaacttttctaataatcaacatccagacttctttaatgtcttataataaaatgttttaaaattttcatcatagaggtcatgcatatctcttcgtagttccattcctaggtgcgtctttaatggtattatatttttatttccactttctgaggaatcactggcatgtagaaatagttgatatttacatattgattttaaatacaaccaccttgctaaactcttattaataacttactcatgtacgtagtcataccatctgtgagtcaattcagttttgttatttctattatttatacttaacgtgtttatataattgttttaatgtgctgtttaggacaccattataatgtttactgtaacataatgtttcctttctgtgggaaaactttcagtatttcatagttaagtatcatgtttgctgttaagatttttatagataacctctatcagactaagtaatttccctttaattcctagttttttttattgtgaatggrtgttaagtttttaatgttgttttttctgtatttattgaaatgatttatgatttttttttcctttaatctgttaacatggcatattgatggattttttttttctagttaacagctttgtgtttctggaataacttcagtttggtcaagtattatcctttttgtttggtgctgggtttgatttgtgaatattctgttgactcttacttatatttctgtttatcagtgaacttgatctataatttttttcttattattcttttcaccaggttttattatgaaggttttctagtctgataaaataacattgaggaatgtacctttgttttctaatttttggaaatagaacagcttgaaatgttggcacaacttgtcattaaaaccatttgtgcctggcattttattttttggaatttaaaaaacattcttcaatttctttagtggctatgagatagcttttattatttcttgagtcagttatgtgaatgttaatttttttctaataattttttcattttgcctaattttagacttattgacataggccgggcgtggtggctcatgcctgtaatcccagcactttgggaggccgaggcagactgatcacctgaggtcaggggttcatgaccagcctggccaacatggcaaaaaaacccatctctactaaaaatacaaaaattagctaggtgtggtggcatgcacctgtaatcccagcttctggggaggctgatgagacaggagaatcacttgatcccaggaggcagaggttgcagtgagctgagattgcaccactgcactccagcctgggcaacagagcgaaaactctgtctcaaaaaaataaataaataaacttatttacataaaatttataatgtctgtattggtctcttgtgcacaaacaacatgtcagtgacatataatagtaaatgtttatttgtttctctgtggttcagtaaagccaggcctttggctatctggagcagcttttatttaggctagagattgactggggcagttctgtttcaggctgcctattcactggggtgactttgctcaggctgtgtttcagctagggtggctttgttacatatctcgttcttgggactataccagaggagcagtgggctgcctctgggtattcttctgatggagacaaatacacaagaaggcaaactcaactgtacattccatttcaagccttctgcttgcatcacattcactgaaatctcgttgaccaaaagcaaactatatggccaaacctaaagttaaggtatggggaatataatatacagcccaaccaccatcaggctatgatgggaatatgcatgcttaatactacagggtggtgaatttaaatcattttgggtgacatactctattagtcctttgtgaagtatcacaaatgatttaatgttatccagttttgtaattcttagtagccaaaatgtacatgatttgaatggttattcttagctctgtaatacatgatttgaatagttattcttagctctgtaaaccagttcttttcagcagttttattcatgtaactgttggatcgggggtaaaatttcgactattgagtgagatctaaggacttaacctaaacaggaagtgtaagtaggtatctggtattttgatcagtttgacttccaggtagtcagtactataagacatcttattgggccgggtgcagtggctcaagcctgtaatcccagcactttgggaggccagggcgggcagatcacaaggtcaagagatcaagaccatcctgaccaacatggtgaaaccccatctctactaaaaatacaaaaattagctgggcatggtggcacatgcctgtagtcccagccacttgggaggctgaggcaggagactcgcttgaatccgggaggcggaggttgcagtgagccaagatcacgccactgcactccagcctggcaacagagtgagactccatctcaaaaataataaaatttttaaaaaagaaatatgtattattatttccttattcaataattgtcaaaaacctcctgaatgaagcagtcaggattaccaaaatgtcagttcatcaatagacgatccaaaagaaaaaggtttacattccagtagtataatgaagtgctttcgagctcttacatcaaatctagagcttaaggtagttctgttcatgcagtggctctgaaccccactttatactataatcacacacacatatatacatatatttttgagactgagtcttgctctgttgcccaggctggagtgtggtggcagaatcttggctcactgcaacctctgccttmcaggttcaagtgatcctcctgcctcagcctcctgagtagctgggactacaggcgcatgccaccgtgcccagctaatttttgtatttttaatagagacagggttttgccatgtttgccatgctggtctcgaactcctgacctcaagtgatccacctgcctcggtctcccaaagtgctggaattataggcctgagccaccatgcctggccaaaatatatatttttacctagattcaccccaagatgattcaaatatgcagccagggttaagaaccagtgctttattagtccagtgtgaggaggagttttaataaaatagtattgcagtaattttcaaactattaatacattcctttgagatggctgcttcctgagggagggtagtaatctagcagactagctaacttgaaaactcttgaatcaaaacccctttaaaatagcatgtgtgagtttgccaggttgtaaagagaactccacctggcaaaaacaaaagaaatttgaaaaccaaaggtgttagtttgaattgactttggagctaccctgaaagaatttgccaatctgggtaatgtattagttagcttatgtcgctaaacagaacgactccaaaacctagtgacctaaaataattatttagctaatagttctttgttttagtaattttggccgggcttaactgggctgctctcatcttagctgacttagatgatcagttgatgatctggctaggagctggaagtctaggatggcctcagctgggacagtttgtctgttccagattgtagatcatcctttagctgctaaccttggtttattcttacgatggtagagcagaattcctaaagatagttagggaaagagtgtataaagccacttgtgaggcaaaggctcggaactgagacactgttgtttctgctggccaaagcaagctatagattaggacttggatttaagacatggagaaagagatttccagtcttgctgggaacaactgtaatagtcatattgcataagatatgggtatggttagagggataatttcagccacttttataaacaatatgccacaaatggcaaagaggtttagggcaagagacaagatctaagacctgatagaaacaagggtgagacctggagatgccatgtcccctcagtaaaaccatctcatggatagggtacacaatgaaatacttccctgcttgcctaaggagactttttctgaggagttggataggtttactgagagtggattggtgggtcatccttagcttcagatctgtggtttcttaggtttgctttcactgtagtacctccagaggagttttggtgcgtacatatagagattactttcctcagaagaaaggaaacattgtttctgtcatgcataagtgtatataacaatcttctgattggtactagattacttcccatttcttagcctaaaacttctcggtgatacccaagtggaggactttcatagaccacagctctggactagaacttgacaaggggagtagtggggacttccttgaacagcataggtagatgctactctggtgctgaatcgtttattgtaagggatttcagtatagacccaggctgtttaaaatttaaacattagtggaaattttctggaccatgctcgtgcagcctgtctatgtgatgcagaattcattctatagattaagtctgttaatgaatatttgtacagaagctttggaactacaattggttttattaattttttgaaaagaaaaattacctcttttgatattttctctgcttttgtcattgtaaattgttggaaggtaacattaagtctgaagttttctatcattttactctaggcagcacacttcygcttttgttccttcatcaggacgaatttactcttttgggcttggtggtaatgggcagctgggaaccggttcaacaagcaacaggaaaagyccctttactgtaaaaggaaattggtacccctataatgggcagtgtctaccagatattggtaagttctgtcatattaaagctttccttcatatattgaagttcttgttaaaatgttgctcttaaatcatgaagatttctgcgaaagaattccaagatacattgttaagtgaaaacagcaaaatatagaacaatgtatatggttgtttgatttgcttatatttacttgtaaatgcataaggaaattctggataagtaaaagttacttacagagagtgggtcatatgggaactagaagatggctacataccagtgggagggaggttttttgttttctattttaaattgtggtaaaatatacacaacataaaatttacagacgtaaccattttttaagtagcattaagcatattcacgttattatgtaaccaatctccagaactcttttcatcttgaggatactaaaactctatgcattaaacagcaactcttcattccctcctcttcctagtgcctggcaactgctattctactttatgtctttatgaatttgacttaacactaggctaggtacctcaaagaagtggaatcatatagtagtgtttctttttgtgactcacttatttcactaagcataacgtcctcaaggttcatctgtgttgtagcacatgttagaatttccttcctttttaagctatataattcaggcataccttggagatattgtgggctcagttccagaccactgcaatgaagcaaatagtgcaataaagcaaatatcgtaataaagcaaatcacaaaatttttggtatcctagtgcatataaaagttatatttatactatattgtagtctactaagtgtgcaatgatgacattatgtcttaaaagactgtgtatatgttagtttataaatatgctttattgcttaataatgctgacacagagatgagcacatgctgttggaaaaatggtgctgatagacttgttctatgcagggttgccccaaaccttcaatttgtaaaaatcacagtatctgagaagcacagtaaagcaaagcacaataaaatgcggcatgcctgtgttcttattatatggatgtggtttgtggcatccaaacaattgcaatagtaacatcaaagatcactgatcatgtcatgcattgtcttatatcgctaaattagtgatatgagatcaccataaaagataaaataataatgaaaaatattgaaatattgcgagaattactaaagcttataagctttactcaatttttgatactgaakttttacaaattgaaggttttttgacaacactgcattgagcaagtcagttggcaccatttttccaacagcatatatgctcactttgtgtctttatgtcacattttggtaattcttaacagtatttcaaaacttctgtgttgttactatatctgtaatggtgatctgtgatcagtggtcattgatgtaattgttttggggtgccatgaaccttacctatataagacaacaaacctaattgataaatgtttatgttctgactgctccaccagctggccagtcctatctctctcctctcctcgggccttcctattccttgaggcacaacagtgttgaaattaggccagttaataaccctacagtggcctctaagtacataagtgaaaagaaaatctctcactttaaatcacatttctcactttaaatcaaaagctagaaaggattatgcttagtgaagaaggcatatcaaaagcccagayaggctgaaagcaaggcttcttgtgccagttatccaagttgttaatgcaacttaaaggaattaaaagtgctactctggtgaatacatgaatggtaagaaagtgaaaaacagccttattgctgatacggagagaattttagtagtccgaatagaaaatcacaccagccacaacattaggattagccaaagtctaatccagaccaagattctaactctcttcaagtctctgaaggctgagagagataaggaagctgcagaagaaaagcttgaagctagcaaatattagttcgtgaagtttaaggaaagaagccatctccataatgtaaaagtactgatgtatatgctacagcaagttgtctagcatgtctagctgaggtaattgacgaaggtgggtatactaaacaacagattttcaatgttgacaaaacagccttctattggaagaaaatgtcctctacaactttcttttatagctgagagaagtagtcaatgcctaacttcaaaggacaggctgactctcttttagggtctaatgcatctggtgactttaggttgaagccagtgcttgtttaccattctgaaaatgccagggccctcaggaattatgctaaatctactctgcctgtattctataaatggaacaacaaagcctggatgacagctcatctgtttacagcatggtgtactgaatatattaatatgggcttaagcccactgttgagacccaccgctcagtaaaaagattkctttcaaaatactgctgcttattgacagtgcacctggtcacatcagagctcagatggagatatacatggagattaatgttttcatgcctgctaatacaacatccattctgctgctgtaggaacaaggagtaatttttactttcaagttttattatttaagaaatacatttcgtaaggctgtagttaccacatatagtgattcctctgatagttctgggcaaagtaaattgaaaaccttcaaagaattcaccattccagttactgttaagaacatttgtgaagtgagaggattgcttgaagccaggagtttgagaccaacctgggcaatgtagtgagacactgtctctacaaaaaataattttaaaaagccaggtgtggtggcacatgctacttgggaggtttaggcaagaggattgcttgagcttaggagttgaaggtttacagtgagctatgatcatactagtgcactccagcctgggcgacagagcaagaccctgtctttgattcatgggaggaagtcaaaataccaacaataagagtttggaagaattttattccaaccttcatggatgactgaggggctcaagacttcattcgaagaacttaactatagatatggtggaaataacaagagaactagaactaaagcctgaaaatgtgactgaattgctgcaatcttaggataaaaaatacccttcatccagtcccaggacatctcaaagctctgcagaaagaacttgagcaatttgccaagctcctgaagcagaagaggatcaccctgggatatgcacaggctgatgtggggcttaccctgggggttctatttgggaatatgttcagccaaacgaccatctgcctctttgaggctcaacagcttagcttcaagaacatgtgtaagcggcgcggcccttgctgcagaagtgggtggaggaagccgacaacaatgaaaatattcaggagatatgcaaagccgaaaccctcgtgcaggcctgaaagagaaagcgaaccagtattgagaacctggagaatgtgttcctgcagcgcctgaagcccacactgcagcagatcagtcacattgcccagcagcttgggctctagaaggatgtgatccgagtgtggttctgtaattggcgccagaagggcaagcaatcaagcagtgattatgcaccatgagaggattttgaggctgctgggtctcctttctcaggggcaccagtgtcctttcctatggcctcagggccccattttggtgccccaggctcccattttggtaccccaggctatgggagccctcattgcactgcactgcactgtgttccttagtgcctttccccctgtttctgtcgccactctgggctctcccatgcattcaaactgaggtgcctgcccttctaggaatgggatacagggagagggcggaagctagggaaagagaacccggagtttgtgccagggcttttgggattaagttcttcattcagtaaggaaggaattgggaacacaaagggtgggggcaggggagtttggggcaactggttggagggaaggtgaagttcggtgatgctcttgattttaatccccatatcatgtatcacttttttctcaaatgaagaagactgggacacagtaggtagagagaaaaaaaagaaaaatactcctcatccatttatattttatggatgagcaaagaaagtgttttcttgagatggaacctactgctggtgaagatgctatgaacattatagaaatgacaacaaagtatttagaatattccataaacttagttgacagagcagcagcaggggttaagaggcttgactctacttttgaaagcagttccgtgggtaaaatgctatcatgcagcatctcctggtatagagaaatcttttatgaaaagaagagtcaatcagtgtagcaaactttgttgctgtcttattttaagaaattgccacagctaccccagccttcagcaattaccaccctgatcagtcagtagccatcaatgttgacaatgaggcgagactctccatcaacaaaaagtttaagacttgcaaagcctcaattgatcgttagcattttttagcaataaagtgattttaaattaaggtatatggattttttttttaagatacaatgctattgcacacttaatagactacagtatattggcctggcacagtggctcatgcctgtaatcccagtgctttggaaagccaaggcaagagaatcacttgaggccaggagtttgggaccagctggggccacattaactctcatctctataaaagaaaaaaaagaaaaaccaactcttgtcaatggactacagtatcgtataaacatccttttttttttttaatgagacagagtcttgctctgtcacccacgctggaagtgcagcggtgcaatctcggtttactgcaaccttcacctcatgggttcaagtgattcttgtggcttagtcaccctagtagctaggatttcaggtgcgcaccaccacacctggctaatttttttagtatttttattggagacagggtttcaacatgttggccagtctggtctcagacttctggccttatttgatctgcccaccttggcctcttaaagtgctgggattacaggagtgaaccactgcgcccaggctagtataaacatacttttatgtgcactatgaaaccaaaaatttgtgtgacttgcattattgcgatatttgctttattgcagttgtctggaaccaaaccctaaatatctttgaggtatgcttataccacattttgtttatctattcatatatcagtggacgattgggttgtttctaccttttggctattgtgaataatgctgctatggatgtaggtgtacaggtatctctttgagatcctgctttcagttcttttgggtatatacaggagtgttaattattttctattttttaagaatttgaattctttgaatctattgcttattaaaaatatttaaaaattttgacccagaagtggattcagcacataaggacgttttccacatccatatgattacatccccaaccggtcagcagcacccattctcctgcctgccaaactatccttgaaaaaccctagccttcaaatttctggggagactgatttgagtaataaaattcaagtctcccatataaaaacaacaaaaaattttttgactagaagggaagctgctgccctgaagataaaagaccccaggcctgacaggatttatcacttgctgactaaagagcccttgggctttgaataaacatcaacaatagacaggaattagtctctacatgctttgggtgagacccagtactgtcaggtgtgatctagcacagtcttagcagtggtggccatgggagtgcttgcatcacctctaccccaactattaagaatctcagcacagagagagagagtgagagsgaaacttcatttgtttgggggagagtaagggagaagaacaagagactctgcctagtaatccagggaattctcccagatcttacccaagttcaccaaggcagtacctctatgagttggcaagagtcacagttttgctgggcgtggtggtgtgtgcatgtagtcccacctacttaggaagctgaggcaggaggatcgcttgggctcaggagctctgggctgtaatgtgctctgctgattgggtgtctgcactaagttcgacatcaatatggtgacttcctgggagtggggggccaccaggttgcctaaggaggggtgaactggctcaggttggaaatggagcaggtcagaactcctgtgctgatcagtagtgggatcgtgcctttgaatagccactgcactccagcttgggcaaccatagtgagactctgtctcttaaaaaaaaaaaaaagtgttactgggcttggagtgtccactaatgcagatggctgcagtgactraagaattgagatcattacactcaattccttttgaatacttggaatgccttcccaagaagttcaggtacaaacaagtacggactgcaaaggatagaataaatacctaactcttcagcgcttagacattgctgaaaatttagaagcatcaagacgatccaggaaaacatgacctcaccaaaccaatgaaataaggcactagtgaccaaacatgaagagacaaagccatgtgacttttcagaaattcaaaacagctgttttgagaaatctcaactaaactgaagataaacagaggaagttcagaatcctatcagataaatttaacaaagagattaaaacaatggtgaaatatcaaagagaaattctgsagwtagaaatgtaattgacaacctggagaatgcatcagaggctctcaacagcagaattgatcaagcagaagaaagaattagcatgaagacatgatatatgaaaatatacagagttgacaaaagaaaaaagagtgaaatactcccacaggatctagaaaatagcytcaaaagggcaaatctaagggttactggccttaaagaggaggtagaaggagagagagggatagaaagtttatttaaagagctaataatagagaccttttcaatcctaaagaaaaatatcartattcaagtgcaaggttatagaacaccaagcagatttaacccaaataagactacctcaagacatttgataatcaaactcccaaaggtcagggataaagaaaggatctcaaaagcagcaagagaaaagaaacagtatacaatggggctccagtacatctggcagcagacttctcagtggaaaccttacagattaggagagaatggcatgacatatttaaagtgctaaaggaaaataacatttatcccagaatattatatccactgaaaatatccttcagatgtgaaggagaaataaagacttcccagacaaacaaaaactgaggggtggccgggcgtggtggctcatgcttataatcccaccactttgggaggctgaggcgggcagatcacctgaggtcaggagtttgagactagcctggccaacgtggcaaaaccccatctctactaaaaataaaaattaaaaaattagctgggcatggtggctggcgcctgtaatcccagctactcaggaggctgagacaggagaattgcttgaacccgggaggtggaggttgcagtgagctgagatcgcaccattgcactccagcccggacagcaagaggaaactgtctcaaaaaaaaaaaaaaaacaaaaacaaaaacaaaaacgctgaggcgtttcatcaacagcagacctgtactataagaaatgctaaagggagtttttcattctgaaggaaagggacattaatgaacaataacaaatcaactaaaggtacaaaactcacgataatagtaagtacacagacattgtggtgtgcgcactactcatcttgagtaagaagactaaaacggatcaaagataataataactacagcaacttgtaaagacatatacaatataataagatataaatagatgtaataaaattaaagagcaggggaaaagatgataaagtgtaaagtttttatcatttttctctttgcttatttgtttttgtaatgagagtaaacttgtcatcagttaagatgttgtttgcaagcctggtaacctcagatcagatcagaaaacaggaggcaagaggattgcttgagcccaggagtttgagatcagcctaggcaacatagtgataccccatttatataaaaaataaaaattagcctggcatcatggcacatgcccatagtcccagttatttgggaggctgaggtaggaggattgtttgaccaggaggttgaggctgcagtgagcyatgattgtgccactgcacttcagtgtgggcagtagagcaagaccatgtctcaaaaaaacaaacaaaattaatagatgcacagaaaattaaaaaaaaaaaggaaattaaaacataccaccagagaaagtcacattcacaaaaaggaagataggaaggaaggaaagaaggaagagaagaccataaaacaagaaagcaaattttaaaatgtcaggagtaagtccttattaataataacatttagtaaacggactaaactgcccagtcaaaagacactgagtggctggctggatgaaaaaacaagacccagtgatctgctccctgcaaagaaacacacttcacctataaagacacacatacactgaaaataaagggatggaaaaagatattccatgcaaatggaaaccaaaaagagcaggagtagctatacttatatcagacaaaatagatttcaagacaaaaagtataagaagatatagaaggtcattgtataatgataaaaggattagtacaacaagaggatataacagttgtaaatatatatgcacccaacactagaaaacccagatatacaaagcggatattgttagagctaacaagagacagaccccaataaaattacagcataatattggcataaaaacagacacatggaccaatggaacagaacagagaactcagaaataaattcatatatgtacagtaaattcattttggacaagggcgccaaggacatacattggaaaaaggatattcttttcaataaatggtactgggaaaactggatatccatatgcagaagaatgaaactagacccctcatatggttaggctttgtgcccccacccaaatctcatcttgaatcgtaatcctcataatccccatgtgtcaacggagagacccggtggaggtaatggaatcatggaatcggtttcctgcatgctgttcttgtaataatgagtgagttctcacaagatctgattgttttataaggggctctaccccactttgctcgacacttcttcctgccaccttgtgaagaaggtgctttgcttcctcttcgccttctgccatgattataagtctcctgaggccaccccagctatgctgaactgtgagtcagttaaacctctttcctttataaattacccagtctcaggcaattttttatagcagcatgaaaacagacgaatacacccctatctctcactgtatacaaaaagcatgtacaaatggaataaaaacttaaatctaagacctgaaactatgacaagaaagctgaggaaactctccaggacattggtctgggcaaaaatttcttgagtgataccccacaagcacaggcaaccaaagcaaaagtggacaaatgggatcacatcaaattaaaaagcttctacacagcaaaggaaacaagaaagtgaagaaacaactcacagaatgggagaaaayatttgcaaactacccgtctgataaggaattaataaccagaatatataaagacaactctgttgtttcaactcagttgttgaactctgttgaactcaacaactcggttgttcctgaaacaactctataggaaaaatctaataatctcattaaaaaatgggcaaaagatctaaatatgcatttctcaaaagaaggtatacaaatggctaacaggtatatgaaaggtactcaacatcatcagagaaatgcaaatcaaaactaaaatgaggtattatctcactctggttaaaatggcttttatctaaaagagggcaataacatgctggcaaggatatggagaaaagggaacgcttgtatacagttggtgggattgtaaattagtatagccactatggagaacagtatggagattccttaaaaaaactgaaaatagaactatcagatgatccattgctgggtatacacccaaaagaaaggaaatctgtacatcacagaggtatctgcactctcatgtttattgcagcactattcataatagccagtatttggaatcaatttaagtgttcatcaacagacatggataaagaaaatgtggtgtatatatacacaatggaatactattcagccataaaaaagaatgggatcctgtcatttgcaacaatatgagaactggaggacattatgttaagtgaaatagccagcacagaaagacagtcacatgttctcacttgttggtggaagctagaaattgaaacagttgtactcacagagatagagaatagaatgatagttaccagaggctgggaagggtagtggggtaaggggaggaagtgaggatagttaataagtacaaaaatggcaggggtggggtggctcacccctgtaatcccagcactttgggaggctgaggcgggcagatcatgaggtcaggagatcaagaccatcctggctaacacagtgaaaccccatctctactaaaaatacamamaaaaaaaaaaaaattagtcaggcatggtggcaggcgcctgcaggcctgtagtcccagctactcgggaggctgtgcaagagaatggcatgaacccgggaggcggagcttgcagtgagccaagtgagccactgcactcgagcctaggtgacagagcaagactccgtctcaaaaaaaaaaaagtataaaaatatagttaatagaatgaataaggtctagtatttcatagcacaacagagtgactacagtcgagaataatttattgtacatttaaaaataaatatattattggaacatttgtaacacgaagaaatgataagtgcttgaggggatggatactccatttattctcatgtgatttttatacactgtatgcctgtatcacaatgtctcatgtatcccataaatatatatacctactgtgtactcataaaaattaaaataaggctaggcacggtggctcaggcttgtaatcccagcactttgggaggccaaggtatgcacatcacttgagatcaggagtttgagaccagcctggccaacttggtgaaactccgtctgaactaaaaatacaaaaaattagctgggtgtggtggcagacacctgtagtccaagctactcaggaggctgagacaggagaattgcttgaacccaggaggcagaggttgcagtgagctgagattgcaccactgcactccagccttggcgacagagtgagaatccatctcaaaaaaaaaaaaaaaaagtaaaaatttaaaaaattaaacattttaaatttgccttttatatccatgcagctttagccaaacttgtatatacctattttttatctattattcttgcagagctgattattttttcattgatgttaatttactacttagttggaaatatttgaatgctgttttctcattcatttttttgacaacctgaaaccaaaatgtccttcttttcatatatattttttactatcccaaacttcctcagaattgtcttcttgtttatctattgatggaaaccagaattctgattttctttaaagtgatgcaaaagttgagtcacgtgtgtgttaatagattttatctattcacagtgacgaggatactatgaaggttgacatttgtaaaggtccagtgctttttattgtaaataaacttgatgtttttttwataattaaaaggctttttcagttaagctcatatttaacaaaggtcaccattacttaggaatgcattttggcaccttcgaaactgtagaccttgagattatttgcattagaatggggaaggagttggtgttttaaaatcagtcgtttttgctgcaatttagtttcatcaaaaaattgtgatacattatagccaaaaggtggaaacaacccacgtccatcagcagatgaatgagtgaaaaaaaatattgtatacctctatagtggaatagtattcagccatagaaagtaatgaaattctcatacattatgcaacttgtatgaatctggagaacattatgtggggtgaaagacacaaaaggacaaatatcatatgagtctactgataagaggtacctagaacaaccaaattcatagagacagaaatagtggttactagttcctagagggaggagggtacggagagtttccatttaatgggtttctgttttagaagatgaagttctagaaatgattagtggtgatagttgcacaacattgtgaatatacttgctaccactaaattgtgcagttaaaattgtaaattttatgtatattttatgataaaaaattgtgtaaaaattgataatctttttgcactgtactcaagctgtataggataaaaactagttacatgtgaatttaatttaccaattctagcccatccagaggttaaacccatggcccccagcatgaattaacattttaatcataaactatctgtgtggccagtgccatgggtaaacaagaggaatttttttttttttttaaatacaaggtctcactctgttgcccaggctagagtgctgtgacatgatcacagctcactgcaacctcagcctcccaggctcaagcagtcctttcacctcagcctcctaagtagctggaactacaggtgtttgctaccacactcagctaatttttaaatttttttgtagagacggggtctcactatgttgcccaggctagtgttgaactcctggattcaagtgatcctcctgccttgacgtcccaaagtgctgggattacgcatatgagccactgcacccggctgacaaaaggacattcttaacagccagaatattcctttggtttagtgattattatctccctggagccaggcaaggggcacacctttctttaaaatgtgtaaagttgaaacaactatattagtttgctagagttgcttgtaacaacctaccacaaactcggtggcttgaacaatacaaatttattggctcactattctgcagactagaagtccgaatttagagttgcttccttctgaaggctgtaagaagaatctgttacatatttctttcctagtttctggtggtttgctgtcaatctttggcattccttcgcttgtagaccttggccttctctctgtacgtgtctgcatccaaattcccccttttataaggacacaaaacattgggttatggacctaccctactccattatgaccttaactaattatatctgcagtgaccttatttccaaataagatcatattctgagatattggggattaggatttcaacacacaatttttttttttttttgagacagtctggctctgtcgcctaggctggagtgcagtggcatgaccttggctcactgcagcctccacctcccagactcaagcgatcctcccacctcagcctcctgagtagctgggactacaggtgcatgccaccacacccagttaactttttgtattttttgtagagwtggggttttaccatgttgcccagggtgttctccaatttctgagctcaagcaatgtgcctacctgggccttcaaagtgctgggattacaggcatgagccaccgtgccttgcccaatatacaaagttttaggagacccagttcaatccataggaataccccaaacctgctgagctaatctttactgcacagagggtatcctcagcatcgcccctgttagtacaggcaaactttgttccttcagatgacttattggctggtgtgatggcttccacctgtaatcccagcactttgagaggttgaggcgggaggattgcttgaggataggagtccaagaccagcctgagcaacatagcaagaccctgtctctacaaaagaaaaaaaagtgacttgtcataccggattaagtaaccgttgttctcaaatataacacttcagataagtctttggttgcataatagatttttttcaattatattgtagtaggaaaggggacatattcttattgaacctttataaatatattactaatgaagggagacttagtaagagatggaattctgggcatcagtgagaatcaggtagcatttttaaataattccttttagtttactcaagcagagttttatgaaattgtggataactttagaaaggaaaaatgagcacaaaatcaaaattaaacattactcaaacatgtaaccataataaatttttcttcatcagttcattctttcttatgtcataatgaattcttattctgctggaccttgggttagcagtttcatgaaatgtctgtttctcacctaacaaaaaagaatatgaggaatcctaatgtacttcactgctacgttttgaaagttatgtaagagagatctcttcagaaccctatacccaagtgtcttttctttgatgtatacattgtttcacatacctgttggaatccttttaatagggctctgagactcctttgttgaaaacacaaactggcctgtagcttgtaggagagtcttcaggcaagcatcagagcagacaaaaactgctctggttaataggttacacaggcctaaaataactgtggctagtttattactgataattatcaaatgatatgatctgatgaagattcagagtaagaataataatgtttccaaagatgatgattaggcctattttcaaggaactcagtgactcttatgtctgatatgtaaatatagctgagcataaccatttatagacaaaaacgaaatcttgagatacaacttaataatcttgagatctaacataccaggtatacacaagaatatcaaaagaaccagcaagtgtaggatcaagcctagacatatttttattttttattttatttttataaaactccatgggagccaggcacagtggctcatgcctgtaatcccagcattttgggaggccgagatgggtgtatcacctgaggtcaggagtttgagaccaacatggtgaaaccccgtttctactaaaaatataaaaattagccaggcatggtggtgcacacctgtagtcccagctgctcgttggggctgaggcaggagaatcgcttgaacccaggaggaggaggttgcagtgagctgagattgcaccattgcacttaagcctgggcaacaagagcaaaactccatcatgaaaaaaacaactacatgggtaagcctgaagaacatccccttttgagaactactggcatagaatatgtggattagaaacaataaggttagagaaccactggcataagtgagaattagagcagtaaggttgtgccagaaaacattttaaataataactgaaattagaactggatagtactgtaccccccccttttttttttttcaattgaggtggagtgtcactcttttgcacaggctgtaatgcagyggcaggatctcggctcactgcagcctccgcctcctggattcaagcaattctcctgcctcagcctcctgagtagctggaattacaagcagtgctaccacacccagctaatttttgtatttttagtagagatggggtttcaccattttggccaggctgttctcaaactcctgacctcaggtgatctgcctgcctcggcctcccaaaatgctgggattacaggcatgagccaccatgcctggcctgtatgatttttaattgtattattattatttattgagaacttttggggtttcttaaaaaaatattttccagccgggtacactggctcacacctgtaatcccagcactttgggaggccgaggcaggtggatcacaaggtcaagagatcaagaccatcctggccaacatggtggaaccccctctctactaaaaatacaaaaattagctaggcgtggtggcacgcacctatagtcccagctactccagaggctgaggcaggagaatcgcttgaacccgggaggcggttgcagtgagccaagatcacaccactgcactccagcctggcgacagagcgagactttgtctcaaaaacaaatgaacaaagaaaaatatgttctatccatgcatggttgattgaatctgcaaatatggaacctatggatacagagggccgactatgtttcttccacctcgtacaagagcacaggtcatggtggattagggcctaatttccaaaaagaggaaatttatgttactaagaaacatgcaaaaattattaccctctttagtatcaaagaaatgcaaatttgaaaagcaagaggatactaaaaaaataaagcctaattttaataatcacctctttaatgcccttatctccaaatacagtcacattctgaggtactcagggttaaagcttcaaacagatctatttgggtgggggatacagttcagctcatcacaggaaggcaaaaatcaaataagtatgagaggaaatgtggatacttcattaagatataatcataagtgcttgagaaataatacttagttacctattttactacggtgacaataaataaaaataaatacagatgatgatatgattgaaaagaactttagctcttttgtaagtcaggagcctttgttcttttttcctcttaaatttaaaggacaataaagacaacataaagcatagaatattattttaataaaacagattatttgctatctagcagattacacaaaaagtaaagaatagcattttatattataggtatttatcagtaaaccaagggagcaggtccttctaaattgagttaactttgctaagatgttaaccattttatagcttctttcagactcaggtataaactgaggaaaataaaattcatttccccagttgtatctttagttatgctctttaatattctgcaacaaagtgacattttgcttgagttcagtatttctatctcagagggttcttgaagtcataatgattttctttttttttcttttytttttcgagacggagtcttgctctgtcacccaggctagagtgtagtggagcggtctcagctcactacaagctctgcctcccgggttcttgccattctcctgcctcagcctcccaagtagccgggactacaggcacctgccgccacgcccagctaatttttattttattttatttttttatttttagtagagacggggtttcactgtatgtctcaatcttctgacctcatgatccacccaccttggcctcccaaagtgctgagattacaagtgtgagccaccgcgcctggccagtcaaaatgattttcatattaatactaagatgttttctatgctaaatgtaatgcactcaatattgctcatcttcaaataaaaaactattttttaagtttctcaattttaagttctaatacgttaagtattaatgattttaacccatgtaaacaaagccctttggagtcctgaataagtgctaagagtggaaagggacttagagaccatcaaaactactcattttccatgttaaacaaaagcacatacacagttgtagctctatcactgttttgcttctaagtagaattacaatttacagaattgtgaatagctcaaagacagtgaaaggtggagataatcctaaacagtgcactaatcaagactgtttcttgtggggcaggggggggtctatttcaaggtcttcaaaattttccctgacaatatattttgtaaagaagaagaagaaggctgcccaggctggattgcagtggcgtgatcacagctcactccaccctcgacctcttgggctcagactacaggcatgcgccaccacgcttaaccaatttttaattttttttgtagaggcgaggtcttgccatgttgtccaggctggtcttgaactcctgggctcaagtgatcctcctaccttggcttcccaaagtgctgggattacaggtatgagctactgtgcccagcggagaggaattttaaggacactttcagatagagaaagagtggcaaaagtatgtattacaggtggaagatatgatgtctgttcatacacattgaaacaaggcatcactgttctttagataagggggggaaaattacttgacacatgaaaattggggacaaaaaggtcagtttagatcctaatgtcacaatatgcactaagataaactataaatgaattaaagagtaaatacttcttaagacaagaagatatgagttgaggatgggaaaagcctttctcagcatatatgctatgaaagttataaagaattagataaatttgtttaaatggaaaagtaaatgttctgtgagtcaaaattaagcaaataattatttggaaaaaatatttgtagcaattacaacctaaggttaatatcctgaatatctaaagtgtccatacatattaatgaaaaaaaaaaaagacagctaatagataaataagacaaacaataaataaaggaaattaatggaagttcctaaaagaagaaatttatattactaggaaacatgcaaaaattattaccctctttagtatcaaagaaatgcaaatttgaaaagcaagaggacagtaaataattgtaatagatcaagcattaatcctctctttcctgttataagataactatataatagatagggagaaactaatgcttcagctacaatatgaagtaatgctaacacttaatttttcaacctacagtgaatgagcatcaatgcctactaccaccacaaaaaagaactcagtgaaaattcttctcaaaggaattatgtgtttcctgatggaactactctcctgcctccatgtagtagttttactgaaataaccaaatggtgattgaaacctgtctagattcaaccaccaatttacagaacagaagaccaagccaaatgttaggagaaaccacaaagataaagtcagcaaaatccagtctgcataaagttgtacaggacaaatgactaggtttctcaaactttttcgagtagtgattaaaaggaaattaaggataggatgcagtggctcacacctgtaatcccagcactttgggaggctgaggtgggcagatcacttgaggtcaggagttcgagaccagcctgaccaaaatggtgaaaccccatctgtactaaatacaaaaattagatgtggtggtgggcgcctgtaatctcagttactcgggaggctgaggttgcagtaagccgagatcatgccactgcactccaacccgggcgacagagtgagacctgtctcaaaaaataaaaataaggccaggtgcagtggctcacacctgtaattctgacactttgggaggctgaggtgggcggatcacctgaggttgggagttcgagaccagcctgaccaacatggagaaaccccgtctctactaaaaataaaaaattaatcaggagtggtggcccatgcctgtaatcccagctaattgggaggctgaggtgggacaatcgcttgaacttgggagatggaggttgcggtgaaccaagatcgcgccactgcactccagcctgggcaacaagagtgaaactccgtctcaaaaaagaaataaataaaaataaaaaaaggaaattaaggaaacttaacttttggtacctaactcatagcctccagaaacccattcatgtactgtagattagtcaaccatcttgtagggaattgtttatagagggcacaatcacattttaagagtaaataaataacatcctgctaaatcttttgaggaaatgagcaattccatatagatttgtgagaattatttagaaaaaagattttaggttgaataattggcttatttaataaagatttacccttttattctattcttaaaacttgtttttggccttagggtattcttgtgacttacggaaaatttgatagtaattatcaaattattgttctaaactctgaagctcatttttggtataacctagataacaattgcatatttgtatggacaggtatttactgatttcttttacaaataaaacattgtgcttgcttgtaaggaataatcaaggaaattaacatgtggtcatttccttgaaaagaatggataattctatagcagccatggtcacaaataatacaaggtgaagaattagtcaactaaggaatgggaatargataacagggatagactatggactagccaagcaatatttttggtaatagatactctttccagtttggggagcagaagaaaagaaaaaaaagaggcccggaatatctttttcaaaagaaactttgttgccctttctttattcctaataaatttgcttattaatgtattcactttggggcctaatttggcttttactgacaaatagctgccaacaaagagctgtatgtattatcttgtacacctatattgaaaaaaaaaattctgcattatgaaatatttactccagaagttttaatttttgtttgctgtttctttttaagaataattttttttttttttagagatgggtcttgctatgttgcttgctggagtgcagtggctagtcacagatgcagtcatagcatactgcagctttgaactgggctcacgccatcctcctgcctcactctcccaagtagctgggactacagacatgtgccactgtagcccagttcaattctttcttttttttttttttttgaggtggagtcttatgctctggcccaggctggagtgcagtggggtgatctcggctcactgcaacctccrcctcctgggttcaagcgattctcctgtctcagcctcccaagtagctgggattacaggcacacaccaccacgcctggctaatttttgtatttttagtagagatggggtttcactatattggccaggctggcgtcgaactcctaacatcaaatgatcctcccacctcagcctccyaaagtgctgggattacaggcatgagccactgtgcctcgccaagaataaatactcttgatttttatttccttctagctatcttttgtagcttttgttctatyttttttaaatcatctttggtttaaactgaaatatactgagatgcagattagaaaaagctttttttcttggtgcagggcagaagaaaggcttgtaaacttcaccaaatgctgcttatgcttgtgggatcgtttaatgttcatcatttggtcagtctcatccccatagcagtcagaatatttcaagtcactttataccatgaagtccatgaatgggaggccttattaaataagatgattatgtgaaaatctaatggcatattgatgctctgaaatatgttatgtaaatcttggcttttaattttttacatttttattacagattctgaagaatatttctgtgtaaaaagaattttctcagggggagatcaaagcttttcacattactctagtccccaggtaataatatagtcatgtaaataattaaatagctccaataattttgacaaattttaaaaacccattattaatgttctttatatgttacaaagtaattgccttagtttttttccccttaagtctacagaataagttttttctgatctatttgataggtttttgtttcaggtgttcaggagagatttaattctgtttaaagaacaaatatatggtgggaatttcttggtttttgagttatatataatatctcttccctctgactaatcttatttgaaaatttagaactgtgggccaccagatgacttcagatgtcccaatccgacaaagcagatctggacagtgaatgaagctctaattcagaaatggctgagctatccttctggaaggtttcctgtggagatagccaagtaagaaaagcattttgggccaggcacagtggctcatgcctgtaatcccagcaccaggcagattgcctgagcccaggaattggagaccagcctgggcaacatggcaaaaccctgtctctacaaaaaaatacaattagctgggygtggtggtgcacacctgtggtctcagctacttgggaggctgaggtgggaggatcagctgagcccaggaggtcgaggctgcagtgagctgagattaacaccattgcactgtagcctgggcaacaaagtgagaacttgtctccaaaaaaaaatatccatggatatttttaaagatcttaattaaatatgtataagttgtagttctttcatgtgcatagagatatgttaaatgataacataaaatatttaatgtagccattttaggattggccttgaaatgtgttccttctggttttataatggtcactatcttaacttttatactttgtggaagacttgagtattatttctttcttgaatattttgttaacttgcctagtagcacttaagatgttatttgttttttgttggtatttgggatgatgggttgtatttgaaaagctgttttgtttctctagcttgttttccaaaactataatttttctgaaaatcccaaaggcatcccagattaggctcactgccaatataaaatgtttaaaatttttttaaattaaaaaactttttacatgaacatacacacttaatttttaaaatwccatgttttaaagcagataacattggataaatggatgaaagtaatatttaagaaagtctagaataaacagtaataccttcatcaagtattattttatcagtctttagcaatttatgtaattctgattcatctaattgggtgttagaggagtgctctgtagcattaaacattagattaattattcattttaattcttttttaagaaagggtaaacaattaratttctgattctatgattaaaaaaacttttttaaattttttagtgagatagatggaacgttttcttcctctggttgcctaaatggaagttttttagctgttaggtaagtggcaattctttaatatgctgaaattttcaaatttattgtcttaaatagtatatcaaattaaaaaatgaaataattttaaatttttattctattttttttttcttttctgttttttagcaatgatgatcactatagaacaggtaccagattttcaggggttgatatgaatgctgctaggcttttattccacaaacttatacaacctgatcatccgcagatatctcagcaggtctgtttttaaagtattatgtttacagtattatctgttgattttgttttcttttgttttatacgtttatagcctaatttactttgcagtttcacagactcttacgatgtgcttttaaaataagattttattttaaagcatttgtaatttagctgtcaaagatctataaatcttttcagatgtttgaagcagaccctgaattacttaacattaccacrttgcttaagtttgtgtatggttatagaggtagagagtttaaattgagacttgtacacgtgattttttaaattctccaagtaatgcttaggcattaattttcattgtgctccaaagtatattcattgtaagacattgtctttcttttttcttcttcaccatttcatatttgctgtagtgcaaaattttccttttctttcttttcttcctgccttcctttttttttttttttctttgaaagtgtattcattttaaatgaagtaggttttactttttgtcaaaatataggtggcagctagtttggaaaagaatcttattcctaaactgactagctccttacctgatgttgaagcattgaggttttatcttactctaccagaatgtcccctgatgagtgattccaacaatttcacaacaatagcaattccctttggtacagctcttgtgaasctagaaaaggcaccactgaaagtacttggtaagaattctaatattttttcttttgaaaccttttctctttaaatgaaaatgcttcataagttcttttgccatttgcagttctgctgccctgcttatttgacactgtcttaggcaaaaatgaacctgtttttccttttcttgcttttgtctagtcttttgattctagttgttggagttgttgaaagaaaaacatgttagatatagaagttcaattaaacataacagcagagacagtattaggaaagttaaaaactgtcacccgtattcctttccctcatcgcctttagtataatcttgctattaaagaagtaaaggaggaggaacaattaaaactgaacaaacatgggctttaaatcttcttggaaccctgatataagccctttatcttgtgtttccttcacttgctaatttcatgatatttgattttatttttctgcctatagactagattttattgctcatctgatcttgcacttctatctcttactgttctggttttttggcataaagttttctcactttwatttttctaattgtctagattttatctctatttcctggcctttatactttttttgctacatttaacccagtgcttttctttctaatggtatttgttagatatgtggagctgagatatatagaagtaataatgtcagtacaagaactttaaggctgagggtaaatggaggaagcaacaagcaaggggtagaatatgggaatctgagggaaaaagagtcaagcagggactgaaaagagtattgctttcctgttgtcagaagtttttgtattctttctgcctgcttcataggattgaagtgtttgtacttagtaactacaaatagtgaatgtggggaaggacccatatgttacactttacattgttcagcttctgtatttgatcttcaggagtaccttgcattttaaaggtagtggttcacaatatttcaaccatatattaaattgaaagataaaagttagaaagatcctttagtattagagcaatacaatttaaaggatgttttgtttaaaaattgaaactgtaattttcaaaacattttttaaaaactggttttaatattaggtatagtggtgagttttttatataacttaggaaaccaagaatataaattcaacaagactttcacactttatttttgcttttgagagcttttcggacaatattgtttaacttggtcggggggaggtttataaaccttacaaatgttacataagatattgtgttatatgcatctttctggggttttctcaggtttaacaactactgtttcagaaaaaaagtcagtatgattttgaaaattgtgattttttaaaaaattcattttatttgcatgttcactttttaataacagaaaactggtggtcagtacttgaacctccactattcctcaagatagtagaactttttaaggaagttgtggtacatcttttgaaactctacaagatcggtattcccccttctgaaagaagaattttcaacagttttcttcatactgcattaaaggttttagaaatactacatagggtatgtccaatcattcctttattttcctctttccccattcctattaacagattgatactgttcattttaacattaatctattaaagatttagattggcaaaaacaatgcatattatagaaatttggaaaagttatctatactttctcttaaaagaagtaataaacctgtcctttggagctctggtcttacctgactttgttaggcatgtatagataacttatccatagttgggcagaacaataacatactaatgagttagaattctccttatatttccttatgaagaatataatttgttagtttgcattatatggtttttgttagctgtaagtggttatcttgtgaaagagattgggtcctagttgtaattatgaacattaaaacttgtgttcttttgctgtagggtactaatggcctcaaagtagaacatttcatttgaaacaaatgactaatttaaaattggaaccgtatgtaattcattaatttgcctattgttcttccctgcccttcttcccagtgtaacaaatagtaccctttacacttgtagcagttcaaagttatatgaagaagtagactctgagctgtttcattaaagatggattttcatccctgacagttggtaggtatacctctgttatgccatttggttttctcaagttgctatttagatgagacatgacctaagggagaagcgtatgtttctaacctatggaatgactaaaaaacccacatgaacctttaatctttagtttcttctccttaacagcttctttgcattttcagaccctcttgcctagtgctaaggtaaataataaagggataaaggagataatccatctgttctttgtctaagaacaaacctttaccggccatttattttcctattttagtgaagctcctgggtatttttctcaactacttaactttctggacttacttttttctttggtatttagtatgtccaagattcctagaaaaacaactcatttctcttcattttgattgatgaaatcatagccatgtatttcctagggaaacaggtcattcttatgtttgcctttacccagaacagggctttcttttagcatatcagggtccaggtctgcagtaaacagttactaagaagattctctaactacatgagatgggtctctacctttctgtgtactgtttgccgaggattcaagagattaattagattgtttcttttctctggacttcatcctactgctttggtgaacaatcccttttcagctggaccctattaccaaataattactcattctgtgctttcattatctgcttatctttattcccccctttaagaaatacttttttttcttagctgtgtcttttacctcgagaaaatggaaggggcagagaagcgggggaaattgaacattttttctttcaaactataggcagaacttaagcaagtaagttaaattacctgcctagctcagtaacttcagtctcaactaaggaagaacttgatagagtttcatcttcaaagacctttttgatggactcattctaaatactagaatcttcacatcttgatagttgaaggggaagggaaaatttattgcttgctaaccactagaacctcctttgtctgtagttcatgtgaatactctagatatatttaactttaaaaccctatatagtcggtattttgccccttttcatagactggaaaaatgaatgtccacatttatatcagcagatatagtagtataatctctttagaagggggcttgattttattttatgcccctagatctagaagttcatattctagatcacatatagtattatattataggcgctggactaggaatcaaaaagatcatatttctaacccctctgtgttgcttcctaccactgtgattttgaagaagtctttttctttatcccatatgcaaatgaagaattatctatmaggattgaaataccagccctgatagttttccaagatttatgtattgtttacattatacagtatgggctgggcgtgatggctcatgcttgtaatcccagcagtttgggtggtgaggcgagcggatcacttgaggtcaggagtttgagaccaacctggccaacatggtgaaaccccgtctccactaaaaatacaaaaaaaaattagctggktatggtggtgcatgcytgtaattccaactacccaggaggctaaggcaagagaatcgcttgaacccaggaggcagaggttgcagtgagctgagatcataccactgcactccagcctgggcaaaagagtgagactccgtctcaaaaaaataaataatacaatatatgtaagttattatatattcataagacagtgattttgttaccaccaccacttgaatggaaaaccactacttttgacttgaagaaattattgggttatgaggaaactgggttcttgtttgcagtagttacaaaagtcaaaagcaggatgatactggtatgactttcttaaacatctctttttgggaggctttagagcagtgaattatctttcttctatgccttagaggaaactttcttcatcctgctctgccataaataggtatctgtagatatgaactacgagggacgatttatttgtatcattcaagaaacctattactatcaaaacttgtttattcaaagacaccttgtatctgacagctgcctaaattccttccctctgctctatggttaagaattaaggggaatttcctcagttttcttctttctctaactctggaggatgattatgaaccagagaactggactttgtgttccctattcatttcaggatttatggatgcacttgttcctcccatatgtcatgtcctttggaaagtttttgaattaaaaattgttttcagtgctccaaatggcatcataagaaaatacctttggtacctgctgtcaggaatggatgtattatcagctaaatgagtttactggcaaataattgggttatttagtagtttccgagttccacgtagtacattatagacatgctggtatgccaaaagagaagccttacttggtctgtctagcctagtcgctacatatttgtgctgatctaaatcagtgattttcaaactattttatgtagaacccttaaataaaaccaaacagataaaacatactcaccataaccacccttgaactgaggtttttaagcaagaatactaaactttaattaaaatgtgaaataaaagtgttataatcaaacttatataggttttattttgtacatttaggcaataatcctaaacacataagttgttttgaacttctaccgtgtgacttctttttaaaattcattttgcaaatagagtgcctactatgtgcttattattatattagatattagtgatgtagtgataaaagacatgatttctgcccttgttgagcttacaatattgagagattgtctaaactttttggtctttatgttacagcatggtaagtactagattagggaaaatgcagagtgctatgagaacacttgggagggcatgtaactatgaaggactaaggaagacttcctggagaaaatgatggctgattgaaccttatctactatgcgaatatattatttttattctaacattaacatttcttttcaaaaacgtatatatcatatcagcaagatatacaaactgcaaacactggttgcgtttctttaattttttttaattcttaatttttgtgagtacatagtaggtatatctttatggggtacatgagatgtgctatgaaatactaggtttggccgggtgcggtggttcactccagtaatgtaaccccagcactttgcgaggctgaggccggtggatcacttgaggtcaggagttcaagaccagcctggccaacatggtgaaaccccatctctactaaaaattacaaaaattaattgagcgtggtggcacgtgtctgtaataccaactattcagaaggctgaggcaggagaattgcttgaacccaggaggtggaggttgcagtgagtcgaaatcgtgccattgcactccagcctgggcaacagagtgagactctgtctcaaaaaaagaaaaacctaggtcttactcattttttttttaatatttttatttttatctattagccatcccaacctcacccatgcccctgcctccccactacccttcccagcttctggtaaccattcttctactctgtgtctccattagataaattgttttgatttttagatcctacaaataagtgagaacatgcgatatttgtctctgtgcctggcttatttcacttaaataatgtcctccagttttgtccatgttgttgcacatgacacaggaatgtcactctttttttttttttttttgagatggagtctcactctgtcgtccagggtggagtacagtggcgtgatcttggctcactgcagcctctacctcttaggttcaagcaattctctgcctcagcctcccgagtagctgggactacaggcatctgccaccacaactggctaattttttgtatttttagtagagatggggtttcaccacgttggccaggctggtctcgaactcctggcctcaaatgatccacctgcctcagcctcccaaactgttgggattacgggcgtgagccaccaagcctggccagaatagtacttcattgtgtataaataccacattttctgtattcgttctttttttttgagatggaatcttgctctattgccagggctggagtgcagtggcacagtctcagctcactgcaacctccgtctcccgggttcaagcgattctgctgcttcagcctcctgagtagctgggattgcaggcgtacaccaccacacccagttaatttttgtatttttttttttttttttttttgagacagagtcttcctctgttgcccaggctggagtgcagtggtgcgatcttggctcactgcaagctccgcctcctgggttcatgctgttctcctgcctcagcctcccgagcagctgggaccacaggcgcctgccatcacacctggctaatttttttttattttgtatttttagtagagacggggtttcaccgtgttagccaggatggtctctatctcctgaccttgtgatccgcccacctcagcatcccaaagtgctgggattacaggcacaagccactgcacccggccttattcattcacctactgatggacacttagattgcttccaaatcttggcaattgtgaacagtgtagcagtagacctggtagtgcaaatacctgtatgatatactgctttcgtttcttttgggtagctcctcagcagtgggattgctagatcatgtggtagctctattgttagttttttgaggaacctccaaattgttctccataatggttgtactaatttacattctcaccaacaatgtacgaaggttccctttagtccacatccttgccagcatttgttattgcctgtcttttgaataaaagccattttaactggggtgagatatcttactgtagttttgatttgcatttcactggtgttcggtggtattgagcgccttttcatatgcccgtttgtttttgttttgtttttttttttttttgctcagtgcaacctccgcttcctgggttcaagcarttctcctgcctcagcctcccaattaactgggactacaggcccacgccaccatgcccagctaattttttgtattttattagagacggggtttcaccgtgttgcccaggctggtcttgaactcctgagctcaggcgatccacccgtctcagcctcccaaaatgctgggattacaggcatgagccaccgcaccctgccgcctgtttggtatttttatgtcttcttttgaggaatgtctattcagctcttttgcccactttttaaattggattattgcatttttttctatagaattgtttcagctccttatatattctggttattaatcccttgtcagatgattagtttgcaaatatttcctcccattctgtttgttgactgtttcctttgctgtgtagaagttttttaatttaatgtaatcccgtttgtccacttttgctttggttgcatgtgcttgtggggcattaggaaatttttgcccagaccaatgtcctggagagtttcccctaatgttttcttaagtagtttcatagtttgaggtcttagatttaatcattaatcattttgatttgatttttatatatagtaagagataggggtctagtttgattcttcttcatacagatattcagttttcccagtaccatttattgaagagactgtcttttgtccagtgtatgttcttggttcttttgtcaaaaatgagttcattttaggtgtgtagatttgtttctaggttctctagaaacaaatttgttctgttccattggtttatgtgtctgttttcatgccagtaccatgctcttttgattactataccgctgcactataatttgaagtcaggtaatatgattcctcgcagttttgttctttttgcttaagatagctttgactattctgggtcttttgtggttctgtgtaaattttaggattgtgtttcctatttctgtgakcaatgtcattggtattttgataaggattgcaatgaatctgtagattgctataggtggtatggacattttaacaatattgaacatggaatatcttccattttttgtgtcctcttcaatttctttgatagtttttctttttttcttttgagatggagtttcactgtgttgtctaggctggagtaagtacagtggcctgatctcggctcactgcaacctccacccccccgattcaagtgattctcatgtctcagcctcccaagaagctgggattacaggccactccaggctattttttagtagagatggggtttcgtcatgttgactgggctggttttgaactcctggcctcaagtaatcyacccgccttggcctcccaaagtgctgggattacccggtgtgaaccaccatgcctggcctatttcagtttttttgaatggtttaagacttgttttatgacataacatatggtgtgtctttgagagtgatccatgtgctaaggagaacaatgtttattctgcagccattggatgaaatgttctgtaaatatgtgtttggtccatttggtctatagtgcagattaagtctcatgtttctttgttggttttctgtctgtacatctctgtccagtgccaaaagtggagtgttgaaggcttcatctattactgtactgaggtctatttctctctttaactctaataatatttgctttgtatgtctaggtgctccaatgttgggtgcatatatgtttacaatgattatatccacttgctaatttgaccactttatcattatatagtgaccttctttgtctcttcttacacttttgtaatctattttctctgatatggtagctactcctgcccttttggctaacactggcatgggatatctttttccatccctttattttgagtctgtttgtctttataagtgaagtgtgtttcttgtaggcaacaggtcatttggtcttatttttctattcatgcagctttatgtcttttgattcatgagtttagttcatttacatccaatgttattgataagtaaggacacactcctcctattttgttactcatttctggtggttttgcagttttctcttccttttttttcttgctgttttgtttttagtgaaggtgattttctctggtgatatgatttagtttttgctttttattttttgtgtattcattatatgcttttggtttcaggttaccatggggcttgcagatactatcttataacccattattttaaattgataacaacttaacactgtttgtataaacaaataagcaaaaagaagagtaatgaaaactctacaccttaactttgtactcctgctttttaactttttgttgtttctatttatatcttatactctgttttgaaaagttgttgtagttgttatttttgattggttaattgtttatagtctctctacttaagagtagtttacacaccataattacagtgttgtaatattctgtatttttctgtatactattgagttttatacctttagatgatttgttattgcccattaatgtttttttctttcagattgaagacctccatttagcatttcttgttccacaggtctagtgttgataaaattcctcagcttttgtttgtctaggaaaatatttgtctttcagggtggggtgcggtggctcatggctgtaatcccagcactttgggagactgacgcgggtgtatcacctgaggtcgggagttcgagaccagcctgaccaacatggagaaaccccttctctactaaaaatacaaaattagccaggcatggtggcgcatgtctgtaatcccagctacttgggaggctgagacaggagaatcatgccagtaccgtgctgttttgatgactatctggaaggcgaaggttgtggtgagccgagatcgcgccattgcactccagcctaggcaacaagagcgaaactctatctcaaaaaaaagtatttatctttcatgtttgaaggatattttcactggataaattttcccttcaatactttaaatgtcatgccattctctcctggcctgtaaagtttgccctgagaagtctgctgccagcatattggcacaccattgtatgttatttgtttttttctcagacaggtttttttttcttttttttttgagatggagtcttgctctgtcgcccaggctggaatgcagtggcactatctcggctcaccgcaagctccacctctcaggttcacgccattctcctgcctcagcctcctgagtagctgggactacaggtgcccgccgccacacccggctaatttttttgtatttttagtagagacgaggtttcaccgtgttagctgggattataggtgtgagctactgcgcccagctcttgtttttttctctttctgttttcaggatccttggtttatcattgacctttggaagtttgattattaaatgtcttcaaagagtcttatttggattaagtctgcttggtgttctacagtcttctacttggatattgatatctttttctatgtttgggaagttctctgtcattatctctttgaattaattttctgccccatctatctcctctttaaggccagtaacttakatttgcccttttgggccttttttctagattctgtaggcatgccttattgttttttattcttttttcttttgtctcctcagctcactaattctttcttctgcttgatcaattctcctattaaaagactctgagacattcttcggtatgtcaattacattttttcagctccagaattattgcttcattcttttaaatgatttcagtctctttgttaaatttatctggtattctttctctgtattatcttgaatttctttgagtttcttcaaaatagctatttagaattccctgtctgaaaggtcatgtgtttctttttctccaagatttgtctttggtgccttattttgttcatttggtgaggtcatgttttcctggatggtcttgataacttaacagatgttcctctctgtctgggcattaaagagttagagttacgtatttattgtagtcttcgcggtttggacttgtgtgtcttcgtgcttcttggaaaggctttccagatattcagaaggacttggatgttgtcatcgcttagaagctgtatctgctttagttggcaccccacacccagtagtgctgtggttctggcagactcataaaggtactgccttgatggtcttagacaaggtctggaagaattctctgaattaccaggcagagactcttgttctttctctttccttactttttccaaaacaaactttgtctgttctgaggcacctggagctgggggtggagtgacacaagcacccctgtggcgatgctaccaccactgggactacactggatcagacctgaagccagcacagcactgggtctcacccaaggcctgttataacaacttcctggctactgactatcttcactcaaggtgctggcgctctacaatcaccaggtggcaaagccagcctggcctgtgtccttcccttcggggcagctagtttccccaggcccttggtgactccagaggtgctgtctgggagccagggactagagtgaaaaaccttagacgtctacctggtgttctgttgtactgcagctgagctggccctcaaaccacaaaatagtccttaccactcatccctcccctttgcaaaggcagaggaacaccccagacctccccttggccactgtcaccaggggcctgtggggagtactgccagaatactgccagtgtttccttgaggcccaaggggtttttttgtttgtttgtgtttggagacggagtctcctgtcgcccaggctggagtgcagtgacgcaatctcagctcctccatctcctgggttcaagcgattctcctgtctcagcctcctgagtagctgggactacaggcctgcaccactatgcctggctaatttttgtatttttagtagagatggggtttcaccatgttggccaggctggtctcaaactcctgacctcaaggatctgcctgccttggcctcccaaacttgctgggattacaagtgtgagccaccatgcccagcccaagggcttttttgagacaaggtctggctctattgcccaggctggagtgcagtggcacaatctcggctcactatactctctacctcccaggctcaagcagtcctcccacctcagcctcccaagtagctgggactacaggcatgtgacattgtgctggctaatttttgtattttttgtggagatagtgtttctccatgttggccaggctggtcttgaactcctgacctcaagtaatttgccagcctcggcctcccaaagtgctgggattagaggcgtgagccaccatgcctggtccttaagggctctttagtcagcttgtggtgaatgctgcctggcatgggacttaccctctggcccagcacaggtccagaaatgccatctaagaaccaagtcctggaatttgttcaccctcctacgttggagctggtacccaaggtacaagacaaagtcccctttacttttcctccacttttctcaagcaggagtcttgccccatagctgccatggtagggaatgtgctgagtctcacctgaagccaggaagtttcaggctcactcaaggcctttgtacctagtacatggatattgctgctgattattcagggacccaagggctcttcagttaacagataatgaaagctgtcaggactgggtctttcttttcgaggcagtgggttcccttctggccactgtgtatctagaaatgttgttcaggagctacagtctggaaagcagtcttcacaactttgactggtgccctatccagctgtggctgagctggtatccaagatgcaagacaaagttctccccactcttccctccagtcttctctccgcaagtggaaggagaagatctcttttggagccacaagctgtgcagccttgggttaaaggaggggtagtgccagcagtccctaaacagccccagctggtgtctcagtaggtcacatgcctctccagctcactggctctgggcccagttctgcacttggactcacctagtagttgcggtccttgtggcctgcactatgtttgaagtttattgagggccccagagcactttagcccaccatggtgaggcttgcaggaactcacattttgacaactgggacccacagttcccctctggctagggctgggttttaatgctccctctgtggacaggagtcagctaagtttgatccagttttactttttgctgtaacagggcagtgctgagctcaatgcctaacaattgctgcattctttctctccccggtgcacagaaatgctctctgcaccacaatgcctctgccaggggctgggagaggggtgatgttggtgattcaagacttttttgtatctctttttttcagcaatatgaagttgaaaccaggtgctatgagtgctcacctgatttttggttctcaggaagatgctttttttgtgtagatagttgttaaattggtgtccatgcagctgggacaatcagtggagctttccattttgccctattgcttcacctcttccacctgtttgcttttagggatggaaactgtggtttcacttttaaattttaagtaagataaacaaaaatatatatcagaggtcagtgggatgtgaatcatattctgcaagagtcactaaattttagaatccaatgtgattaaaaattagtttgtatatgtataaacataaatattggagaggggaaagccattgtgttttttgtataactattctgtatatttctttttttagtagaaagagtttggctaattatttcagttgattaaagcacaatactaaagactccagggtaggacctgcaaactttttctgtaaaggaccagatagtaagtattttatgctttgtgagccatacagtttttgttgcaactagtcaactctcaactccactgtggacagcatgtaaatggatgggagtggctgctttccagcaaaatttacttaaaaaaaaaaaaaacagtgggtagcatttgacctgggtagcatttgacccacaggttgtagtttgccgaccccttcttttaggatgaaaattttggtctccatatgtaaacttggtgtctttgttttgtttgaaagctagtaatagcagtataactctggtcagtttctcccaaatgagtatcctggccacagatataaagcaatcaaaacagtgggagaaaaaaagaactgaaagtgcttttgtcaataattagaggagataaaagtatcaactgtgaaaataaaagcagtattattaaatgtgtgctttttaaattggattatttgtacaatgctaagccacaagatcaagcaaattggacagtcatatagtgagttaagaatgcatgtgtcggctgagcatggtggctcacgcctgtaatcccagcactttgggaggccgaggtgggtggatcacctgagatcaggaatttgagaccagcctggccaatatggtgaaatcccatctctacaaaaatacaaaaaattagctgggcatggtggtgggcacctgtaatcccagctacttaggaggctgaggcaggagaattgtttgaacctgggaggtgtcaacagagcaagactctgtccaaaaaaaaatagaatgcatgagttatatttctggctctgttacttacgtgaccttggttactttcttaaatgctaagccttagtatactcatctttatgatcataataatagtatacatttcataagactgtttaaatgagacaatgtacatgaagtccactttaatgataggttttattttattattggagcataaaatttgagtgaatttttttttttttaaagacagagtttggctcttgtcacccaggctggagtgcaatggcacgatctcggctcaccacaacctctgcctcccgggttcaagcgattctcctgcctcagcctcccaagtagctgggactacaggcgtgcgccaccatgcctggctaattgttgtatttttagtagagacggggtttcaccatcttggccaggctggtctcgaactcctgacctcatgatccaaccacctcagcctcccaaggttctgggattacaggcatgagccactgcgcccagccaaatttgagtgaattttaaggtagagtctgcattgtagtgaaaattttagcttcccttctcgatatgcatactgaagcctgacagtcccctatgcccctccatggaatgaggcagggtaatggtgttatatatgtgtttgttctctttctctattaggaatacttcagggcaaaagttcagaaaacatgaaaattatataaacaattctttttacgaaaaattaacaataagcatacattataatacatctcactgaaaatgcaacagatatagaccratccttttaaagtgccattagaagtaagaactataggcaatatctcttaagttttatctgtccatccattcgtctcatatttattgagcacctgtttggacaccagcattgtctggttagatttatatatttactgagtgattcattttgttccctttcagatattccttagttttagtgtatatgtgattattcacaaattataatacttttgttattcttcaaaggaaagttagctagttttgtttagtttgtatgttagatcaactttatttgtttctttggtggtttttcttctcttaagtgcaacatctctatagggtctgcatttggctccttttgttttactttctacctctcccttacctactgccacagcttatagttgtctcctttaaggaaaatgactgtcagttatgtctctgaggcaaacgtttctcgagtaacttgacagtcctgccattactttcaactaagaaaggttgtcttgttttcctgaccctgtgtgtrtgtgtgtgtgtgtgtgtgtgtgtgtgtgtgtgtgtgtgtacagtaatttttttttttttttttttttgagacagagtctctctctgttgccaggctagagtgcagtggcgtgatctcggctcactgcaacctctgcctcccgggttcaagtgattcttctgcctcagcctcccgagtagctgggtctacaggcacgtgccaccgcacccagctaatttttctatttttagtagagatggggtttcaccatgttgaatggtctcgatctcttgcccttgtgatctgcccaccttggcctcccaaagttctgggattacaggcatgagccaccgtgcccaacctatgtacagtaatttttaaaattactcttacccagggttgaaatattgaagttgtctttgactcttctcgttttccatatccgttagctgccatgacctctgaattcttatctagagactttaaatcttctagcaatatcctaatcctattgccagcctctctacttattcttgactatacctcactctctcagccgaataatattcataaaatacaactggttctgttactttttaaatctaaaaccttatttccccatgtatcaacttttgccatagtaatattctgtaacaaaacatgccagaactcattggcatacaatgatgaacacttattctaattcctrcgggattgggccttgttttagcctaagccttggctgaggatggctaacctagagacggttgaggtcagcttatttcccaactgcatgttgaatccagttttgctccatgtgccgctcattctctttagcagtttaggtgggggcaattacatacagattgtgtctctttagctggtgctgttctctctgcctagaatgttctccttcaaaccttttttttttaaatgttttccattcactttcctttttgatttttatttgcagtatcttcaaacctacagaaacattgaaaacaaatataattaaaacctgtgtgccctccattctagattcagcagttgttaacatgctgtcacatttgctttatatatgtgtgtgtatattcttttttcatgaatcatttgaaagtaaaatgtagatatcatcctttaatacttaatctttcatctcttaagaatacaggcatttttctgtgtaacagcagtagcattatttctcttaaggaagttaactataattctataatatcatctatctgtgcatgcatatttcaaatttcctcatttatagcaaaaatgttgtttatattactgctttttaaataactagagtccagtcaaattttggtttttgcaattgtttgttgagtcttgctactctcctttctgattcatgaacatggtgaatgactcttcagtttctctcagcagtgcttggtagttttcaaggatcttgcatattcttttaaaaattttattccttctctttctcaaagatttattcctaaatgttttatgtttttgatgctattgtaaatgatttttaaaatttttattttccaattatttgttgctagtacagagaaattctttttttttttttttttttttttcctcttttttgagacagagtttgactctttttgcccaggctggagtgcaggcacgatctcagctcaccgcaacctccgcctcccggattcaagcgattcttctgtctcakcctcccgagtagctgggattacaggcatgcaccaccatgcccggctaattttgtattattagtagagatggggtttctccatgttggtcaggctggtcttgaactcccgacctcaggtgatctgcccacctcggcctcccaaagtgctgggattaccggtgtgagccaccgtgcctggccttttttttttttttttttttcctttgagacagagcttcactcctgtcacccagactggagtgcaatggtgagaccttggcccactgcaacctctgcctcccaggttcaaatgattctcctgcctcagcctcccaagtagctgggattacaggtgtccaccaccacactcagctaattcttacatttgtagtaaagatggggtttcaccatattggccaggctggtctcaaactcctgaactgtagtgatctgcctgcctcagcctcccaaagtgctgagattacaggcatgagccactgtacctggcctagagaaaatcaattgagttttgagtgttggccttttaccctatgatcttgataaattcttagttctggtaattctcttatagattgattcatttggcttttttatatacacaatcatgttattttcttggcatattttattaactaagaatttcagtacaatgttgaatataagtggttatggtggtcattcttgcctagttcctaatcttagaaagaaagcattcaatatcttaatagtaagtataatgttaaatgtcggtggggggtgggggtggttagatgggttttatctgtttgaagaaattttcttccatttctcatttgctgagagtgtttattataaatggatttgaattttatcagatattgtttccatctgttgagatgaacagatgatttttttctcctttttttagaaatattgtgaaattcattgatagttggatgttaaaccaaccttgcattcttgagatgaactttacttggcattatatttgtattatactttatatatattattggatttaatttgctaatattttattgatggtttatatctgtgttcatgagggatattgatctgtaatttttatttctcatattgctgttagcttttggtatcaagtttattctggcttcataaaatgaattaagaaatgatccttctttattttctgaaaaagtttgattaagattggtattatttctttattaaatgtttgatataattcatcagtgaaaccattttggccctggagttttcttttgggaaaattttaaatttcctattaaatttaaaaaataaatatagacatttcaggttttctgtttcttcctgagtcagttttaccaagatatctatgtaatcatgtttcttctttaattcctgatagtggtaaattgtgtcatctctttttcttggtcagtctgactgtaggtttattcattattatcttttcagaaaactcatttgcttttaatttcttctctagtgtttttctgttttctctttcattgatttctttgtttccttctgcttgatttgtgcttaatatgatctttttttttctagattcttaaagcagaaacattgatcattgattttagaccctttatttctaatatgatcatttaatgctatagattttcttttatgcctggatttattagcatcycacaaatttttatgtgtttttacttttaagttcaaaatattttcctaaagcccctgtttcctagctccaacatttgggtcttctctgaatctgactctgttgattgctttgtctctagacacttttttgttttgttttgtttgttgatttttttttttttttgagacagagtctcgctctgtcacccagggtggagtgcagtggtgcaatctcagctcactgcaacctccaccacctaggttcaagcaattctcgtgctttagcctcccaagttgctgggattacaggcatgtgccaccacggccagctagtttttgtrttttcagtagggacagggtttcaccacattggccagggtggtcttgaactcctgacttcaggtgatccacctgccttctcctccccgagtgctgggattacaggcatgagccaccatgcccagcctgttcagttgatttttgatatgtctcataattttgggttatctataaaatagtaagaaactgaaatcaataggtttaaagcttataaattggtacacctctactatctggtattagtgtaaggatttgagtttatttagtcaggagttaagctggaattgaatttttaatttgctataaataccttcattacactacaggcctgtaatgctagaggaatttgaggcctctaacattggaggaatttgaggcctgtagtacaatgtttagggtggaagtggggtgtcaaatggtttttgtgaatgtttgtgccccactttgcatgcctactccttagagggattttgttctcattctttcctcttgtcagttgtaaactggtattgcttgttactcagtgctttcaagattggtagaggagagggaacagaaatggttcttggttgttgtggtatagccttggttttaggtagattatgtgtgcctggacctttgtcagagttccctcccctcttcctgtggcaaccaaactctgcttccgatttttttgtgtggcagtttctgctccctcccccagcaattgcagacctctagtcctactgatataagattctgagcctaggactgttcttgtcacctttcctcccaggaattgaaggtttttccctccctcagcaacaagacatgggtttgcgtccccttcctcagtggctgaaggcttttgctctgtgtgaaagaaggatctgggcagggtgacgggcctttgttcctttctcatgtggcagctaattccttgtaccattgagagaggctcttgatattctgccttgtttccttttttccccccctctgccttgtttccagttgtttcatgggcacccagtggcatctatggacaagaggctgtgagtgagtgccaactgcctgggactctgcggggtttcatactatcaagctaccccacactcagctttaagtgatccttaaaattttagtgtattacttctgcttatatgacagtagtagtttcctctttctctctgccacaaatgagccawttctggtaccctgttaccttttgtaaggatttgttgatccttggattcaggctacttggttgtcttgtaactttagctctctcacaggttcaagaaaagttttcagtaattagaagtgttttgtttaattgccagtattctaggattttccaaatctctttctgttactgattttagtttaattccattgtggacagagaacatatgttgtatactttggattcttttaaatgtatgaagacttattgtatggtccaggatttggtctatcttagtgaacatttcatgtacaattattaggtgaagtgttatgacagtgagtgcaagttggtttaaattgttattcagatcatctatacttgctggttttgtctatttttttctatcagttaatragagcagtgttaaaaatctccaaatataatcatggttctgttgatttctctttcatatattttcaagctctgctgtttttggattgttgtgacttcttggtgaattaatccttttattattatgaaatatgccccttttcctctggaaatgcttgttttgaactcttactgtaagagtagcctctctggccaggcgcggtggctcacacctgtaatcccagcactttgggaggccaaggtgggcagatcacgaggtcaggagattgagaccatcctggctaacatggtgaaaccccatctctactaaaaatacaaaaaaaaattagccagaggtggtggtgggcgcctgtagtcccagctactcaggaggctgtggcaggagaatggcatgaacctgagaggcggagcttgcagtgagccgagatcacaccactgtattccagcctgggcaagagagcgagactttgtctcaaaaaaaaaaaaaggagtagcctctcagctgtgctttctgttggtttattgggtttgagttttatttatttatttatttatttttagcaggtcttactttgtgccttgtgcattcatggtttagagttagccaaggatgtggggggaatttgcacatagattttggggcttcgtcctctggattcctttctttgatttttttattcctcactgtctggctgtgctggcagcttcagtctgtctattaagactgctgctttctgcttgagctctatcctctacttgtgtccattcctgtttctgcctacttttggtggatctccagtgtttttaagtacagtagttgttctttaatgtattgtctagagtttataattgttagtgccaggaagagtagtctgatacaaagtattctgccatatttaktaccagaattcctctagtctcttttaatttagaatagctccttttttttttcaatccctgctaccttgactttttgaagattcttggccagttttcttataaaagtttcataatcaggatttgtctgattgtttcctcatkgtgatgtttatttaacttgttcctctatcccttgtatttcctataaactaaaatttagattaggagacttgattggatttgggttaaactatttttacttcatagatcatttgtatgcttcttgttgagctatatcaccaagaacataatatttcattgttccagtattggtgatgattagttagatcacttgatgaagatggtgctctccactgtaaagatttgtttttatctttgtaattaataggtaatctctagggtggtaatttgcatcctcttcatttttcacatcgtgtccagatatcaccttctaaagtttattctaatcagatgccagcacagagcaacacttaacaagcattagctgctattattattaaggtcccatttcccaaccataagtctttatagtatctagtttatatataccgtatacagtttaatcattacatatctcatactgtgttgtagttataaagacatgtcttttctagattttggggtactgaatgcagatatcacatcttacaaatctttgtgtctcccatagcacttaactagcattttgcatatagtaggcactcagtaattattttttgtaggaagaaaaaaatagctaagaaaatccccaaagcatttttttctttagatattttaaatttctctgtcttggccaggcgtggtggctcacgcctgtaatcccaacactttgggaggccaaggtggrcagatcacaaggtcaggagatcgagaccatcctggctaacacgrtgaaactccgtctctactaaaaatacaaaaaattagccggtcatgrtggcgggtgcttgtagtcccagctactcaggaggctgaggcaggagaatggcgtgaacccgggaggcagagcttgcagtgagctgagattgtgccactgcactccagcctggttgacagagtgagactccgtctcaaaaaataaaaaaaatttgtctgtcttgagtactggttaaatttaatgtcaattacattttcttttgtaggtaaatgagaaaatgggacagattatacagtatgataaattttatatacatgaagtacaagaattgatagacataagaaatgattatatcaactgggtccaacagcaggcctatggaatggtaggttttctgtgcaatttgtgatttcatttttatgtatatgtatctaataaaaaaagaaacaattgcttggttttgaaatgagaaagttttttcagaacttttatccagaacttactttttaaataataacacattgcaaaggagtgctatatattttacaatatttatatgcaaacattctactcttttaccaaagccaaaccaaagaaatggattacactgtaaaacaaaacaaaacaagacaaaaaaaacctacaagtgtgaaatggatttttaactcttttattttccatgaggttgcctcttatttctccagtgttgaaaatactggcattcttcatactggaactcctaagaatgcattattgttgtgaaattggtgcttcaagactaccaaaagaggactgggtgtggtggctcatgcctgtaatcttagcactttggagcctgaggcaggtggattccctgagctcgggatttcaagaccagcctcggcaacatgacgaaatcccatctctactaaaaatacaaaaaattagccaagtgtggtggcacatgcctgtaatcccagctactcagaaggctgaggcatgagaatcacttgaacctgggagatggaggttgcagtgagccgattatgtgtttacttttatttcagatttttaatataaatgtgggtgcgtacatctttttatgcagctaagtctttaataactagacactatcccattaaaatagtaccatggtcttataaaacttgaattaggcacataaaattttaatgcagaaatggrtaagcagttagatacaaaatatttaggtttactactcttatttgctgccatttgtgtatacttgaggcccacttttctgtacccaggtaatttaatatgtgtgcagcagttatataatagaagggtgagtaacttttcattgcttgctaggcaccagctgtaagctccttgtggatgggtgctcttgtcagtcaaccagcacctctgacagtgtctagaatatgtctagtaagcactaaaaaagtacagtagtttttgaatggcaatctggttagtgcacgctgtttttaggatactcccacctyccggaatcaggttgcttctagacatcttttccttccctagtgtacttgggtctggactgggagagactcattgacttttctcctgagtcactttgaggctgggtcaggtttatagccattctatagatttaggtctattcatttgcttattcaacaaacaatgagaatctgttatataacaggcactgatttaggtattggaaatacagtggtgaaccagacagagccttgtttctcatggaattcgtaatctactgggcaagattggcaatagtcaaacaaagcaaaaaataccagctaataatatgtattattaaaatgaggggacttagtaaagataggtttcagaaaagacttatctaatgaagtatgagtactaatctgaatgacaaggagcagccctttaagatcagggcagagagaatttcaagaacaacgaacatttggtaaaatacctgaggtgaaaacaagcttgacatgattgaaggacagaaaaaagccagcattaggccaggtgtggtggctcacgcctggaatccctgcattttgggaggccgaggtgggcagatcacgaggtcaggagttcaagaccagcctgaccaacatagtgaaaccccgtctctactaaaaatacaaaaacttagccaggcatggtggtgggcgcctgtaatcccagctacttggaaggctgaggcaggagaattgcttgaacccaggaggtggaggttgcagtgagcttagattgcaccattgcactccagcatgggcgacagtgtgagactcctttcaaaaaaaaaaaagaaagaaagaaagaaaggaaaacagccagcatggcttatgggagtgaggagggaacagagaaatgggcaggggccagatcatagagagtttagtaaactaggaytaggaatttggattttatctaaagtgttaatgataaacaggggaaacttaatctgatctttttgaatgatcactttgttggctgtgtagggaacgggacagaaatgaaagacggaaatccatgagaaagctatattttagtagattaggggagaggaaatgatgggtttgactaggatgatggttatttagatggaagaaggaaatggaatatgtcttggagataaaagggaatcttggagacaaaaggaaaataaaaatcactgatggattggatatgaagtgaggaaaggagagaaatccacaaagattaaaaagcaggtgtggtagagggaaaactaggagagtcttggaaaccaaaatttaaaagtgaaagagagactgttgaatgctgcagaggaggaggatgaaaccttagaattgacagtgaatttggttacatgaaggtaattggtaaccttgataataccattcttgggttgggatgttgtaaagagaaatttagaggtaaggaagcagtaacaaccattggcaatactttgacgaagttctgcattgaagaggagcaaaaaaaaaaaaaaaaaaatggagtggtagctggaatcaagggataattttttaagaaagaaaataattgacctcagcagttttgaataaatatttccttttttcttcatctcygacctaggtaaagcttctcaaactmttcctttagagaacctgtgatggcaggagaaataacatatttcttaaggatttaaccttccctcagcaagacttgaactgaggctaattttctatctttaaatgcaaattttgcattatgggcataatagatattgcagtataaaagagatttaatttatttgtcattgaggaaaattgattcttcaggaaatgaaccttgttcataccaagactttgcatataaaccctcacacaccaaccagggtaccctaggtcttttagcagtgtttttgaaaggattcagaacatttggagggatatgtggacccttttaaagaagaacaatttcttaagaagcccagtgttcacttacatattatataaatatatacacacattaaactagttctaaactcttggtgtttagctcttaaaagaactctaagaccacagcaaatttataattataaataacattacagtccaggtgcggaggctcacgtcccagcactttgggaggccgaggtgggcagatcacctgaggtcagaagttctagaccagtctggccaatatggcgaaaccccgtctctactaaaaatacaaaaattagccaagcatcgtggcgggcacctgtaatcccagctacttaggaggctgaggcaggagaatggcttgaacccgggaggtggaggttgcaatgagttgagatcacgccactgcactccagcctgggcaacagagtgagactccatctcaaaaaataaataaatagtaaataacattacaaattggcaaattaagttaatttattatggagaatgttgtaatgatgaagaattctaactcacaacataaatatgtatgatgagaaagcagagtaacttttatgagagtgcctggattcaaatcccacctcagcatatattcagttctgtccttgggaaaattacttaatttctctgagatttcattttgttttctgtaaattaggatattagtacctaccttaaaaagttttgagaagattaatttatatgatccctgtgaaggacttagagtaatttctggcacacagttaagtctttataaaatggtgattattgttgctggctaccttgacacaggctacaaatttggcagtagcttttattctgacgtgtctaataactctgttctcttgctgcctttctctatgtgcactataatgaaacattttctaagagcattttctaggtactattctcagtttccttatcctcctttaactttgcttttaaattgtttgtaaaaataccttattggttactaccaaactctttgctattttttcttccctttctgatacttttagttaattatctttatctggttttccctttggtgcctctctctcttagaaaaatgattatacctaatgtctaatcatctctctttttctgaagtttttcacgtcctattatttttcatattcttgccagttcacatctttctgtcccaatttttagtgtaaccaaattatattctgcttagtatgggttagtcgcactataaattctaacattatcttactgacttccccagtgtataatgatatgtataacatctatatctacttacatgtagtagtaaaaaagataatgcatacatactaatatttcattgtttagctaaggagaaaatcgatctcccatactataaactcccttggtatatagtatagttatcaagcaggccatagataaatttttataggcttttttttttttgcttatttaaactttcttagtagtaatarcactttttaaatgtcctacaagaggaatattggtgatatgaaggctgtgcatatgtgaggataagggtatattggaagtctctgcaccttactttcaattttgctgtgaatctaaagctgctttaaaataataaagttcttttttcaaaaaaagtcccacaaggtatactataaaaggatttcagatgttccttttatattgccttctagctaaacagagtgtaatctgaaaggtttttttgcagaacagtctctaaagactttcatcttgtttacactgccagttggagcatttatgtggtaataacttggtactgtgaatttttttaaagaaattcttgtcaataatattcttcctctgaatagggtttgcatagagtgatgttttgcttatgcttacactgctttggctttacttaatatagtgagagaacccaaagtctttgctaatatcttaaatcctccaataatatcgctggtgacacgtgggaactcagtcaactacaaagttaaagagaacagtttacacaagactgccctcacttctgataccaattgtgagtttggggagggtcccccaaactacccttgggtttgataatttgctacgaggcctcccagaactcactgaaaattgttacactgatgattagggtttattacagggaaaggataataggttaaaatcagccaagggtctttttgactctctgagcagcaccatgacatttggcaagaacaagcaccttatgaaaggtgacaaatagggagcaaagaagtggttaatctactttctaaaaaagatagatatgatatgaaagcacgtgctgtgttcagtataagaaatattggagagaaacactagtcaccaggactcaaggaaccaaaattatatctgatggcctcaagtgttgtgtatatttgaagtgaacctttctgatctgcagaatgatgaaattgcattttaaaaattcaagctgactactgaggatgttgaggcgctaaacgacctaacttccattgcatggatcttacctgtgacaaaatgagttccatggccaaaaactggtagatcatgaaagaagctcatgttaatgtcaagaccactaatggttatttgcttcatctgttctgtgttggttttactaagaaacgcaatggtcaggtacagaagacctcttactctcagcaccaacaggtccgccaaatccgcaagaaagtgatgaaaatcatgatccaagaggttcagacaagtgacttgaaagaagtggtcaataaacattggaaaagataaagaaaaggcttgccagtctatttatcctctccatgcttgtccttgttagaaaagtaaaaatgctgaagatgcccaagtttgaactgggaaaaccagggagcttcatggtgaaggtagtagttctagaaaggctactggggatgtgacaggtgctaaggttatatgagctgatggatgtggaccacaaatccaagaatgtgtttaaaatttacgcttttggctgggtgcggtggctgacgcctgtaatcccagcactttgggaggctgaggtgggcagatcacgaggtcaggagttcgaaaccagcctaaccaacatggagaaaccccatctctactaaaaatacaaaattagctaggcgtggtggcacatgcctataatcccagctactcgggaggctgaggcaggagaatcgcttgaacccaggaggcagaggttgcggtgagacgagattgcaccattgcactccagcctgggcaacaagatcgaagctccgtctcaaaaaaaaaaattttaggcttttaatagtgacaaatagaaagttccatctgagaacaaaaatcagccaagggaagaarcacacagggcagagtctgggaaagataaccagaggcagagcttctgttgtcctttccatgtagagtcatggatgaattactttcctggcatagatgtgtaacaatacagagtatttctagccaaagaagctcaccagaaccctggtgcccagagtttttactggggttcaatcacatcctgctcccgtagtgacctctagttcccagctcttctggaagcagaactgacagcacatggcccaagcccctatcataagtcacattgtccagtggctaaagcgccaggcaaacaaagacactcctatcaggcatgatattgcacaggtctataggtcacctcctagtaacccagggcaatgccctctcttctggggtaaaattaattcctcacaacacaaggcaccgtccacaaatttagtaacatatttctgaagattctggtgctttacacgagtctgtgctctgagcatatgtggaaactttctacaagaaaatgtacatttctgttcaataaagtggtaagctttcattataatttccactattactgccttaataaatatatctttctctcttcatttctttttgcttaccaaccctttttccctgtcctgtactttctattttaaattaattcagttttaaagaatgcttaatgtaagataccttatgttttactgkttttttttctgtcaaataaaaacaatttatggcttattttttcttactttgtgtccatatggcattttaatctactaaacactgtcagacattttgctgagattttaaagtcttaaagtctgaggaatgttttttccattttttttaagtagaaaaactgagccataaatttttttttttaagaccaagccaggcataggattagttttcttattctgcctaaattctgcaaatgggggtgtttaattgctgaaaacaaatttcattatgttcaagcctcaatcattttatgatcacaaggtacctgaaacaaagatcttacattaatagatatataagatgcttgtgtagggggtgtatttgattgtagatgtattttctacctcattacttcaatattctgctgtagcaaaatatatgaaatgctaccttgaatagaaatagttaaatttggacactaatattgctctttcctcgttattgttatattctgcactgctgtcttaggatgtcaaccatggattaactgaggtaagtttggtgtaataaagctcatgtttagagtaaaatatactccattttctcctgagtaatagaagagccaaagattcgtttttttggtgtggttaaaaaatgtaaataaatagatatatatgtatcattttttaaaatacagtctgtagagattatcttgtataacatttcagaagttttctgaagaaaatgaaattctgttaacattacacctatatgatgcctcaacaatatttgctttagaatagtttctgtcctcctcaagtcttccagtataaaatgtaatgtgtcctcagaatataaaaaagcaaacttttattttaaaatttagcaaatgcctacctaatgtggctgaaaacattttatattagagaagtaaaacaaacttcatttttaaaattgattaattgatactcagaatggtcacaaagttaaactttttgtatgattatctttctcacttctaatatataaagttctagcactttggtttaagtaatcaacaaccctagactacccttttaacacttgggaacattataatactttctttatccgttatagatgtcaggttttgctttratttgcattttgttggttgctatgtttttcccagcacttgaaccaatgaagcattttgagttagctttaaattatagctctaatattgtttgcttcctcattgtcaaatagaattagcacataaaattatgaaaacatagagttttgaagccaaagggtgctttggagatatctaaatctttttgaatttcagagaagtaaaattagtttttatgatcattagctaggcagtgccacaaatataggatggaggtaaaccttgtcacatgaaaaatactgaagagtgaatgtttagaatgtaataaaatacaatttagggagagcatgattaggacttaaaatatttaaactacgtacacttcccagcaggggcaaagcaaagactaaatgatgcatagtgatatatagaaatgcagattcaggctgggcacagtggctcacgcctgtaatcccagcactttgggaggccgaggtgggcggatcatgaggtcaggagttcaagactagcctggccaacctagtgaaaccccatctctactaaaaatacaaaaaattagccgggtgtggtgacaggcacctgtaatcccagctactcgggaggctgaggcaggagaatcgcttgaaccccagaggcgaaggttgccgtgagcctagatcgcaccattgcactccagccccggcatcagtgcaagactctgtatgggggaaaaaaaaatgcagattcagactataaagaactgtctaatcactaagaagtggattgttttagggtgtattaattcttcattagaagtctcatagcaggggctctgagtcagggcaggcacaaagatattgttttactgggtagatggtagaagtaggtcgtcctccaactacaagaatgtgtgactggcaattcataactctttatattttactgcactattaaaatacttagcaatcaatatattacctgccaggataagtaattgtctataaagtgtctaatgtctaataatgataataatagatcagttctcgtaactttaaaggctaacagaatagtaatactaatggtacttttttgtatattaagtaaatgaagagattattggactcataataattttgataccctaatgacattatactcaatatctgttaaatgaaggaatagacagattacttatcattagcctcagttgctgcagttgccctaacatgtaagaattggctatcgcatttaacataggagcccccaattttagaacaaatttgcaacctcattcactgagatttgcaattaacatatgctaagcaaaagatacttgcagtatatgattgtatagactctcaagtatacagtcgccccctaaaattgggaattgggttcattccaatgcctcatttaatttttaataattctgtaagcagcatgttttatttgtaattccagaaccacatgagtgaataaacaaagaatgtagtccactttataagaaatgtcagcatccacagtaagtatatcacaaatcaacttgtactaataagttaattttttatttccagttggcagatatccctgttacaatctgtacatatccatttgtatttgatgcccaagcaaaaactactctgttacagaccgatgcagtcttacagatgcaggtaaaatattatttgagagggtttttttttttaattgtttctttgatgtttctggacagtaaatatttgaaattttcctaggatcagtaatgaaggtacacaaagtactttgggtagctataaagaagactgctgcatgtgatatgtatattcttatgagaacatttataaaaaaaggttgcagtgaaaatggaataacttaacctataatcattttatatattaaaaattgtataagcctctttcattacagaaatattcaatctttataaaccgttttactagtttacttgataagatgttggtttgtttcaaaatcttgtttcattatatgtcccctttttatatgcttggtaagagatggaagtcactagaggtgagagatgttaaaagtaggaagcatttgatctcgttaggaagaagatgtgaaatttccttgaagaaagtttcaataataaggtattaaacatgttcctggggttggtcaccattatctcctattcctctttcttttccccttcctatcaccctttcccatccattttatgttgagagttctttcatttatagagaggattttttaaactaattcatattatgactttaaagggttacagtaagtttgctttatcatttgatcctgtaaataaaaaagattttgagctgcttcctctggtatagaatatctgactataccaactaaggattaaggaaaggatgaaaagaaagcttgaatatttaatagtctaaaaatattttaaaaaattaaaaaccttcaaatcttggtaaccatttttattctgttcaaataaatgcatttggtattctaaatatttttgtagtgttctatactaacagctagtaagccaattttttggaggtctttgttaaaacgataagttaataacttggtgattttaccatgggatattccattttagaacaagaactcagggagaaccataataaaagaacaaaagttttaaatggtaaaagtcaaatccttggttcgtgagcacataccatgatcacttagttaagtgaatttgtgtaatgcttccttagycagatcattccttattctttgttttttattttttatttttgagacggagtttcgctcttgtcgcccaggctgtagtgcagtggtacagtctcagctcactggaacctctgccttccaggttcaagtgattctcctgcctcagcctcctgagtagctgggattacaggcacacaccaccacgccctgctaattttgcatttttagtagagacaggatttcaccatgttggccaggctggtcttgaactcctgacctcaagtaatctgccctcattggcctcccgaagtgctgggattacaggcgtgagccactgcgcccagcctgttccttatactctttaaaggtttgtttttgctcctccctctttaccctcccctccagtgaatgttttttagaaaaaccaatgctcagatttatcagtattactaccgttctrtactggcttactctaatggtgttatgagttatacattatacattagtataaaaacattcaaaagggtactctttatgctcagtttattaagttttatgctgtacgggatactgttaggtgctatgttaattcagtagcataggaattatagaatacctgtaactaataggtagaggttagcttgtttcagtcacagtagctttattgtagcattgctgttaaaatgttaatcttttgttttccagatggctattgatcaggcccacaggcagaatgtctcctctctttttctcccagtgattgaatctgtgaatccctgcttaattctagtggtgcgtagagaaaatattgtaggagatgcaatggaagtccttaggaaaacaaagaacatagattacaagaagccactcaaggtaatttgacattttctgtggtataattgggacttttattcagaagctatgtttaaaattttcctatttgtttttagtgaatcttttaaacttaataaataaaattatatttattttaaactattaattgtagagtattagtaataaataacatgttctagggtctccagaatgtactttcatttctttacagtctatttggtgtttgcattgtgctattttaggttatatttgttggagaagatgctgtggatgcaggaggggtgcgcaaagaatttttcttgctcatcatgagggaattattggatcctaaatacggcatgtttaggtattatgaagattccaggctcatttggttttctgataaggtaaaatgtccaaccatctaaattacttctgtgtatayacccatgtatttatacctgtatgtatcaagttaattcagtaaataaggaattactactggatccctaacatataagatctgctttattacaatttgagaaattataaactttggacttggagttgtcaaaatacatttgatgcttaccacacattttaaattaacaaaataaattaagagatggttagccagaaaataatgttgactattccttctgctgatttcaatttgaggattgaataataatcaccagattaacttttctgttgggaaaaattaatttatcattagggatcattgatttatctaccttgtcatttagagcaggtcagcagactatagcccattaatctcaaagaaaaaaaaagtcacacccactcttttacctattgtccaaggctactttcatgctacaatagcagcggcagagtttaagtaattacaacagtgaccttatgtccaggaaaccccaaaatatttgccatctggttctttatagaaagtttgctgacccaatttagtgatcataagtgaaaaggatggatcagtttagtagaactcctgacttgaaagaaatttagatagaatagctattggttgtaaaaacctcaatgtaatatttaatcattctgcctggaggttggctgtcttgtgtaatgttagcagcttagtgcctagactctaattcatcaggggttgcaaaatggtgtgctactctaatatttctttttcatttattagcttggatacttctgtatagagaaatttcctcacgttttctgattccttagtagtgcaattcataggaaaggattctatttagttaccaatttttcaaaagaatgaattggttcattagcatagtccactggtaataattcattttttgtgttttgctttcaagtatcattaggtattcataggtttaaacatacttgatgtttttcaattcactgcagttattgtcttcattgatgctcatattgtcccatctttgttcaaggagagctcttaagkttggtgcccaagtccttttgaaacaacctatatactttttggtaccttccttgctaccttgtgtacttactatgacagaatgttccagacttatcttacacatttactgcctaacagtaccaacattaccaccaatattatgattactaaaatgttttaaattgtttttcagttctttttgtacaaagagtataccctaatatagatagacagccagataatatagttttgatataatttaaaattgttatactctattgttataccaccaagtgaatactcatttaagctaacttatttttagggattgcttgttcaaattcaatttagttttacaataatataaaatgcctacatagttccaaagtcaaatctacaaaataagatgtgttaaaagaagtcaagctccaccttgttttccccctcttcctatgggtgatcttttgaaaatgtatgggctatcctcctttaaatatatatatatatgtagatagcaatatattacataccaaagtaattttcctggttttgaccatggctatgtaagctgttaccactggagaaaactgagtgaagggtacatgggagttctttatattatttgtgcaatttaggtgtctttttttttttctttttttttgagactgagtctccctctgtcgcccaggctggagtacagtggcgcactctcggctcactgcaagctctgcctcccaggttcatgccattctcctgcctcagcctcccgagtagctgggactacaggcgcctgccaccatgcccggctaattttttttatatttttagtagagacggggtttcaccgtgttagccaggattgtctcgatctcctgaccttgtgatccacctgccttggccttccaaagtgctgggattacaggtgtgagccaccgcgcccggcctccaatttatgagtctttaagatattttaaaataagtatttttttggccgggcccagtggctcacacctctaatcccagctctttgggaggccaaggtggaggtcaggagtccaagaccagtctagccaacatgatgaaaccctgtctctactaaaaatacaaaaattagctgggcgtggtggtacatgcctgtaatcccagctactcggaaagctgaggcaggagaatcgcttgaacccaatagacggaggttgcagtgagccaaggtcgcgccactgcactccagcctggtgacaaaacgagactctctttagtcatgtttagctgtttggatagaggtaaggataagagcaacagttgattttaatcacgttttggttttaacaagtgaatgtaacacagaagggagtaaaaggcaagggagttattatagtgagggattatggaatttcagctttgtgtggacttggtttggacaaataaataaattgtgacggtggaattgtattgaggggctgagataagaagtcagaggtaatggttagttatggaatgcttgaaattgagatttggagggttgtagttgaatgtaagatataaccatgggtatgggcattgaggtgtggyggagaacaagattgttggaaacagacaggtccagaaactgagaggctagtgtgttgtatgcatttttttttgtctggatattgaagttgccaaaaacgatggcagaaatagtggtagagaaagaaagcataagatagtgccaaagtttgtgaatgaaggaattgtggaaggttttttatacaactgcccaaggaacagttgcagggaatatggtcagttggcccgtgtttcagaggagttggaaattttaggatggcaaatggaaagaagtctagaaacacagaagagcaagagcaaggagacctaccttagctctagacgcaatcatatgaaggattgaaaagtgacaccatttgtgagagctgcagaggaaatggtgtcctcaggagacagtcttgtttccttagacaaaaaggggaaaaaatttggagtttaggatacaagcagttttccaaatggtagattgtgagttccagaacaaacagtgaaagggtttggtggagcaaggacagtcataaaattgtgtcagacttgagggcatcccacaatgccatatggatgtgggtttagggataacctatgagtttcgaggctttgtatttgttctgtaaacaggcatataagacatgatggagttagtcctaatggcctctgaggtaagtggacaatctgctcaaatcctagcctccttcctggcactggtctctttataaatagggaagtttgtagtggtgtagcaggtagaatttgagagggcatatgaggttgggggctgtgctgctagaaacacagagttctgtctgccctttagtcagttttaaagagataatgttttgagacaaagggaggggcagttgtaataagctttatcatgaatctctttgggacctttcaagttctatctcaccttggctggtgagagccccttggagccggctctactctttggtgtacttctgacatatccccattattcttcaagcatttccttacatttggtacggtaaacattccaggtttatcttgtgttttctccaccccagccatggcattagcatttttcttaagagccgtgtcttctttaagtggaaaatggtatttagaaatcaagctctgggtgctaagtgtagtacttcttgcttccggagagtcagtagttctactgggttctttcagctgatagaaataggatctgtatgtgtgtatacacacatgcatccatagacttatctatatttagagctgtatatatgttgaagaccgtgaaatcaaactgatacttctaattctatccaaacaccaaagaatttactctagccttcttcctttccatattatgtatataactttcatcatcaatgagaaaccttactgccataatctttaagatatttacttaaatctcccctgtagggctgggtgtggtggctcatgcctgtaatcccagcactttgggaggccgaggtggttggatcacctgaggtcaggagttcaaaaccagcctggccaacatggtgaaaccctgtctctactaaaaatacaaaaattagctgggcatggtggaatgcatctgtaatcctagctacttaggaggctgaggcaggagaatcacttgaacctggatggcggaggttgcagtgagccgagatcatgccactgcactccagcctggggacagagcaagactgtgtctcaaaaaaaaaaaaatctcccctgtatgtatccatggagtcttcaggctgcactggtcaaaagctcaacctcagacatactggaccaccctctcagagaaggtataatagtaggatgttacctgtggatttttcccaaattccctttatggtgttaaggaaattcccttctgtccctagtttgttcagcatttttatcataaaagaatattggagatactcttttgtgtaatggttttccttttttgttgttttttgttttgttttttgtttttttgattgatggagtcttgctctatcctccaggctggagtgcagtggcacaatctcagcttactgcaaactccaccttccaggttcaagcgattctcttgcctcagcctcccaagtagctgagattacaggtgtgcgccaccatacctggctagttttttatattgttggtagagacgaggtttcaccatgttggccaggctggtctcaaactactgacctcaagtgatccacctgcctcagccactcaaagtgctggcgtgagccaccgcgcccagctatgtgatgcttttttacattagtagagattaccatgtggtttgtttcattctgttaatatggtacattatgctggttgattttcttatgttgaatcacccttgcattcctggggtaaatcccacttggtaatagtgtataatccttttaataggctacttgattgaggttgctattattttgttgacaattttcacatctatagtcataagggatattggtttgtagggttggatttttgtttgttactgtttttttgttttggggtgcgtgtgcaaggtccttttctggtattttgatagtgatgatctcatagaatgatttaggaaatattccctctgctgtgatcttttggaagagtttgagaattggtgttaattctcctttaaatgtttggtagaatctgatccttggcttttctttgttggaagatttttattatttttattttttattttttttgagacagagtctcactttgtcaccccagctggagtgcagtggcacgatctcagctcactgcaacctccgcctcctgggttcaagcgattctcctgcctcagcctcccaagtagctgggactacaggtgcatgccaccatgcctggcttagtttttgtattttttgtatttttattttattttattttattttttagtagaaacggggtttcactgtgttagccaggatgatctcgatttcctgaccttgtgatccatcctcctcggcctcccaaagtgctgggattacaggcgtgagccaccgcgcctggccaacttttaattctttttaaaaattgtatttatttatttattttgagggtgtgagatagagtcttgctctgtcacccaggctggaatgcagtggcacagtctcggctcactgcaacctctgcctcccatgttcaagccattcttgtgcctcagcctcccaagtagctgggactataggtgcacctcaccatgcccagctagtttttgtatttttagtaaagacagtgttttggcatgttggccaggctggtcttgaactcctgacctcaggttattcccctacctcagcctcccaaagtgctgggattacaggtgtgagccaccatgcctggcctacttttagttctttagggaatctccacactgttttccatagtggttgtactagtttaccttcccaccaacagtgtagagtgttcccttttcaccacatccacgccaacatctactgtttttttatttttttattatggctatccttgtgggagtaaggtggtattgcattgtggttttgatttgcatttccctgatcattagtgatattgagcagtttttctttttttttctttttgccatttgtatatctacttttgagaattgtctattcatgtccttagcccactttttgatgggattgtttttttcttgctgaataattatctgagttccttgtagattctggattgtgtattatttttctattctctaatacatttatcactgctttaatatttagttttctccatctgctagctttgggtatagtttgttcttagttccttaggatataaacttaggttattgacttgagatcattcccttttttttagtttaagtgtttacaactattagtttccctctgaacactatttttgcatcctataagttgtagtatgctgtgttttcattagtctcttaagtattttctaatttcccttgtgatttcttctttgatcttttggttgtttaagagtgtattgtttagactgggcatggtggctcatgcctgtaatcccaccactttgggaggccaaggtgggcagatcaccaggtcaggaattcgagaccagcctggccaacatggtgaaaccccgtctctgctaaaaatacaaaaaaaaaaaaaaaaaaaaaaagagtgtattgtttaatttccatatgtttgtgaattttccagatttccttttgttatttctagtttcattccattatgatatgagaagataattttttatgattttagtctttttaaaatttattgaaagttttgtgacctaacatatggtctatcctagaagatgttccatgtacacttaaaaagaatgtttattctacttttattggatagagtattctatatatgtctgataggtcttattggtttataatgtagttcaggttctctatttccttattgatctttggattgttgtatacattaatgatagtgggatattaaagctaccagttattatcttagaactgtctatacctcgctttgattctgtcagcttttgccttatatattttggagctgtgttgttaggttcataactatttgtaattgttgtatcttcttgatgaattgaccctgttatcaatatttgtctcatatcaattttgcatcatattagtctgttttgtcttagtatagtttctctagctctcttttgttactatttacatggaataactgttttccacctatttctgtctttggacctaaagcaagacttgtatttttttaaagacttgttttgtggcctaacatatatggtccatccgtatgttgtagagaacaatgtgtattcttcagctgctggatgaaatgtcctataaatatctgttaaatccatttggtctgtagtgcagattaagtccaatgtttcttcattgattttctgttagaatgatctgtccagtgctgtaagtggagtgttgaagtctccagctattattgtattggggtctctckctctctctttagcggtaataatatttgcttcatatatctgggcagtccagtatgggtgcatatttatatttgtaattttgttttgttttgttttgagacagagtctcgccttgtcacccaggctggagtgcagtggctcaatcttgactcaatgcaacatctacctcccaggttcatactattctcttgcctcagcctcccgagtagctgggactacaggtgtgtgccaccatgcccagttaatttttgtatttttagtagagatgaggtttcaccatgttggccaggatggtctcgatctcttgacctcatgatccgcccacctcggcctcccaaagtgttgggattacaggtgtgagccactgcgtctggcctatatttgtaattgttatatcttcttgcttaattgacccctttatcattatataatgaccttctttgtcttcttctatagtttttgtcttgcatctgttttgtctaataccttgtattagacaaaatagttaacatttgcatggaatatctttttccatctctttattttcagtatatgtgtcttgacaagtgaagtgtgtttcttctaggcagcagatcattgggtcttgtgtgtgtgtgtgtgtgtgtgtgtgtgtgtgtgtgtgtgtgtgtgtgttttgtgttttatccatttacctagtctgtgtcttttgattggagagtttagtccatttatattgattgataaggagttactcttgcatcttttttttttttggacatagggtcttgctctgtcacccaggctagaatgcagtggtgtgatcacaactcactgaagcctctcctggattccagtgatcctcccacttcagccaccaagcagctaggactataggcacgtgccaccatgcctggccaatttttatattttgtatagagatggagtttcaccatgttgcccaggctggtctcaaattcctgggctcaagtgatctgcctacctccgcctcactaagtgctatgtaagccagcagtgtccagctattcctgccatttttaaatgtgttctggttgttttttgcccttccttcctccttcttccttccttccttccttcctattccattcctttttgtgaaagtgacttttctctggtggtatgttttgatttctttttttttatttttcgtgtatctgtcgtatgttttttgatttgagtttaccatgaggcttgcaaatagcttataacccaatattgtaaacaccaattacataaactaacatgcaaagagaaaactaataaaarctttatgctttaactgtgttcccctggtttttaactttgtgttgtttctgtttattttactacactatgtcttgtagctgtagttattatttttttattggttcatgttttagtctttatactcaagatatgggtagtttatacaccacaattagagtgtcataatattctgtttttctgtgtatttactattaccagtgagttttgctccttcacatgatattgctcattaaagttcttttctttcagactgaagaactcaatttagtttttcttcttgaacaggtctcatgttgataaaatccctcagcttttatttttctgggaagatctttatttgtccttcatgtttgaaggatatcttcactggatatacatactattctaggataaaagttttttccttcagcactgtaaatatgtcatgccattctcctggcctgtaaggtttccattgaaaagtctactgctagatgtactggagctccactgtatgttgtttcttttctcttgctgctttcaggatcctttctttatccttgacctttgggagtttgattattaaatatcttgaagtagtcttatttgggctaaatttgctctgtattctgtaaccttcttgtacttgagtattgatacctttccctaggtttgggatgttcactgttattatctctttgaacaaactttccatcccatttctttctctaccccctctttaaggccaataactcttagatttgcccttttgaggcgattctctagatcttgtaggagtgcttcattctttcttgttttttcttttggctcctctgattgtgtactttgaaatagcctgtcttcaagctcactaatcgcttctttttcttggtcagttccactgttgacagacactgatgcattattcttcagcatgtcagttgcatttttcaactctagaatttctgcttctttttattttactctgttaaatttatctgataggattctgagtaccttttctgtgttatcttggatttctttttcctcaaaacagctattttgaattctctgtctgactgaaaggtcatatatctcagtctctccatgattggtcactggtgccttatttagttcgtttggtgaggtcatgttttcctgggtggttgtgatgtttgtggatgttcattggtgtctgggcactgaagagttaggtatttattgtagtcttcacagtctggttttatttgtactcatccttcttaggaaggccttccaggtatttagagggacttgggtgttgtaatctaagtttttggtcattgcagccatatctgcattagggggcaccccaagcccaatatcactgtgtctcttgcaaactaagaggtactatcctggtcttggataagatttggaagaatcctctggattatcaggcagagactcttattctctttcctcactttttcccagagtctttctatgctgagctctctggagctgggggaggggtgacaccagccagcacctttgtagacaccactactgggactgcactgggtcagacctgaagccagcacagcactgggtctcacctaaggctcatggtaaccactgcctggctactgcctttgtttgcttaaggccctagggctctgcagtcagcaggtggtgaagccagcgaagcttgtgttcttcccttcagtgcagagagttcccctcagtcccagttgggtccagaaatgctgtctgagagccagggcttggagtcagaaaccttaaggaacctacctggtgctctgttctactgtggccgtgctggcatccaagccacaaggcaaaattgttcccactctacaggccccatccatagaataattaggtggggacctgtcaaaggagaatcctcaaatgtcagcatatgttggtttttttatcctttgggttttcaagaaaggttgtaaccctgggtgtctgtgttttagtagtgttctggaccctggaaagggaagctaggattctccttgttcactgtacagaccttcatttgatccctttgttttcagtgcagcaccctaactatcagctgtctcagattccagaccctctggttcaggctctccaaaaaggcaaaggactttccaccaagcatcctagtttcaaccccactctaatacctccgccttttagagtctttatgtttaccagctgagctaactgggctacctctgatattgcgggtattggtacgtccagttcctgagcctgtagcacaaattagctgtaagttactatttcaattttttctgctttaccaattcagttaccagccatttgtctacttttcatattttgaaatgttattaacatctctttattgctcttacctcccttattctcttttttcctgtggacttataccatttttcctccttctcttttagagggttttaggagggggaaagatttaacacattaatcagtctgctctatttaagaactttataaacttaaacagaattaagacataacagcacagaaagattaatttgaccactgaaaactgttacatttatgcatagcagaaaacataaaattgaaaagcatgtaacaggctgggttgtatgtaacaaatatgacacagagtaatactcctaatatatgaagaattcaaatacaaatacttaagaaaaacattatcccccaaaagataagtgggcaaagtacctggagagatatttcatgagcacatatgtatctctgattttcagtatcacaaatagtcagaaatgtgtactaaagcaagttgtcattttaaactcaaaagaaaaatgtgtttgtgtgtgcatagagtatatatacagatgaaaacgtgaagagtagagcattttcctggactgcaaatggcagtttaaactggaacaggagctggcgcagtatctcacgcctgtaatctcagcactttgggaggccgaggcgggtggatcacctgaggtcaggggttcgagaccagcctgaccaacatggagaaaccccatttctactgaaaatacaaaattagccaggcatggtggctcatgcctgtaatcccagctacccgggaggctgagccaggagaatcacttgaacccaggaggtggaggttgccgtgagccaagatcgcgtcattgcactccagcctgggcaacaagagtgaaactccatctcaaaaacaaacaaacaaacaaactggaacgggggtagaggaaaacagattagcaatatgcttgactgtcttttgacttatgaattcttccttaggaagtagaatttctcctagggaaatatttcaaactatggacaaaaatatgcaaaaagatgtccatcttatttttaatactactagctaggaagaataactgacatttattgaacctttagtgtgtgtttcaagaactgtgctaaaagtgtttaacgtatattatcccatgtaatcctcacaacaaccatatgagataaatactatatttaccttctttgaaaacacagaggctagactgctaaaccaggctggagcccaggtcttatttaaaacatttattctttaaccatcatgctcacaattttctgtaaatacatattacttttataaagatgagggaaaaaaataaacattttcagtgtgtcagtagtgtaagtatgtttcagttatctaagcatccaaggagagtaaaacagctaaatttagcaactcattgtacttttatgatacaatatgcagccattaaaaagtcatgttttggccaggcacggtggctcacgcctgtaatcccagcactttgggaggctgacgtgagcagatcacctgaggtcaggagtttgagatcagcctgaccaatatggtgaaacccagtctctactaaaaatacaaaaattagcctggctgtggtggtgtgtgcctgaggcaggagaatctcttgaacccaggaggcatacgttgcagtgagcagagatcacaccactgcactccatcctgggtgacagagggagactttatctcaaaaaaaaaaaaaaaaaaaaaaaaaaagttgtgttttagaagaacatttartgacataatactcatgtaattagaaaatgagataaaatcttaaatacggtgtattaaaaatatttttctgagcttattataggtggaaatacacaaaatatttttaatcattattcctgagtgattggtttacaggtgtttattcattttcttttctatgttttttctttgttttccaaatttcraatgtgtattactttttaaatcagaaaaaaagttatagtaattatttcacctattaacttaatgtcgaatgacatgaatatgcttatgtctgggaaaaaacagttgtaaagtcgtatgtatagtacgatttcagctagatatattttttttaagtctgagaaaatatgctacatggaaatgtacaaaaatactaacagtgatgttatcccagggagacagtaatgaggatgaacttttgttatttattacttttttctctatcttcaaaattgtatatgagcatatttatgtaatcttagaaaatttaatattttaacttggaggacatgtgtttactttttcttatatttttagacatttgaagacagtgatttgttccatttgattggtgttatctgtggcttagcaatttataattgtaccattgtggacctccattttcctttggctttatataagaaactactgaaaaagaagccatccttggatgatttgaaagaactaatgcctgatgttgggaggttagttggaaaaaaaagtcaaaaagtagtagggtttgggaggtaaaaagtggggaaggtacagaaagctttccttctatgaaaaaatatattttgttcttcttgttaaatttctgaagtaaacaaatgcccttctaataaaggaaaatccattatgtttctcagatcaaaattttctattgaaagactaaatttggctggcccagtggcccacacctgtaatcctagcattttgggagaccgaggcaggtggatcacctgaggtcaggagtttgagaccagcgtggaggtcaggagttcgagactagtatgaccaacatggcgaaaccccatctatactaaaatacaaaaattagccaggcgtggtggcccacgcctgtagtcccagctattcaggaggctgaggcaggagaattgcttgaacccaggaggcggaggttgcagtgagcccagattgcgccatttcactccagcctgggtgacagagcaagactccatctcaaaaaaaaaagaaagactaaatttttagttgtttgacaataccttgcaaatatcagataatcaccttaggaaagtaaattttttttctgagagtggttaaatgatttatttggacttttacttctgataaccttcattcctagtttgaatatgtgaaatttatttttattaaataaaatgcattaaaaattttatataagttaggacaaatgggccaggtgcggtggctcacgcctgtaatcctagcactttgggaggccaaggtgggcagatcacgaggtcaggagttcgagaccagcctggccaacatggtgaaacctggtctctactaaaaatacaaaaattagccgggcatggtggcggtcgcctgtaatcccagctgctctggctgaggcaggagaattgcttttaaaaacccagggggcagaggttgcagtgagccaaaatcatgccactgcacttcagcctgggcgacagagcaagactccatctcgggaaaaataaaataaaataaaataaggaaaaatgttgaaaatagttggatacatggcctttgtattcagaaaagtgataagaaccttttactaatttttttccttaagcatcatttataagtttgccattgtgtattcactattctgaaacaaatataaaattacaaattgacaaaaggattttaccaagagggaatgagaagtatatatatatatatatatccataagtaaaatagtcaaaatatccaataattttttcctctcagaaacatatatattattttgcagaagcatgcaacagttactggattatccagaagatgacatagaggaaacattttgtcttaattttacggtaagatggaaggacataggttagcctgattatttatcatctcttttatttaacagccgtgtcttagggtttttctttattttgatggatggaattcttaaagaaccctttagctaacatttattgagcatttactacatgctagctagtcatagtacatgcatttcatttaatcctcagcaatccagtgaggttgggattatccctggtttacagatgaagaacactgaaaacagtcattaccttggggagtcagtatgcataccagcctctgtgacttaaacctgtgtactttatcattatgctaaagatattgacaaatacaagacatcctctttacccaagtgttcatttttgagtctgcaattacagaagtgctttagagaagcaaaaggttattgtaatatgagaatattactactaaacttaaaaacattaatttccactggtacattcctttctatttcatactaacattcatccttgcccatcttgtcttattcactgttggatgatgtagataaaacaaatgcaaatgcattgcaatattatttggaaaatgaaattgcaaatcttgtaaaagatgcacaatttcattaaggcagcaaagggatgtggttttttttgttttgttttgtttttttgagacagagtcttgctctgttacccaggctggggtgcagtgacgtgatctcaactcactgcaacctttgcctcccaggttcaagcgattctcctgcctcagcctcctgagtagctgggattacaggtgcctgccaccacacccagctaatttttgtatttttagtagagacggggtttcaccaccttggccaggctggtctcgaactcctgacctcatgatccacccgcctcggcctcccaaagtgctggcattacaggcatgagccactgcacctggccaaaagggatgttaaataactgatccagtcacatgcaaagccattgatagatgaggatatggcagaagtagactagttggtaattaaataagagaaaatccataagtattacggtaaggcactccagaagggaacaatttgaatattataaattagactcttggagaaattgtaaaaccttcagttttcttttcccttttcttttctttttttttttctttttttttgagacagaatcttgctctgcccagtctggagtgcagttgtgcaatctcggctcattgcaacctccgcctcccaggttcaagcaattctcctgcctcagcctcccgagtagctgggactacaggtgcacaccaccatacccagctaatttttgtatttttagtagagatgaggtttcaccatgttggccaggatggtcccaatctcttgacctcgtgatctgcccgcgttagcctcccaaagtgctgggattacaggcgtgagccacagcacctggcctcttttttattttttaaattttttgcttgtatatttgtttgccaccctgccacacacacaacattctctttatggttttgtcaaagctgacaaaagatgccatattctgctgtcataaaatttgccaaaaaaaattgcatgttcataattttttcaagaaaattttaagactgttttctgtccgggcacagtggctcacgtctgtaatcccagcacttttggagcccaaggcgggcagatcactggaggtcaggagttagagacaagcctggccaacatggtgaaaccccgtctctactaaagatacaaaaatgagccaggcatggtggcacgtacctgtagtaccagctactcggggaggctgaggcaggagaatcacttgaacctgagaggtggaggttgcagtgagctgagatcacgccattgtactgcagcctgggtgacacagtgagactccatctcaaaaaaaaaaaaaaaaagttgctctccacaaatccagataacaacagaaaagcattttccaaagtgtgttcctgttagaataaggtgaccataaaattaaaaaaaacaaaaacaaaaacgattttctatgaaattttggttcttttttatttgattcactcatacccttgttagtttcttgaatttttattgatcatctcagttgactaaaaaattaagtttcaagctgtttaatttctaatttatcagtcaccaaatttgtgaattcttactatattcaaagaactatggtaattcaaacatttcttcccactgccatttctttctcagagatttttcagtggctctttattgcttgtagaataatagctttagaatgggtgtcaaagacatttttaaactggccctctcctttcattgtatccctcccttcataccaagttttgtcatatcacacagtattttttttaatataccttaccttcctctttttcagagccacttgccatacattttcagaaacttggtatttattgtaatatctaattttttgttcaattgatattctctgtctgaaatctcactctcttcttaatctttcaaaatactacccctacttgtaggtgcttttcagatggcatttcttcctcaagttctttcacacttcctctagtttagaattctgtttgcattcctctatgatctgataacattttattcatctctgtcttataaatgcattattttattataattagttcttcatatgttacatttctcttcctttactagatagtaaacatcacagcaggaatatactcatctaacatcccactcccatcatagtattttataaatagcaggttttcataaaagaggataatattccaaaaagaaggagtagcaaaagaaaagatgcataagtgggaatggtaatatttttagaaaaattccagaagtaaaagaaataaaaggtttcaaaataactgcctatctttataaaccaaattagtacataactggaaaaactgtctgtgataaagtttacaacaagggtgatagaggaaccctggagtagcagttgtcatgtgggaagaatgcatggttttctaagctgaatagcattctcatacttggattttatcactcgtctaaggaaaacatcctgtctaatattttatagtaacaattctaaagttttatgcacaacaaatgcttagtttccttattaacttaccaaacttggtaatttgtaattaatcatggtaggatttcaaactagagagtaccaaatttctagttctggctttaagtagaattctcasataagctatatggtagcagaattttatmtcaaatttagtagttttttttaattaaatgagagaaaggtagaatataataatagattattataagttttgagtctgacattgactttttttaaaaatttaaattaatagatcacagttgaaaactttggtgcaacagaagtgaaagagctggttctaaatggtgcmgacacagctgttaacaaacaaaatcggtaagtgaattttagcagcaacagtgggagtaataagattcagtagacattttcttctgtacgtagaaaacgtgtcacaaccctaagcttttactccaataaaactttaattttgagtggttagtgaggaaataatctgccttttcctcctgaaatcccttgaagacattaaaacaaagagaagggagaagtgacagcagcaaacatttttggaagccaggaaacagtagtaactaacttaagcaaaccagagaaagctacaacatgagatggaaaagaggagtcacgaagccagctggatcacttcacaaaacaaaagtttgggtgctgagaataaaacatacctttagaaaatgcatggtgtttggggaaatgctagaactcttataagaagcagttagaaactagtttcccatgctaacattggatttaaaacaacaacagaagaaattagtttcccttagcacaccaggaatctggcaactgcccctctctggcctgggcaggagattggaaatttaccttctggagaaattgaactaaagagactgtgggtttgaggacacctggacactgccacaggtaaggagctgaactgaaaacagggagattaagtgctgaaagtctatagctccctccttcttggtaccgtatagtgaaagatccttttctggggaaactgcctaacatttaaaatgtaaatccataggccccgcacagtgactcacacctgcaatcccagcactctgggaggccgaggcgggcggatcacgaggtcacgacaacgagaccatcctggctaatgcagtgaaaccccatctctactaaaaatacagaaaattagccaggtgtggtggaatgtgcctgtagttccagctactcgggaggctgaggcagaagagtctcttgaacccaggatgcagagtttgcagtgagccgagattgtgccactgcgctccagcctgggcgacagagcgagactccgtctcaaaaaaaaaaaaaaaatgtaaatcgatagccaaaggtcaacagacatttaaggaaaggccaaaacagtcaaaaagaatggcaagaaaccaggaaccatgcaggttgaaggacaaaacttcagaggaaaccgaaatcagtatcctcagaatgatgcgtgacatccagatgcatacaattaaaaatggaaaaaaaaaaaactcatttgaaagaattggaatgaatgaaatctgtcaaagaaaatattaaaaaaaaaaaaacttcccagaaacgaatgacatcttttcaagattgaaagcacgagaagtggaaaaaagatcaataccaagacaagatacatgaaatttcaaaattttcagtcaaagggaccctaaaactgtccagaaaacccacagacctaagaatcagtaacatcagacactggaatcaaggaacactggaagctagaagaccaaaattttgggagaaaattacttttaacttagaattctgtatccaaattatcaaatgtgtgtgtttaaaaacatttttatacatgcacagtctcagagagtttacttctgatgcctttttctcaggaagttactggaggatgtgttctgtctaccaaaacaaggaattaaaccaagaaagaggaagacacaggattaaaaaaacaaccaccaccaccaccaggattcaaacaagcaaagattctttctgaaggatcaataactgtgtcgatttagaaataacaacttgggttagatcaagaggatggagggctcaaggagagaaataaatatctagtattttgaatgaatctagaggaaatggatatttcttttggagaagttggcgatgaattagcaaactaaagaaaacagaagttctttttaagagaaaaagggtaaccatagaatacagcttaactgtgaataatatagaaatgttaacaaatattgaaccaaaaattgttatataaatataatagatgtacaggggagtagaaagtgaatgggacaattacattaaagattaatccaaagcaaattgaaatttaaggaataacaatagaactgtgttgttagaagcttgaatataaatatcagaaggaatagcaaaaagagttaaatagttgccttttaatagcgggaatttctggcagagaagtgcaggacagagttgctttgttctcttctattttgttacaattctttaatagtggctgttgccagggagttggtccaaaggattataatcctaattccgctacttagatgctttataactttaaataaattagttgatgtctcaatgcctcagtgtccttctctgttaaatggaatgacaaattatacttacttcatggggttgagaactagatgagacaatattttaagatacttagaataagaactagcacatgtagtgctcagtaaatgttggctattaggattgttactatttgatgttttaaactcttgatatgtcttactttgataaaaataaagctgtttttaaaatgatgtgaaaaaattttaggtccttctagatatccttgttttaaaaaaaaacttggttctgaaaggcaacttaccattattcctattgcagaatcatcctttattacttggaagacaaagatataaaatagtgaaatcttctagtatccattctcattatttgaccagatagcatcataaaatgttgtggctagcaaaacaaaacagattgaataagattgtggttcaaattcaggggttaaaggggcttctttttttctttacagtttcgttttgtatcataagagatagaagagaatcagaagtgattgtatatgtattcacacgtacatttgaaaagaaactacacttgtactctttaatgattatcctaaaagaatgcttagtaccctctcttaggcatttgttaaagtaaattttgttcagatkccttggaacccaaggaaaagaaggctatagttggtcaaatgatctgaatccaaagctctcatttttttgtcacctattgtttgtaacagacattccttttagggatgcatgtgacatgatatatataaattctcaataacttgtaaatattttaaaattattttcatagccatttgcatcattctgcccattaggaaatgacattttttccattaggaatagcctaagaataactgaatgcctcatggatacagctgatttttatatagaaagaataatagctttttccatagtgactttggttttgtcctgtttgaacgctactcatacattctcagtttcgtagatatgtagcagaaattgtaggagcacttgaagttttaatgactacattatggattcttcatacatgatttttataatctgtacatgtgtgctttttcatttctaggcaagagtttgtcgatgcttatgtggattacatattcaataaatcagtggcttccttatttgatgcttttcatgcgggctttcataaggtctgtggaggaaaagtccttctgctctttcagcctaatgaactacaagcaatggtcattggaaatacaaattatgattggaaggaactggaaaaggtaggggaaaactaatctctgatrttgttaaatggaaagatttatatatggaaatcttgcctttttatgtattattttttattttatacactttattactaccattttacaggaaagcactctacccttcaaactccacaatgaatggatttgaacggtatatgaattagacactattataattggtggtattgatatagaaaactcatctggccaggcacagtggctctcacctataaccccagcactttggggtgcttaggcgggaggatcacttgaggccaggagttcaacagcagcctggggagcacagcaagacctgatctctaaaaataacttaggccaggcgtggtggcttacacctgtaaccccaggactttgggaggccaaggtggatggatcacgtgaggtcaggtgttcaagaccagcctggccaacatggtgaaacctgtctctactaaaaatacaaaaattagctgggtgtggtggcacgtgcctgtaatcccagctactcaggaggctgaggcaggagagtctcttgaacctgggaggcggaggttgcagtgagctgagattgtgccactgcattccaccctgggcagcagagcaaggctctgtctcaaaaacaaaaaataagtaaataaaagtagataaaaataattttaaaaattagccagatgtggtagcaaacacctgtggtcctacctgtgggaggctgcagtgggagaatctcttgatcccaggtggttgaggctgtagtgagccatgattataccactgcacttgaccctggatgacagagcaggagcctgtctgtctcaaaagaaaacaaaaatgtcatctgtgacacagctagatagaagccctaaccaagccaggcgcgatggctcatgcctgtaatcccagcactttgggaggccaaggtgggcggatcacctgaggtcaggagttccaggccagccttgccaacatggtgaaacctcgtctctactaaaaatacaaaaattaatcgggygtggtggcacacacctgtaatcccagctacttgggaggctgagacaggagaattgcttgaacctgggaagcggaggttgcagtgagccaagatcgcgccactgcactctccaaaaaaaagccctagccaaagctgaatgggttttcgttctgcctcagtcttaggaaaaccatcatgaaatgcagttatgatttttaaaaatctttgtttcctttttttctgattagtctcagtgttacattttttagcagagtaattatcaaatattgattctgataaacatttaatagaaagtgctggccctgtgtggtggctcatgcctgtaatgccagcactttgggacaccgaggcgggcggatcacgaggttaagagatcgagaccatcctggccaaccaacatagtgaaaccccgtctctactaaatatacaaaaatttgggcatagtgtcgcacgcctatagtcccaactatcgagaggctgaggcaggagaatcgcttgaacccgggaagcggagggttcaagtcagtgagattgcgccactgcactccagcccaggcaacagagcaagactccatctcaaaaagaaagaaagtgctaggttaagccaggcatggtgtctcatgcctgtaatcccagcacttggggaggctgaggcaggcagatcacttgaggccaggagttggagaccagcctggccaacatggtgaaaccccatccctactaaaaatacaaaaattagccaggtgtggtggcacactcctgtaataccagctacttgggaggctgagacacaagaatcacttgaacctgggaggcagagtgacagaaagtgcaaggttagatcagctttgaggaagatatatgtgaaattaatctgctgattttctatctttctaatataccatcctctgatttatgcatttataattagttagatactgtatacctattaagatgactaacataaaaaaacagagcagcacttaccactctactttttatgtcagtcatattaataggtgcaaagcatcaggaacatttatatgttgccgatggggatacaaagtggtatagtcactttggaaacagtggctgtttcttaaaaagttaaacatacatttgctatatgacctagcagtcctactcccaggtattaaattatattcacacaaaaatctgtaaaccaaggggacagagtttcagttttactagatgaaatgaattctggagatggttggtggtacaaccatgtgaatgtagttaatgctactgaagtgtacacttaaaatggttaagatacaaactttatggtatgtgtgttttgccttaatttttaaagacttttttttttaatttgcaaatgagtgaaaaactggaaacaacttagatgtgcttcagtgggtgaatgggtaaacctactacagtatacctattcagcagaataactactaagtgttaaaaggaaatgcacagctgggccgggcgcggtggctcacgcctgtaatcccagcactttgggaggccgaggcgggcagatcacctgaggttgggagttcaagaccaccctgaccaacatggagaaaccccatctctactaaaaatacaaaattagctgggtgtggtgcctgtaatcccagctgctcgggaggctgaggcaggagaatcgcttgaacctaggaggcagaggttgcagtgagccggagatcgtgccgttgcactccagcctgggcaacaagagtgaaactccatctcaaaaaaaaaatgcrcagctgggtgtggtgtctcacacctctaatcctggcactttgggaggctgaggttggcagatagtttgaacccaggagttcaagaccagcctggacaacatgataaaaccctgtctctacaaaaaatacaaaaattggccctttatggtggcgtgcaccagtagtcccagctactcgggaggctgaggtgggaggatcccttgagcccgggaggtagaggctgcagtgagccctgactgcactctgtcataggcagcaaagcaagaccctgtctcaaaaaagaaaaaaaagcactattgatacatgcaacaactggatgaatctgaggctttatgctgagtgaaagaagccagtttcaaatggttgcatactgtatggctccatttatgtgacattcttgaaaagacaaaaaattatagtgaatagagacaaggggttgagtgggagggtgtgacttcagaggaggtagcacaagaggcatctaagagcataacagtgatgggactgctcagtatcctaattgtggcagtggttacacagatctgcacatgtgcttagaacttacagaactgtatacaccccagaatatagccagttttactgtgtagtaatttaaggaataagattttaagaataattaggacttctagttaaacattatggaataaacatgtctgctccctcccaaaaatatcactagaatgacagaaatggaataaaaatagaaatataaaataaaaataccaaaaaataaaaatgcaatgaacaagagaagaaatagttttggaagacagaaagtaaggagataaattgatgagtgacttagagcagaggaaaattgaattctaagcctccagagggacaggattgtcaggaggcaactctttttttttttgagatggagtcttgctctgtcgcccaggctggagtgcagtggctcaatcttggctcactgcagcctccgcctcccaagttcaagcgattcttctgcctcagcctcccgagtagctggaactacagacatgccactattcccggctgatttttttatttttttagtagagatggggtttcgccatattgggcaggctggtcttgaactcctgacctcatgatccactcgcctcggcctcccaaagtgctgggattacaggtgtgagccaccgctcctggcccgaggcaactcattttatatcctagaatctgaaaggctcaagaattggtataccatgttacccttaatggcagggatgaaggttggactaagggcaacagaattactttaaagccattttaaagaataattggaccatgcatgtcccctctcctacccagcaaaagacagcttgggagagaggctttacaatttgggaaacaaggtaacactgaggatgctacacagctggtagccaggtgtaaatccttcaggaaggagattgaaggttcttgtgtagtagtaaattgatcttctcaaaagaagaagcctgtagatactaactctaaggggtcccccagtggaaatggactccacctctaatcaccttaaaatgaaaatgatataacagcttctcatcaccctttagatcctacacaatttttccctccttgcctcatctcctgtcattgttcctctcactctgcctcagccttattaacctctgctgagcctagaaccctccaggcacactccagtcttagggcgtttgtttccttttccaagtgcctggaattctcttcccctgataatcacaaaagattcttgctctcacctcctttgtgtgtttataccttctcagagaccttccctggataactgatctaaaattgcaaacctctctcctgcacacgtatcctgtctcccctcgctgttttattttgcttctttggatttgacataattttacttaggttgctccttccccccaccacaatgtaagcaccatgagggcagaatttttgcctctttgttcactgctgtattcccagcacctaggagagcactcagtaagtacttgaaaccttgcctgaagtgataattgatttaagtgttcattcagttaagacaggacatcttaaaaagtatattgtagcggccgggcgcagtggctcatgcctgtaatcccagcactttgggaggctgaggcaggcggatcacgaggtcagaagatcaagaccatcctggccaacatagtgaaacccccgtctctactaaaaataygaaaattagctgggtgtggtggtgtaggcctgtaatcccagctactcgggaggctgaggcaggagaatcgcttgaacctgggaggcagaggttgcagtgagccaagatcgtgccactgtattccagcctggtgacagagcaagactctatctaaaaaaaaaaaaaaatataatatatatatatatatatatatatatatatatatatatatatatatggtgtatttattcttaacactttgatttcttctgttgtatatctgattcattacaattttagtgattatgatttggagctttaaatgttctttcttaatcaggacatgtgtgcacatttctaccaaaccatttagagatttaaaagaaaaaaaaactttagccatcctcttttcattccccactaacatgctcacagactttaattcaaacagttgaataaattccataaattccatgctagaattcaagctgttttcttcaaacttgtgtgcaactaacagcaaatattttgcatatttgaattattgagagttcagtgattaagataaatcatggctacaaataaggaaagtccaaaattcaagaagcccattagcaagtatttattgagcctctactgtgtgccggataatgtacagctgaaaccatgcaagagattgaagagagggcaggaaataagatagagacatggtctttgccctaataagagagctagaaattaaatgtttaatacacagttttaattaatacagtgaaaaagagtttagtgaatggtgcgtaaggaggagcctgatctaggctagatgaatctgggaacgcctcttactagacggtgagctccacaaggtaagtgaggattctgttcactgaggttttcccagggcccaaaacattgactaaaactcattatatatttgttggatgaatcaatgaatgaattagatggcatttaatctgagccctaaaagggtaaaaattagcctgatgaccaaagaagaaaggatgtgtctgagtggtgtaggctgagggaacagtatgtccaaaggacctgacgcatctgaagaactgaaagttaaagccractgcggctggataagaacagttcacagtataaactatttcctctctacttcctacctgcttctcttttagtactaatttttttgttgttttttttttttattttttattttttttattgagatggagtttcgctcttgttgaccaggctggagtgcaatggcacagtcttggctcactacaacctccgtctcccaagttcaagcgattctcctgccttagcctcccccaagtagccgggattacaggcgcctgccaccatgcccagctaatttttgtattttcagtagagatggggtttcaccatgttggccaggctggtctggaactcctgacctcaagtgatctgcccggcttggacacccaaagtgctgggattataggcgtgagccaccgcgcccggccagtactaatatttttgacaggggagatattttagtcctattgcagcaaattaccccaaaacttattggcttcaaaataacaatgaaactcttgtttcatagtttctgtgggtcaggaattcaggagtggcttagctgagtagtttgggctcagggttccctcatgaagttgcagtcagaatattggctggtgctataggcatctaaaagcatgattaaggatagagattcacttccaaggtggcttactcacatgactgttggcaggaggcctcagtatagcaccatgagtacttctctccatatagggatgtttgaatatcctcatgaaatgacaactggtttcccccagagtgagtgatccagaagaagggctgaagccatagaggtttttttttttatgatttagtctcagaagtcatacattcctcatattcacagtatccttatacacacgggcatgaataccaggaggcagtgctcactggtggccatcttggaaactacctcagaaaatttttagtgttgcttagtaccatatttttaaaaggagagataaattgtaatggtttgacttctgttcatgaatacagagraagggaattttctgattatcacagataattccatgtcagacttttgatggtcctataacattattttatctagtttctctttatttacttttgaagatgatagtatgatcctatcatgttctttgaagtgctaggaaagatttctggtgattcttacgtatttcttctttttctcctggaactaatagcttcaaattgtaaatgtccagaaaacagtgggcaatccattgaattgcacaagttgcaaactactggaccatgttagctttatgtgctaatatattagccagtgtgtcccttaatactaataaaasattatgttgtttttagaatacagaatacaaaggggaatattgggcagaacatcctacgataaaaattttttgggaagtatttcacgaattaccattggaaaagaagaaacagtttctgtgtaagtatttctaactagttgtatactttatgagactggaatctaattatagtattattccaaagccctgttttaatcttcaagtaatttttttgaaacagaactatctgcactcttcagtacatgtattttcttatttcaaaggctaaattcagtttgccttcaaaatagcattgattcattctatgaagtaaaatggaagctaacttggaaatgaaagcaaactatagctatgttatagttacaataaactgtggttacaataaactaggattgtagaattccttttagatttctaaaaagatctctggagtatagtcatcctttggcatacatgggggattgattccaagacctccctgccaaggatacccaaatccagtagatgctcaagtttcttgtataaattggcatagtatttgcatataacctacacatatccttatactttaaatcttctctagattacagtcatgtgccacataatgacttttcagtgaatgacagaccatatatacgatagtggtcctgtaagattataatacagctactgtaccttttctatgtttagatacacaaatacctactgttatgttacagttacctacagaattcagtacagtaacatgctgtacaggtttgtagcctaggagcaatagggctatatcatgtagcctaggtgtgtagtagactatatactgtctaggttgtgtaaatatatgatgtttacagaatgaaatcacctaatgatgcatttctcagaacatatcatcatcgttaagtgacacatgaatgtacatgttattaatacctcatacaatgtaaatgctatgtaaatagttgttatactgtattgttgagggaccaatgtcaagaaaaacagttgacacattcagtacagtcacaagcatccattttttgaaaatattttcgatttgcagtcggttcaatccatggatacagagctcacagatacggagggccaactgtattgctcttttctctgtttggtcttcattttctttttctttttctttttgcttcaagactaaaactttggcaatttctatataaaataaagctttttcaggccttagttccctcatttataactgatgcctgtgtatctttcttctgttaaagtctgtattctaattgaaatttgacttatttttaaagttgtcagaatttatgtgtccaaatcggtgacatttcctttgatactcctgcttttgccaggaatgatttggcaacctccgagaatcttggtcaaattcttctgtgtgtcataaggatgagaaatcattactctttaagagtgatttgagcctgggcaacatggcaaaacctcatctctataaaaattagccctgggcttggtgactgtgctcccagctactccagaagctgaggtagagaggattgcttgagcccaggaggtcgaggctgctgtgactgtgaccgcacactgcactccagcctgggcaactgagcaagactcgtctcaaaaaaaaaagaatgatttgaattttggctgcccattataaatttctgatttaaaaaaaataacagaaacgaagcaaatagaaaaagaaatcataatcaaaactgcattttgtatttggtttgtcaactagttctgaatggcttttccaaaaaagggctctcaaaatgttttggcaatggcaaaatactcacttatcaaacatttattaagcacttcctttgtgccagtattaagattatacttttaaagaaaaaatattgtgtggatgagcaattagaatgtgtctcaaaaaacttgtcttccacaaattaggaagtaagataacacgttagagcagatgttaaagtgaagctctgctgtagcgactgtaccaaatattacttgctactgtatctttttgttttgaagtggttgactgaatgatttctttcttggcagtatttttgacaggtagtgatcgcattcctattcttggtatgaagagtctgaaactagtcatccagtccacaggaggtggtgaggagtatctcccagtttcccatacttgttttaatcttctggatcttccaaaatatacagaaaaagaaactctacgctctaaactgatccaagctattgatcacaatgaaggcttcagtttaatataactttggagttataactattcagtttagtgcaaaagcattaaactatttgtgtttttyttgtggtgatgaattcagcaaggtgacagaggtactattataattcttacttgcagaatgttcaatctacgagtgttcatggaagccaaaaaatattaaaggaaaatgaacaaactgttaatattattgtacagaaccatggattttttttgaccatcttctaataaacatagcaagtattatgaatacattaaagttttactaacatgaattttaagagtttgcatatttcagaaatgatctggtgtgagtgcatggaaatattgcttaatttttcttcaatcattgagtgaaaaacctttaactttggcctgcaatagtcatttgattattttttcattttgtaaataatgttaagttttgtaataaaatagttatgttctgataccagtacagtttctatggttgtaattgaacttgaacagacttttaaaggttaaaaattatgatttaaatcttactctgagactctataaaaagaaaaaaaaggtagcatggtggaaacactatcttttcttttttgctagaataagtgtctttgtgcaaacctaaatcacagatagggaatatactacataacctgcagttcttttctttgtgaatcctgacacactgatagatgggggattgtcgatcagagaacttattaatatttagtactggaagaactctgtctccacagttgccagtaataaaaagaaacattggctactatgagcaccaatcactgggttatagctttcaaaattattgatgctgcagtgctttagagctatttcyttgaatttaagaaacaaatcttaacagttttatggtgctgatgcttagttgtctcatgccattaaattgtaaaagtgagttgatgcaatacatgtgactttctgctataatgcaaatatttattttttaaatttattttaaaatgccgtgaaaactgtttaataaagatttattgttttaatatttaaactttcagtggttctcatataagagtcaaaatttttcaaaaagagggatggttcagggaaggtctcttaaatttcggatgacttgtttctattcccacatgaatttatagaggtccacagtctcttaacctgcaattctaaaatttaaaaaaactgaaaagaatattgtcatctctcactttgcagaaaaacctgatctgaattgttgaagctatttatggtattcactaaataagactatgaccgctattgggtgctttaaaaaattcttcagaattcacaattccaaaatgcaaataagcccaaggggttggataagggattgtggacttgtacttttcagtagattaacttaaaaaactattggcgaaccatagaactcttctatagatagaagcactaaaacaatattctcacctaaggtactttgtctcaaagtagtagcattcttccccatgagagtgtttccacatacctgatattataccattttccctgttcatccacttcttgaggtagtaattattcaaatcaaaagcatgtcagatgctctttctcaatagtagtaacctttgtatattatgaagctgatttgtgaaatagcaggcactttggattaatagttccatgaacaaatattttaacaagagaatagcatctgggagcacactgtacaaagtttaatttggggacttttcctccctgttactccagaactgtgatacaatgtattaacagcaaggagattcatggtagaaagttaaaataccattgaagatttctgaaattgccacttacttttaaaaaacaagaagaagtctcgagctttgtagatcagagcagcaaggctgcagatcatttgctaaattgtagggactatgattattgagttggctaaatactgaagtatttggcctccacacatctatttgtaaggtacaaatacatagtgtgtgtgtagctctcctgtcttagtagtcattcaagctattagccattgttcaggatgattaataagacagcagaaccaagacactcctttcaattaaaaggaaataaaaccagaatgcaggctgggcgtggtggcttacacctataatcccagcacttggaaggctgaggtgggcagatggcttgagtctaggagttcgagaccagcctggccaacatattgaaaccctctctctctctactaaaaatacaaaaaattagccgtgcatggtggcagatgcctgtactcccagctactcgggaggctgaggcaggagaatcacttgaacctgggaggcggacgttgcagtgagctcagatggcgctactgcactccagcctgggcgacagagcaagacttgtctcaaaaaaataaaaataaataaaacaataaaaccagaatgtaggtgtaaaaactgagagacctaaattagattcccacggttagccttctcataggatctgttcctaaggaccattcattggggtcaatttttactatcaggttgctcttccttacagctttttactacatttagtaaagctgtgaatcaaggtgtaatatggcatagagcagtcttcccctgaagagtgcatggtaagcctgctaaaacaagagcaaaatattcctgtcatcagtctcttcctccactccccaacctcttttgcactttgaccatccagaatgccttatggtagttttgtcctcctttgctgaagaattcactctattttgatagctccctactctgctgtatttgcttatgaaccccaaattacctaatttatgaagcatttctaggtaaaatttgggaattgaggctaatgtaagttaacctccttttttaggccagccctaaggagtgtatgttaaaagtcatcaaaacagagctcctcaattcttttccagctaagggtgtttctcaaatctggctatacttttgaatcgcctgggggcgtttttaatactctgcacaaaccccaccttacaccaattaaatctgtatttctaggaggtctcaggctattcttgctttttaaaagttttcaagtggtttttaatagtctcatttgacagtcacttcaaaaggtggggaggtcattagaccatttttctgtactttctactagtatcctagtttgagctgaaggcctagaatggctttagatctttgggggagaggttttggtgtacatacatatacatactcccccacccctttctagattacaggtcagaagttgtgtttcaaataaagcttagttggggattatgtaaaacaccattgattgaaggtccaccgtcattttatgtaccactacaaaaaaaaacgctaattaaaccatgtgacattaattagggtattacaatcagtgaaatacagtacatgctgcattagccagtggttcagcaataacgttatgcatagggcttgagttaaattaggttttgccaaataccttttgaccacttaaattgactatgtacctttaaaagtatcaactacctgacttcttcaatttgtgcatatatagaatgttccttaattttgtaatattttgaggatatcatcttacaggtaatttctctagtgctaacaatatacaggacaggtctacctagaaagtttgctggggagggaggcagaactgggaacaggaaattgctaaagctttattcattacatatacttttttgttctttgagacggagtcttgctctgtcaccaggctggagtgcagtggcgcgatcttggctcactgcagcctccacctcctgggttgaagcgattctccagcctcagcctcccaaatagctgggactacaggtgccgccaccacacccgactaatttttgtatttttagtaaaaacggggtttcgccatgttggccaggctggtcttgaactcctgacctcaggtggtccgcccgtgtaggcctcccagagtgctgggattacaggcgtgagccactgcacccgaccaagttacacatacattttaaggggtacactgctggcctcttcagtaatactttcgccctcaaaacctttaatggcttaagtaggttctcaggtcagcctcagaaagttgataccaaatgtggtctgcagtcttcagacttgaaagacctagcatcccagaacagattttcagttaacccagcctttgcatcagatggattttcactatccaccacttcctgttctctctcaaatcccaaactcctggtcctttatcataggacatgtcacatccttcttaggccctgccctgccttttctccatgttttacttgctcaggcctctagcctagaatggctgaaatagtttttgaaatgcttggtggtgatgcatcacctgctacgatcagcaccatcagggttttgcaagtactggtctggtgagactaatgtaataaaccaaatgaagaaatgtagtatgagaaagaaagcatctaatactatagcattcgaagctgtacaaattctgcaagacttaaaaattatataccttaaacaatgtaagttaacagaaaaaagtcaaatgacaattttaatagactttaaaacagtgtacaagtaaaaaacactrgttttgtatttcaaaagttgaaggaagatatccagtcattaaacagtctacaaaacatatgccagtaaattacataaaagactatgtacaatataaaaagagctgaaaacagtcttcactgtaaaaataatttaaaacaaacttttcaatttaaaatatcatctatagcacacaaacatcatgcaaatggaaaactaaatatactgcattctttagtgtagccaaataaattcagattgagacatcttataagtagggaaatggccattcaatacgatttttttctctggcagtaatggtcctagctgggtgttttatgcataaagaacagctatatttcaaaccctttttattgtaataaatactaaagcaacagaggaatactttattaatttaggagtgatgttcaaaaatggtctgaaaaataaatgcttactgtgcaatttcataaagtatgaacttcttgaaagactagaagcttttgcagctgagaaagttgatctctagttttaaggcaggctaagcttttaaataaagataaattataagaactagtttcattcattaactattctgctattacaagttacatcatcatgttcatctccataatactagggctagcagtttggtatttaacaccaaatcctcccaatgggagacatgtactttctggctgaattacaattaacatcttattactttggaactgtataatcaggggcctgttgctctcctcattaatggaaaacagcagtccaaaatattacactctccccagtagaagtaccattattatagattcagaaaggctttgcatattcacattttggcagtttaatacttgtggaaaagatcaatgcaagctctaccacagtgataggtatttaaacaacaatggcaaatatttcaaaactaaggggatccaggcaggcactaatgtttctaaagcaactgaaacatttccaaagcatttatttgtttttcaggttagttttatgagccaatatagacattactacatgtccacaggaagtacaaaagccatcttcatttgaacgtaaatacaataatcctgaaattcttagcaccaagtattacttttaaaagtaaagacaaccgagtgctctccccacatattgttgacttccttctactcacactgcatgtcatttgagattttaaaaagttagctgccacagttttggaaaatgccagtgtttaaaaataattgtgttaaagaatcaaaagtttagcgtaacagattttgagtacttcaaaccattcaatgttacaaagaaaagtgaaaataccattctttggtctagattagctgttccctttacattaatttaacattccgatggctttttgaaaactttaaaaatgttgaaactcactagacaaaacaaaaaaaattatatatacacatatgaatttatcatacaaatgaacctttaaaagaagttagtcttgaccaacagctgattgaagatacttagtacctttttttttttaaaaaaaaaaaagttagtgttgagtttgtacaagtacagaaataatgaagttaaaaattatccatgaaaaacaatctattttaccaacctataaatattacacctttctggtttccttgctctatcgagttcacaagtaaacattcattttgacatgctaaagttcctaatgctggtggaacaattcctgtacctgcacaattattacactatgatttgtttgatggatagttcatgtctgttacttcctgtttcacagatayagcttcattaattgcctcttgatcatctccatcagtcccaaatccagctcctccagctctctctggaacatcaggctcatcttctaagccattgtagaattcttcaatttcactttcatcctccatgggttcttctaaacttggactctggcatgtcccactatcactgttactgccacaagaactagaggataagacgtcatcttcagagtctgaatatacctcagcgccatggaaaatgtaacgatttggtggcaaaaacagatactgattacctgaaatacagtaataaaaatgttactttcagttttctaacactaactcagtctgagcagtctggaatgaagtgtgggttccagctctgcctttattataagtgtccttatgaaagactactattagtgtttaaaaacaactgggaggcatggtgtgcctgcagtcccagctactcaggaggctgaggcaggtggactgcttgagcccaggagttcaagggccagcctaggcaacagagtgaggccctgtctcttaaaaattaattaattaaataaatacaagcaatacacttagtcctgggttcaaatcttagttctgccatttattgtatctttgtaagtgtacctctgtgcctcaat

SEQ ID NO: 94705 - DNA, 571674 bp, Homo sapiens
  misc_feature (1)...(571674): n = A,T,C or G
ctctactcatcctcttaagctggtgaaaaattctttccaggaaagtttccaccgaagttgtttttattggcagtagttcaggtctcagaatacagaaagttaaaccagcctcctagatttattgttgttatccttagtgctgagatgaaagcataacacttgtaagttctcgactgtgcttagctttaaaacccatcttaaccttctataataggaaaagagagcttacttcttctatccatattatgaccaaggtctaatgcatataacaattaaataataccatgttgcagtgtaaattagcctgtttctttatttatcgtccttttggtagctgcagttatttttttaattattattttcataaactttctgagaaaactacacactcattattaccacaaccatctttttgttcctagtggcttttgagtcataaaacagaattctcccagcttatttaaaagccactagaagaaactgtgttcagaggcagacccaccagagctttgactgcagcttaaatacatcataaatcctttttactaaacattttataatcatcctgggtaattcacaagcaatgcatttacaatagtcaaaatattcttggaagacagtgtctaaaaacaaaaatgtattccttctatatataatatgatggaggcacagaagggcctatactgaacttgagagaatgagaccagaaaagcatctactcttctgattctcagccaatatcttgaccacatattcattcaacacagagttttgaggcactgggtatataagaacaaacaaaattagagttcctatactcacagcatttagagatgagcagagaagacaacttaatacagttaagatgtaattcctacgatgatacaggaaatatagtgtgctgtgggaatctacaaggcttagaggtgagagagaacacaagacaaataaatccagtataaatttagcaaatatggaaggtggagggaagaggggagatgaaactggacaaggaggtaagcagagactgattggttcatggagcatgctaaacttgttaaggagtttggactttattcttagtgcaatgtaaagtcattttataatttttttaattaatcatgcaatccgatttacatttttagaaagatcatactaattacactgcggaaactggataatcggtaactgaacactgtgacaccagttgggagatgagtggtgatggcctggtctagagtcttgactatgaggatggggtacagtgaaaagataagagaaacatttaggttttgtgctaaaaaacatttaggcttggaggagggggtgtgtggagatgagagagatgtgtcacttggcctggtcctgtgtaatttgaccaattctggatacatctgacccaaataaatatattcaaaaaactattatatatacccttctggtgctttagagaagccagattggaatcagaattgtaagtaatcaggattttttgttaatgggaattaatcaaaaggagaattgaaacaaaagaaagaatgtgcatagtatgaagagagcttatggcaggaactccaacatttgagtaggaggtgggtcaaggaagtggacctaaagaatgaccaagatgtgactgaagagtcctaagaaaaaaaaaaaaacagggtggtttttagtaactatagcttattagtgtatttccagaagaatggagtggtaaatactgttacatggcacaaagaggttaagctacgagaattgaaaatgtcagctgggcgtggtgctcacacctataatcccagcactttgggaggccaaagtgggagtatcacctgagctcgggagttcgagaccagcctggccaacatggtgaaatcccatctccactaaaaataccaacaaattagctgggtgtggtggtgggtgcctgtaatcccggctgctctggaggctgaggcaggagaatcgcttgaacccgggaggtggaggctgcagtgagccgagatggcgccactgcactctagcctggatgacagagcgagactccatctcaacaacaaaaaagaattgaaaatgtctgttgatttaagagtgttttttaaactttcttttccttaatgcctgctaaggagcccttttagactccatcttctcaccaccctgccaatcaaattcctcacccataaaactttttattattctttctttttcaactgtaaattgacaaattatagttgtatatatttaggggtaccagatgttatgatttatgaaatgtggaataattaaatgaagctaattaatatcaccataaaattttaataccacagaatattctctgtttatgtattgtatttgtgctttacacataaaaagagtattatatttttttcacctcacaagaagcagtttttatctgctttgagaatgcatgatttaacacacagaggacactggtgatcttggtaaaggtagttttggtgggctgggtgcggtggctcacacctgtaatcccagcactttgggaggctgaggcgggcagatcacgaggtcaggagttcgagaccagcctggccaacatggcgaaaccctgtctctactaaaaatacaaaagttagctgggcatggtggtaggcgcctgtaatcccagctactcgggaggctgaggcggaagaatcacttgaactctggaggcggaggttgcagtgagccgagattgccattgcactccagcctgggcgacaagagcaagactccatctcagaaaaaaaaaatagttttggtggtagttcagtggaatgctagaaataagacattgcagtgggctgggaaataaatagcaagaagtgtaaaaaaatagagatatgtagagtagattcaagaagtctagctgtgaagaggatgaaaagacaggaaaataaatgcagcagttcataaagtgaaggaagaatacattcaaatgctgaaggaaaggtgtgaatagagggggaaaagctgacataggagagagggaaaaacggaaagaggaccctgacatagcaggagaggatgctactgagagactaggtcaaagggtttgccttctctaaggagaaggaacactttctactcttcagattgaagggaaggtttgtatacttgactgcaggcagatgatggctctccttctctgtgtaatgggagagaggtcatttccaaagggagagagaagtcctcttctctgtaaataccatgtgctactcatgaattgacacagtactgagctacttaaaaatatttaaatctgcaaagaactcccatagcgtatgtgtatatgtatttttttttaagagatagggtcttgttttgttgcccaggctgaagtgcagtggaccaatcatagctcactgtaactttgaactcctgggctcaagtgatccttctgcctcattctgcctctacctcctgagtagctaggactacaaccacatgccacaaagcctggctaatgtttaaattttttgtagagatggagtctcgctatgttgcccaggctgatttccagctcctggcctcaagtgattttcccgcctcacccacccaaagtgctaggattacaggcgtgagccaccgcactccatctgcccatagtatattggtttgttttttttttttttgagacggagtcttactctattgccaggctggagtgcagtggcgcaatctcagcttaccacaacctccgcttcctgggttcaagcgattctcctgcctcaacctcccgagtagctgggactacaggcacgtgccaccacgcccagataatttttatatttttagtagtgacggggtttctccatatttgccaggatggtctcgatctcttgacctcgtgatccacccacctcagcctctcaaagtgctgggattacaggcatgagccctaccgtgcctggccgtatattatattaaatggttagaaataaaaatcataagattaagtaagaaaatataatcttgttgcaaagagagctttcctaaagatacgtaaggttttttttttttttttttttttttttttttttttttttcgaggcagagtctcgctctgtcgctcagggtggagtgcagtggtgaggtctcagcttactgcaacttccgcctcccgggttcaagggattctcctgcctcagcctaccaagtagctgggactacaggcgtgtgccaccacacctggctaatttttgtatttttagtagagacagggtttcactatgttggccaggttggtctcgaactcctgactttgtgatccgcccgcttcagcctgccaaagtgctgagattacaggcgtgagccaccgcgcctggccaagattcgtaaattaagataattcttcattaacctcattcacttcacttctcctatagtgtcaattgaaagtgtccctctgtctttcccaaattaatcctttcacttgtaacttgatcccattcctttccttctcttctgggagacaagactttttcttgaatcttcaaatagttgcttgcttcctgcccccaaatagatatcttgtattctttaaaacaaaccccaaactttcccccaccttgccactctcaataatcttgcttcatgccccaaatgatgaaggattggtctacacttgcagtctttcctcagttactattaaagcatctctctcaaacagctcaatgactttctaattataaaatccaacgacctattctgatttcagcttcctcctctgaccattgcagcattttatgtcattgataactttctcctaaacaaaaatacttcttacccttttatatgaaacttcatctgttttgggtctcaccttgaaagtctttcgggcttaattctcataattttttttaaagtctttctacaatctccatgtaaaccactgtttcaaattcgataaaactcaaactccataaaatacctcctcctgtcactggcaccatcttcttaatcacacataaggctgtaagtttcaggttcaaacaaatctaccaaatacaaacagccacatcgcccgtcactcttccacactcactgccacctgctcagcttagaaccccgttacctctctcctgaagaactgcaacacccttctcactgcattcctcaccccaggctcttccaggcaccacccgctaacaggacgtctgctcaggtccgtttggggttttgtcctccaaagcagaaacctgggactgagattcctgccgtctgtactccagctcactatagagggggaacccagtaagcttgacctccggggctcaggcgcctgagaacactgggctgcaggtggaccgctcccttctggccttgctggcgagaaagcccggaaggccgggagtgggggggaagcgaggcccgggccaacagcaccaaagacgctcctagagcccagatcggagtcgggggccccagctattcagcctactcccgggttttggagctgtccccagtccacagatttcccgcccctcacactcaccccaacacctgtgccagtcagtgattcggcgccggatcctctcctaccraagctggagaagccgagaaggccgcgaggacccgcagctggagtgcccaggaaattgcctgattaacagcttcaaagacaccgactctgtctaccgtattagaaattttaaatatgcaggaagaccgtaaatgagaggaaagacgtctcttgaggcttagtatctaaatcttctacataatccagggcctagaaaaatggtgggtttctctccatctagattcaggcggtcatctgctgcctaacgcagtctggggtccctcatggtaggggaggcggggtcaggaatgggcggggcattcgctgttggtgccgacggatagagccaatgattgtggatgacagcggcacagaatgggcggagtctggaggggcgggatttggagaagagaaagcggtgatgcgaagagggggcgggaccagagagtggatggcagaggtgggctgtagagccaaagtggggtgggagcgcgaagatggcagctgctgaggaggagccgaagcccaaaaagctgaaggtggaggcgccgcaagcgctgaggtgagcgctgccggacttggggaggagggtgayggcgctgcaagcaagccagggcccacgtggggttgcacggccccgacgctgggtggtgtctctcactgccagcttggggccaacacgcaggacctcccccagctgcccgcttggccgcgaccccttgccagacgttctctccgtttggctgagtccccgcctgtctggtgcagctccggctccagcagcccttcgccagtcgtggcccgcagggggaccgagctggctgaccgcgccacctgcgagcaagcccaggctgggctggtgcgaccccggagggtcggaccggagcagcgtctgtaggcggccgccttctcttcccgggggatggcgggaaagaggctcggcaactgctgtacactggggcaaagtcagaattcttggggatttttcagagtgttgcggaagggcacgttgaccttccttttcgtgcacattctgaaagcccgtacctttgaggaccctctaccagggacccagacccctccgatgctttgcaggggcagcatttggatgaatggataggaaaggttgatttctcttttktatttacactttttggcagcaacggggacagtgctgcccctaacacctgcctcacatgtgattgatgttgcaacttttacttatgaagagtcatttgttaaaatatcccttcctaataagtataaagtgaagcaggcagtctttgatgatttggaaatgttcgctgaaaggcagcgatttttttttccatcttaaaatagacatatcaaactgatttaaaactattaggacactcctgattaaacaggacatatcccatttcttccagtatcactcttcttcacctccaaaggaaggaatcactcacaattgaaaagaaaaggacacttaggggcctggtggtgtgttcatgctgctttgaatggagggtgaacaaatccttgccagttcctttaatgtattcctactaccctcaaagggttagtgtgcctaccttataccaagaacataaactttaaaataaaaaccctcaggatattctatttttattttaaatattccaactatatgcagaataaaaagcaacggcttttgaatcagacctacctgagttcaaggcatgtgctttccctactctgccctttattagagtatttccttataaggcacctccttcgccaaactggaagacagatgcaacttttccctaccatcctactgaacatataacccttagatttccttagatttttccttaataaaaattattatatataatgctgatccattttcactgtgttttcctatttattatcttgttggacagttctgtgatcaaaggaaggcaagaattatgcctattttacaattgaagatattgaagcccaaataaaacaattagtacaggaacagaaataggaactagctgagcatgttttcttatacctgcagtcctggtgctttgtgaggctgtggtgagagcattccttaggcaactaaaattcactttayacaatatgaatttagtgccacctgtagacatgaagttaaaagattagacacttgagtactgggacaaatctctaattttgtggggagacattttaggatcrgctattattacttttattatattaatttgctttcagactcaaagtgtgataatgcattgagtatttacactgaatttatgatgacttgcttgacrggggattgctactggttttggttaaggagaatggattataaagactttgcataatttaatgtgcagcatcagtgggaacaaataatgagatatatttgtagatgtcaggaaaaatatttagatttagggatttgtgagaatttggtcagctctgggataataattctccaccaggggaaattttgccctccaggggacatttggcrtggtctagaaagatatttttggtagggagagctattggcacctagtggatggaattcaggggtgctgctaaacatgctacataggacaacccccacaacaaagaattatctggccaaatacgtcaacggtgttgaggttgagaaatctgttctagagggagcatctgacaagactagtctgcctttctcaaatatctattatttttctaggctcggttgcttttcagcatataacagttgcttataaagaaagaatcaggctctracatgttttcacgtgggattaggggaaagaagggaacgttaattgagtgctagacattatactatgtgctctatatatgttatctcttttaaccctcccagtgacctatgaggtaggagcaatgattcctgtgttacagacgagctattttgtgatgaaagaagtggagaaacatttttgggaactgctccctagatgaaggtgttccatgatgatcacttatatttaagacaacttagttttcttttctctcctttggaaatctcatccaagttcatttctttagcgatcgcctcttaagaggctacagtgccttccaaggcttgttgagcacgtgccaagtcttttccttcagtttgtctttcaagtacatgctattttagacatggtgttaaaaactggatatatatagagagagaaagaggtaaggcacaggtaccatcctcttggtgggaaataagtggggtttgggaaaatgacacctgagtattcttaaagatgactaggagttaaccagtcatctgtgactgtagggtatctgtgaagtagggtatctgccttataggaaagtttgtttggtggcagaactgggagagagctgcctcttggggaagtgcagatagtctgactgaagcagagatgtatggggtccaggctttgtattagacactctcacatgtgtcctttctatctctgtgcctctcagttctcagatcttaatttaatttaattttgtatatatttttgagttggagtctcactctggcgcacaggttggagtgcagtggcaccatctcggctcactgcaacctctgcctcctgggttcaagcaattctgctgcctccgcctcccaagtagctgggattacaggcgtacaccactatgcctggctaatttttgtatttttagtagagacgggattttgccatgttggctaggctggtcttgaacttctgacctcaagcgatccacctgcctcagcctcccaaagtgttgggattacaggtgtgagccaccgtgccctgccttcccagaccttaatttttactgtctgctgagtatgtgcttctgagtgactttctgacatttcgaagtcatatataccaaactaaattatctgttatcctgaatctgtgcatttttccatatttcctgcatctgttaatggcaccagtaacctcctttactccaaagtttgagacctagatatttgattcattttacatccacattataatgtctttccttttccattcctgctgccacaccttacgtttagactttatcttttgcttagattttgttttgacttcctaagcagtctctttaccttcagcctcaagttctgcctacttttctttaggcacagctctacttattcatcacggcaaatatttgtaaactctgaagttgatgttaggaaacgttgaatcctgaaagcccatatcattactccatctgacattagcaattaaggattattaaggatcatgacttttaatagtactaaaaaggaaacaaactacagttctctaatcagcaaatgctgagcttttctcaaatattgcttcctaactgtttcacttccatggaccccttttattattttcctctatctcctacctcactatggaccctgtgttctaaaattaaacctaggagctgggcatggtggctcacacctacattccagcactttgggaggccaaggtgggaggtttgcttgaacccagaagttcgagaccagtctgggcaacaaaatgagaccctcgaatctttaaaaaaaacgaaacaaaaactagctggacatggtggcataagcctgtggtcccagctacacaggaggctgaggcaggaggattccttggcttcccaaagtgctgggattacacgtgtgagccaccaagcctggccttaattaatgtttgttgcatagagtggcactgataactttcatttttctagaccctatatatatatttttttgtttgtttgtttttgtttttgagacagagtctcgctctgtcgcccaggctggagtgcagtggcacagtctcggctcactgcaagctccgcttcccgggttcatgccattctcctgcctcagcctctgagtagctgggactacaggcgcctgccatcacgcccggccaattttttgtatttttaatagagacggggtttagtagagacgtgttagccgggatggtcttgatcgcctgacctcgtgatccacccgcctcagcctcccaaagtgctggattacaggggtgagccaccgtgcccggcgaccctatacttttaataatgcagcctaaaattgagctttgctactattttcttttttcatcatgataatctactattgaaagagtttggttatttttggatgatattgcatgccttttacttatattcgcaaatttaatcctttaagattaaggctttgggctatgaaggaatggaaaacaaaagtcccctaatgcacttagtatgaatgccttaataagatcctttcctgggcaatatatactagtgcagcgtgagggtggtagagagagccagaggaaagcttgcatggatggttctgsgtatccagggacaagcatggaagtgcttgaaactcagggaaagtgggaagggccttaggaaaacaaggggcattgaagactatgtttcttattttgggtacaggcctagactgaatattcagcctcaaataaaacatgaggctgatgtgctgcttttttttacctggaatatgtctttgctttacttccatcaattaaaatcctggccacatggtgtggctcatgcctgtaatcccagcactttgggaggccaaggtgggaggattgcttgaggccaggagttctagactggcctgggcaacatagtgagaccctagctctacaaaaataaacttagccaggcatggcagcaggttcctgttgtcccaaccactctggaagctgaggcactggcactactacattccagcctgggtaacagcaagactctgtctcaaaaaaagaaaacaaaatatctttcctgtgtccaaagtgtttacagttaggtgggggaaaaaaagtatcaaaattttaaagagcattctggtcagaatggatcccagtagagcagtggttaagagcatggtctctggcatcagctatctggtttgacccttgatccttattagctagtgatctcgggaagattggctacttgccccatacctcttttctcacctgtaaaatgggtatagtaatagtacgaacctcataaggatgttgagagggaaacgcagcaattaaaaatttaaaaaggaaaggaaaagatatagatatactcaagaacaagataaacatctccagggaccaagaacagaaaagaaacatgcagttagactctgggttcaggagctagtagaaataacatgtaggggacctagggtcagatgctctgtatgaaactgaagctgggctgagactggatgaaagagggctgaaaacatctgctcttggctgttgctttaaaaagctgtggacctggagtgaagatgcagaagtggctgagctgccagatggctcagagtcaggaactgtggtttccccactatcagctagtacaagagcaccaagcttggaggtcgtggactctggaagaggggtggcctatcacagaacccctgggaaaagagggaatgtctgagcctataaacacacgaggaagaccattacttagaaaattaacacagttaccaagagataaattcacaaaaaatctgatggaaatatgggtaatttcaaaacaattgtaagtattttaaagatccttaaaaaagataaaagaaataatggtcataaaaaaacatgaatcaaaaataggtagatatgaaatagatggctatattaaagaaaaaatggaattattgaaattaaaaaaaaaataggtcagttgaactctagaccagacaaatttgaagggaaaattaatgaattggaagaaagtacccagatgtatcacagagaaataaataggaattaacaaatatgagctgggcgtgatggctcatgccggtaattccagtactttgggaggccaaggcgggcagatcacctgaggttgggartttgagaccagcctgaccaacatggagaaactccatctttactaaaaaaaaaaaaaaaaaaatacaaaattagctggatgtggtggtccatgcctataatcccagctactcaggaggctgaggcaggagaatctcttgaacccgggaagtggaggttggggtgagccgagatcgtgccattgcactccagcctgggcaacagcgcaactccataaattgagaggcaccaacttacatctaactgggagttccaaaaagaggaaataatgtgaatggtggagaagccaggttggaagagctgatggctgagaatttaccaaaatttaagaaagaccagttctcagcttgaaagggcattatatgtatctagtaagatggaaacaaaaatataaactaaaactwcagagattttcttgctaattatattaatgtatctattatagaaagactgaaaatttagacactccaaatttaatagtgggcatctttaggtggaagaattatgaggtttaaaaaaaaacttgtattttccaatgtttctacactgaacatattaggaatcttgcttttaagttggagagacttgaagtacactgaatatataagtggccaagtgctgtgtggctaaatattatctttacagaatggacctctgggataccaaatacctctgaaacttggtaacataattattatgactttattgtaggctataatcttttaagctatatttctgaaatcccaaagctctggaagctggaagttttttaaaaagtttgagatgaattaatttggcagcaaaatttgaactgatgtaaaggtgtcagtagtatttatttgtctgacacaaatgtatatgctttgctatggaaatattaggctgttaatgacatgccacatgaattcctcctgggtgttctacaaaatatatagtgcagtgttaccttcctaaaatccataaaattctgaattccaaaacataccctgccccaaggatttaagaaagggtttgtggacttttattacttatttatagtttacttttaaaagttggctactgtgcaggaacaataatttctcatcagagttagttcctagatttttttctctagtcactgttctgcacttctatgatactaagtagatgctcatttcaaagatactttttggctagctctactgtaataccagtacagttgatgtcactgagttattaggcttttcttcctctccagtagtaactgaaaagacagacttctcttcaacttttggacttgaagatttggaaggctgttttacaaaatggtctcccaaactgaagtttcacatactgcttgaagaagatacattctgatgatttatcaaagcagatttagagtttttgctctcatttatgtgtattatttctgatgttgtttgtacttttggcttcgtaccatttctttaaaaatttggttcatacacttcagatctagaagcaatgtgattagcctttgatataagaacatctgagtttctatttgcatttttactttcattgcatgcatgctgactttagtattttctttacaatttagaagatatatatgtatagcaattatgtaagaaattcttgccttctgtaggcacaacagtttggttactgtattaacatggtcttaaccattttgtcagcaagccacatttggttagtagtgagtcctgctattttactatgttacctgcaaacaggattgcagatgtgaaggtagcctgtgtgatcattggtcactcactgaattagggattatcagaaattatattgaagtggtcacttggctacttgccttctacatgcttaggctagactttggttcatacttagaaccattttgaaatctctgaaagactcagttgactcaacctaactggaaagtccatctaatttttttttttttgagatggagtcttgatctgtcacccaggctggagtgcggtggcacgatctcagctcactgcaacctccgcctcctgggttcaagcaactctcctgcctcagcctcccgagcagctgggattacaggcatgcaccaccatgcccagctactttttgtatttttagtagagacagggtttcacaatgttggccaggctggtctcaaatgcctgacctcaggtgatccacctgccttggcctcccaacgtgctgggattacaggtgtgagccacagcacctggcctaaagtccatctaaatatgactcaatctaggagttcaccrcttgtctctgttgtcctttagattcaatttatctctcacgtaggccatttcagtgtaacaagatggcagttctcaactccaagccaaaatctcatgagtccaaaggaagagagtttttctatatgcttgtatcagttttgagagaaatttggttctgcctgtgttacacactaccttgaaccagttgaggtaggaggtggggctcagacactggaccaaattgaggactagctaaaacagggacagagtggaatcagctttccgtaagtcacacctactaatgtgccatgtcagtttcccattgccacggcaacacccagaagttagcgtcccttttcatgacagtgtcctggaagttaccacccttttcctagaaatttctgcataatctgcctcttaatttgtatataattaaaattgggtataaatatgaccacagaactgcttctgagctgctactctgggcatactgcctatggggtagccctgctctgcaaggggcagtacctctgccgatgctttacactgctgcttcaataaaagttgctgacacaccactggctgacccttgaattttttcctggatgaagccaagcaccgtcctgggctaagccccagttctggggcttacctgccctgcattacaatcactgtatcagaggtggagatttgggctggccttggatacattctcactgtctgcccgtctgttgtgtgcgtgcatgcaggtaggggtgtgtgcgtgcatgcaggtaggggtgtgtgtgtgtgtgtgtgtgtgtgtgtatgtgtgtgtgtaggtagtactaggtatatggggagccagtgagtgtaggcattgttcgtatatggggggaaatggatgggtgttgatgggtacactgtaatcaacaactccgacaggaccttgtagagtaagggaggtagtgtcattccctcagcaagagaaaaatccattttagcatgtacaatatttattaaaacaaccttcctcttctccccttccaaaaaacccgacaacctcagtcttcaaggtctagccaaattctctcttctctataaaacttttctactcaccaaacctagaaatggtttctcctttgactgtttgtactttatactttgmgttattgcaatgtacagtatgtgcatgttttatctcacctattgctacttgaagttgggaaactagttgaataactcttagtgcctcataactgatcacttcattgcaatataacaggctctgaatttctgttgaatcaaggaattcctatttatttttttgagatgaagtctcgctctgctgcccagactggagttcagtggcatgatctcggctcactgcaacattcacctctcaggttcaagcaattctcctgcctcagcctcccgagtagctgggactacaagtgcacaccaccacacctggctaaatttgtrtatgtgtgtgtttttagtacagacggggtttcactgtgttagccagtatggtctcgatctcctgatctcgtgatctacctgcctcaacctcccaaagtgctgggattacaggcatgagtcaccgcgcctggcctatttattttaaaattttaattaattttttttttgtttttagagacagggtttcactatgttgcccatgctggtcttgcctatgcctgtcttgaactcctggcctcaagtgatcttccctctcagcctcccaaagtgctgggattacaggtgtgagcaaccattcctggcagaatcagggaattcttaacactttttttttttgttttttttgagatgagggggtcttgctgtgttgcctaggctggagtgcagtggtacaatcatggctcactgcagctttgacctcccaggctcaagcgatcctcctatctcagcctccagagtagctggaactacagggatgcaccactgtgcccagctaattaaagaaaaaattttcttttgtagaaacagggtctcactctattgcccaggctggtcttgaactcaagcagtcctcctgcctcggcctcctaaagtgctaggattacaagcctgagctgcatgcctggcctgttaaccctttaaagatttttttgtttgttttttagacagagtttcactcttgttgaccaggctggagtgtagtggcacgatcttggctcactgcaacccccgccttctggtttcaagcgattctcctgcctcagcctcccaagtacctggggttacaggtgcccgccaccacacctggctaaattttgtatttttagtagagacagggtttcaccatgttggccaggctggtctcgaactccagaccttgtgatccgcccaccttggcctcccaaagtgctgggattacaggcgtgagccactgggctcggctgcttgtagcatttaatggtgcaaaatggattcatgtgttgtctataaattcttaccaataatgggagttgatggagagaactattacctgaaaatacttcacgattctttggcctttcatttttttgttaaatggagtgagcttgtgtgcaaaatcaacctgatactaaaggataagaaaggtactcccgattgcatttcttttgtgtgtgtgtgtgtgtgtgtgtgtgtgtgtgtgtgtgtgtgagacagagtctcactgtgtcgcccaggctagagtgcagtggcatgatctcacctcactgcaacctccacctcccaggttcaagcaattctcctgcctcagcctcctgagtagctgggattacagtcatgcaccactgtgcccagctcatttttgtatttttgtgtttttaggtttcaccatgttggccaggctggtcttgaactcctaacctcaagtgatctgcctggcttggcctcccaaagttctgggattacaggtgtgagctaccacgcctgtccccagtttgcgtttctgttctttctggtgaccatagtgagctcgattataatagccatttattatatttgtctatggggaaaaattccctcagaataaatacacttctcctacgtgaacagtaacattttctttcttttttttttgagatgagtcttgctctgtcacccaggctggagtgcagtggcatgatctcggctcactgcagcctccaccttccgggttcaagcgattctcctgcctcagcctctgagtagctgggactacaggtgcccgctaccacacctggctaattttttgtatttttagtagagacggggtttcaccatgttagccaggatgttctcgatctcctgaccttgtgatccatccgcctcggcctcccaaagtgttgggattacaggcgcgagccactgtgcccggccaacaktaaccttttcttaaggtcccgtggttgatgtcttcactcattctttcttcttttaatatagtagaattgcgtatttgggggaggaatagagtttctgaaagagtgaatgtacaaagaagatcccagtgacctgttagaatgatgaatctcttttctctgtgttagcaagcctttaattagtaaggctgtttgcagtgtaattagaactgcacaagcatgraaggtcagtaatactgttcagaatttcataatgtactgtgtaacataacatactgtgaaatgaatccatagtaccacaaaatttgtttttaaagaagtttgtctctattgactcatctaggaggggtcacttaaaaacaaaatagggcaaaaaagtcaaattcagatgtcttaggttttctcaaattcctttaatctcgatatagcaaaagaaactgtttccttcttagccctagaatggcagtctgaaaaattatctaagtttttgaggaaacaaattgaaatacaagaaaattatttcctttacaaataaacagttctcttgtttgtctttgaacttaaccacatagagatttaaatagtttgttgttttataggcttgactgaggaagtcttctcctaaaatagaattttttaaaatagttttttctcagcccagctgagaccttagttatcatttttagttcttagttttgttgaagattgaagccattaagccgtagaagtgatgcagatttatgctgttgtctatatctgttctcacctactcaggatgaattgattataaaacattttatcataggatagcatgttgatgcatataaaacatagtgatgaaattctactttgtcttgttttacttattgcttgttcatccaaatgtattaaatttgattgtttaggtttgagatattataataaaacttggttacattattaaattcagtacatagtataaaatgtttattaaaaatagtattttaggctgggtatgttggctcatgcctgtaatcccagcactttgggaggctgaggcaggcagatcacttgaggtcaggagttcgagaccagcctggccaacatgttgaaaccctgtctctactaaaaatacaaaaattagctgggcatggtggtgggcgcctgtaatcccagctacttgggaggctgaggcaggataattgcttgaacctgggaggcagaggttgcagtgagcccagattgctccactgcaccacagcctgggcgacagagtgagactccatcttaaaaaaggaaaaatttgtcctttttttttgggaggggagtgtaggttcttctctacataatacattgacttccttaggggtattcatctctgtgtttgcatatcctaagggtgttctttagagaaatatatacatttctagacttatactcgtagattcttatctttgcctagtttcctctggaggacaagaatctcttctttagcactatttcccccatatttgtgtagcattcctacatttttcaaatgtaaaaaaacaccacatcagagacctttgacctcagttctctgtgaagtttcaataaactcgattcctgagaagacgtgttagtttcttgtagatatcaagtcaaactcaaagatctttaagtgttttctttgtttcccaagatgttgattctttactctcataaaacaggttaaagcaggctctctcagcctttctctttgagaaactactttcatatttccgaagactgcttgggaatgctggtgggagttgggataggagcagcggagggaggagatgcctaagagtgcctgttctcaggtagagttggaaatgttccctcctagagctgagatttcctgcaagacatcgagttggggtgtgaaagcagcagatttcagtatcagccagatgtggctttgaaatggtggttcacagtttcttgtgatttttgaaaactctgaacatattttagactttttagattattagtgcttgatgaggtacttaaaatcagagtctaatatttgggttgtacagttgagggtattaaagcccagagaggctaggtggtatcagtaaggtaacacagtaagttacagctactaagtatccaaggtgagatttgatcctgagtcttataacttaccgttgctctaggctctggaataagaaatgaagcatcaatttcctggggagcttttttttttaattaaatttaattttttttaagataagaataacatatttgaagaaaatgtcaagtactttcacttacattttcttattgatctccacaagaagacaaccaggcaatctgtckttagctgaggaaacagacccccgagaggttaagagtccctaagtagtaaacattcatctcacgttcaggacctctgactcatgtgtcttgctgtttatattatgtatgaagatagaaattgagaagctgtcagtaaattctgtatgtgctagataagcaccctgtttaaagaaattctgtggcaattgtcaattgtgttttataatcttgtctagacttgtgtctctcaagttttcttattcacacatatgtagttttatcccccccaaaataattattctcttgtgggatctacttagtggtatggtttgcaaatggattaactcattgaactggaatttttagtagattatattttcttttttctcatgtttctttgagacagagttgctctgttgcccaggctggagtgcagtggcctcctgggtacacttccacttcctgggttcaagtgattctcctgactcagcctcccaagtagctaggattaagggcatgcgccaccacacccagtgaatttttgtatttttagtagagacggggtttcactgtgttggcctggctggtcttgaagttccaaccttaggtgatctgcccgcctcggcctcccaaattgctgggattacaggcgtgagccaccatgcccggccagtagattgtattttctaatcaaaactttagacaaaccaattttgcttgtgtttaattaaaatgttctagttaagaacaatttattagtactattttttgagatggggtcttacttggttgcagaggctgtagtgcagttgaacaatcttagctcactgtaacattcacctccgggctcaagccatcctcccaycgcagcctcccaagtagctgggaccacaggcttgtgccaccacgcccaactaattttggtattttttgtagagatgaggttttgccatgtcacccaggctggtctgaaactcctggcctcaagtgttctgcccacgttggctactcaggaggctgaggtaggagaatcgcttgaacttggaaggtggaagttgcaataagccaagattgcgccactgcactccagcctgggtgacaaagtgagactccgtctcaaaaaaaaaaaaaaagaaaaaaaaaaaagaaatggttaaaataggaaaagtctcagttcctcttagctatttctgattgctacatgacttccatgaagctttttaagctttcactcagttctgaggtgtttatatgagcttgtgaggaacttctggttacaaactgtaatacctattggcttttagcatggtgcaaggaaaagagctttggattagggataaggacacctgagtcctattaaggtctctgtctggatttgtgaatgcacctgttaagtgagttgtatagactaaaatgttttccagactacatgagcctttttgagtattgcacaagtggtattttataaacgagaaatagaataaaaaatattgtgcattgagtacctaagaggtaagtattgctctgtgaatcattgtttcagttatatgtatagggtactgggttacaatgtaaaaaatgtatttttaattaaaaaaatataaatgtagaaaaatataatagagatgaggtctcactatgttgcccaggctggtcttgaactcctaagctcaagtgatcctcccgcctcagcctcccaaaatgttaggattacaggcgtgagccactgtgtctggccaaaaaatgtatttttcacacagtttggttttctattccaaaatttggtggcttaaaataactactttattagatgtcatgatttttggattaggaattcagacacagcttggcctgttgattctgttctatatggtgaataagatcacttggaggtgtttagctgacaacaggtctggtctggagggtccatcttatctttattcactcaccttatgccttagggtaactggaggcttggctcaactgggcttctcttagtgtagtttgagatcctctctgtggtttcttcagctgggtagttggacttctcacgtggcagctccaagagaccaaagcaggagctggcagccctctcaaaggctagcttagaatctggcatagcatcaccttcactatacactattggtcagaggagttccaggctagcccagatttaagagaagggaacatagacttcttgtctctaagatattgttcccattttaagtctgccacaattatgtaaaataatttagaaaaacatgactgaattatatatccaagcttttaattctgttattgccctttgaaggatgatcacttttaaagtgttttttcctccattgggaaatttgtctgcttttggtaaattttcatagttcaatttgagtatgtatattatttttccatggaatactgagggttttatgcttttgaagaaatgatttaaagtttaaaatttctttctctacattgatctgctggttttaattctttgaatagcacttatgatcatttgatgctgttcttttttgttacttgattattcatctttctctccttagaatgtaagttctaaaagggcagcacatgttcttgatctttgccaaatctgtagtgtctcctgtagtagaacagatgctcgataaatatttgttgagttaatgaatgaacaatttaaaagattgtgagctgggcgcggtggcttacgcctgtaatcccagcactttgggaggccgaggcgggcagatcatgaggtcaggagatcgagaccatcctgtctaacacagtgaaaccccatctctactaaaaatactaaaaaattagcggggcatggtggcatgcgctgtagttccagctacttgggagcctgaggcaggagaatggcatgaacccgggaggcggaggcttgcagatgagctcgtagtatcgcgcgcactgagactctcgaggccgtgggcgacagtagtcgagtagctgtgctcacactaaacataagaaaagcgaaagcaaggtaagaaggaaggatgtgtgcaagacatctgtagcactgcagtatgctcagcagctaggacatatggaggcagaggaatcagcggacagagatgctctagttttagcaccgtgaaggttctgctgcttgagctagaatagcagcccatgacacaaggtgatcgcgcatatggcacacagagagcatactacgctcgagtaagagtatcgcgtggcactgtgatcactgacgatgatgactctgggaagtctaccaactccttgttgcgctaggaaaactatttcctagctactaatttctgtccctctattatatctaggtttgcataaattcaggaatatggcagtagtaaaaccaaatggatcccactggaaacatnnnnnnnnnnnnnnnnnnnntgctgtacagcggtacttccacccgtggtgtaagagtcgcccaggctgtagtgcagtggcatgacctcggcccactgcaacctccacctcccgggttcaagcgattctcctgcctcagcctcctgaatagctggaattacaggcatgtgccaccacacccggctaatttgtgtatttttagtagtgatggggtttctccacgttggtcaggctggtctcaaactcctgacctcgtgatcctcccgccttgtccttccaaactgctgtgattacagacgtgagccaccgtgccttgccaaaataaggaaaatcttttagatagaaaatataggaccggtgtggtggctcatgcctgtaatcccagcactttgggaggctgaggcaggtggatcccttgagctcaggagtttgataccagcctgggcaacatcgtgagaccacatctctaccaaaaaattagctgggcatggtggcgtgcatatgtggtcccagccgctcaggaagctggggtgggaggattgctcgagcctgggaggcggaagttgcagtgaaccaagattgtgccagtacacttcagcctgcgtgacagtgggaccctgtcttaaaaaaaaaggaaaaagaaaatatatttcataaggttagcaacaagcttttgagaagggctattctttatttctgtgatgtactttctatatttttgtattaaaatcccttttctgttgtgaaatgatagtgatattcacttctatagtttaaaaatatgttctgtgcagcataaataattgataagcagtgttatcttgtactttcagattggagttgcctttgagagtcaaagatttgtagctcacagaaaataaagaagtactgtgtgggtgtgcctgggagggagttttgctaagaattcttactaaataaagttcaatcagtcaaatgttattgtactcttcaaattctccagggaaataaattgccagcttccatttaaagattgtattttgtttgaatatgtgatgttaaagtgaaatgtgacatataagaatctaaagatgattattaaaagcaaacaacataatagcattcttacaatgtcttttgcaggagagaattaatagatttagcagtgtttctttgaawaaacttgtmcataatgaaagctaactaaaattgcattaaaatttatcaactcctttaaaaaaattcaatatgttttgagatacaagtatgcacaagtattttctttcattgtctaataagaacttaaaggaacctgagatgtcacctataacaaactcctttgtgtttcagaaaaggaaactgatggtcaaagaggtaatgatttgtcaaaagtaataaagttattggtaagtccaggattcgaatcccttctcattcccaggcccctgacctttacatggctgcacactattttagggagacaagttttaagaagtttctctttttggatatgatatagattctttaaataatattattttactgatttttgaattcatattaaatgagggtttgtatttttaagtaacatgcagggaaaacattccacattcatgttatgacagctgggctcgtcaaggctttgcaaagctctaaaagtaggatacacacttttaacttttgtcaagttgtgatttaaaattaatcaaaaaaatcatgaggacaccttatttttgttattcctgtcttaaagaatctttatacatgaaaaaatgaaacatttataaaattagcccaatttgtctaaaaataagggtagttttgacggttgtgaatttctttttttaaaaaaactcaggaacaaggttatgattttaaaaatgcaagttttcaaaaagggcaggagtaagttttgtatttttaagccatttaaaaaagatagtaaggccgggcacggtggctcacgcctgtaatcctagcactttgggaggccgaggcaggcggatcacgaggtcaggagatcgagaccatcctggctaacacggtgaaaccctgtctctactaaaaatacaaaaaaaatttgccgggcgtggtggcgggcacctgtagtcccagctactcgggaggctgaggcaggagaatggcgtgaatctgggaggctgagcctgcagtgagccgagatcgcgccactgcactccagcctgggcgacagagcaagactccatctcaaaaaaaaaaaaaaaagaaaaaagatagttgatatttaataataattataaaaattataactataaaaccagtattagaaaattaatgatggatgaatgtaaataaagtaaaattatgcataatcctactttccagagataactaataacatttaggtgtatttctttccaatcatttttttctatgcatatatggtgtgtatttttttaaacacagtcaagttcatactctacttccttttgttttgcttttttcatttaacattatatcatgagcattttcttatgtccctaaaaagtctgtggaaacattttataatagttccataacattctgtaattatttaactattaccctatttctggttatttgggatataataaatttttgctattgttaataaggctgaaatgaataactgggtatacaaatctttatacacatttgtctctcttttaatgatagttgcctaaaagttggaattactgacacatattgccaaaattctttatagtagaaatgtactaatttatactcccattaattttatatgagagtgcttgttttatcgcacccttaacaaactggttgtgtttgaagagaactttgctattattttggggcttgaagcatttgttgaagagattagtggatgggtccacatttttggtatgctatttggaggcacttagctattttgggttatgtatctgattgcttttatagggccagaccacaagattagataaagtatatggaatatttacatatcagtcttacgaagagcaaactattcagacccacttatcttgattcagctattctaattgtaaaaagactactgaaggttaaaaatttcagttgactattttctcctaaagtaggataagctaggcttttaggaaaaaaatagggttgaaataaattgtttagaaaattgatcaaaagtagtagttactcagtactctctctctcagcgctcactctctttctgtctctctctgtctctstgtgtgtgtgtgtgtgtgtgtgtgtgtgtgtgtatttagaaaaagagtagaatggaaagattagaaatagagcatgaaaggctggggaagggaagttgctgtgaataacagaacttctgcctttacctgggaaaatatatctttacttttgtcgctacattattgactctgaaagatcacatgagtcctctttcttgaaataatatttttgtgtttgtaactgctgacacgactggtacttaaattttgagagaataaactttttgaaaawttttttgaccattaataaaaaacttttttttcatttcctacagtacatggattttcttttttttttttttttttaagacagggtcttgttctatctctcaggctagattgcagcggcgcaaacacagcttgctgtagccttgaactcttgggctcaagccrtccttccatctgagcctcccaggtagctcggactacaggtgtgtggtctccctatgttgcccaagctggttttgaacccctaggctcaagtggtcttcctgccttggtctccctcagtcgctcgggcatgtacccagagtgtcgaacgtccatagtgacacccatgagcctacgaccacccctgcatttgcgcctggcagccaccgctgcgcctccaccccctgttaattccccagccattttgggaggccgaggtgggcggatcacctgaggttgggagtttgagaccagcctgaccaacatggagaaaccccatctcttattaaaaatacaaaatcagccgggtatggtggcacatgcctataatcccagctgctagggaggttgaggcaggagaattacttgaacctgggaggcagaggttgcagtgagccgagatcgcgccattgcaccccagcctgggcaacaagagtgaaactccatctcaaaaaaaaaaaaaaaaaaaagcggatcacgaggtcaggatatcaagaccatcctggccaacatggtgaaaccccatctctactaaaatacaaaaaatttgccaggcctggtggcgcacgcctaggggattgcttgaacccgggaggcagaggttgcagtgagccaagagtgcaccactgccctccagcttggtgacagagtgggactccatgtcaaaaaaaaaaaaaaacggttagatgcaaatatcaaaaatgagttaaaaaatatctttggtgtggcttcaattttattaactattttaatattgcagacccatatcttcccttaattatactgaatttagtatatttgttaaaaaataaagttttaagactacctgttttggtatcaaaattagtttttttkttttctttttttttgagatggagtcttgctctgtcacctaggctggagtgcagtggcatgatctctgctcactgcaagctccaccttgggttcacaccattctcctgcctcagcctcccaagtggctgggactacaggcacccgccaccacgcccggctaattttttttttaatttttagtagagatggggtttcactgtgttagccaggatggtctcgatctcctgacctcgtgatccacccgccttggcctcccaaagtgctgggattacaggtgtgagccactgcgcccggctaggttttttcaaattgaaaattttttttctttttctttctttttttttttcttttgagatggagtcttgctcttgttgcccaggctggagtgcagtggagcaatctcagctcactgcaacctctgcctcccaggttcaagtgattctcctgcctcagcctcccaagtagctgggactataggtgtgtgccaccgcgcccaactaattcttgtatttttagtaaagatggggtttcaccatattggccaggctggtctcgaactcctgaccttgtggtcctcctgcctcagcctcccaaagtgctgggattacaggcgtgagccactgtgcctggctttaatttgaaaattttaatgttacaaatcaaaggtaggtgttaccaaagtatgttaagcatgagcaaaagtgcatttgattgttcagagggccaagttcatgttagctttgggatcatgcctccagagatgtaagtttaactattatgataataacaaagtaataattatgccatgtgccaaggattctattagactctttactatagttaattaaattttaatcttcacagtgccctgaacagcatataatgggtaaaccgagggacagacagtttaagaaccagtttaaaggctgggtgtggtggctcatgcctgtattcccagcattttgggaggctgaggtgggcggatcacttgaggtcaggagttcaagcccagcctggccaacacggtgaaaccttgtctctactaaaaacacgaaaaaaaaattagctaggcatggtggtgcgtgcctttagtcccagctactcgggaggctgaggtgggagaattgcttgaaccccggggatgggggcggaggttgcagtgaaccgagatcatgctactgcactccagcctgggtgatagactgagactccatctcaaaaaaaaaaaaaaaaaaaaaaaaagaaccagcttaaagtcatacaggtaataggaagtcaagcagaagttgcaaaccagataccttttgctacctttacaggcttgctactcagcctggcccacagaccagaagcaattagtgagacctgggaacataaagaaatgcaaaattttggtcactgatacctgcagtgccaaacctgcattttaacaagatccacgagatttgtatgcatgttaaagtttgaaaagcactgatggtgtgaaatgtggattatctatcaacattttccacaagagaaggtgggtaactctagccagtgtctccaccactgtgaattgctaatccagctgctgctttgcttcagatcctgtttaatccagaggaacaattgactaattctgcttgtggaccttcggtcaaagtcttaaccaygccaagtatagctcagtgttttaacagcttttactcatggactgaacacatcagttttatagaccatggcttcattctggataggcatttcccaggttaaagagaacagtgctaaaaatagcattttctaaagaaacttgaaatcttctggaatatttgatgtgttttatggctagcaagaaaacagatttgtataaactggcttccttactaatttcattttgtgaacttaattattctatcacagggacagtgataggtaaagctaacttagactagagcagcactgttctgtagaaatataatgcaagattcctgtaattttaaattttctagtagccacattaaaaaaggtaaaaaagaggccaggagtgttggctcacgcctggaaggctgaggcgggcagatcgcttgaggccaggagtttgagaccagcctggccaacatggtgaaactccgtttctaccaaaaatacaaaaaaatttagccaggtacggtggcgcatgcctgtagtcccagctactcgggagcctgaggcacaagaatcgcttgaacccaggaggcagaggttggagatcgcaccactgcactccaacctgggcracagaacaagactccagctcaaaaaaaaaaaaaaagtgaaatgtagtccaactaaaacaatacaattgtgtttagtggaaaaatatattgcttcagttataaaatttaaatgaattaaaattaaataaattaaaaattaagttcttcagtcccatcagccacatttcaatatcggatggtattggttgcttctgatataactgatttcagacatatgaaattgatcaccatcctagatggtcagtaagttaatgccacaggatattgtagtctattaataacattgtagaacagggcccagtcgttcacacctatattcccagtgctttgggaggccaaggtgggagggttgcttgaggctaggagttcaagaccagcctgggcaacatagtgagaccctgtctctacaaaaataaaaaaatgaaaattaaaaaaattattgcacagagaataaaggaataaaagcaatttggatcataaagcatttactgattccccccttttcatagttggagttaattttccttttattggttcacaatttcttaactcttcaactgcattaaactgtaagattagagccaggagttagggtgccatccacttttcccctctatggtcttagattctttttttttatagcccgcatgcttctttggaaagtgaggtaattgtgtcaaataggatagccttgagtggggcccagaggttgtaaaattttatgtctgtacctgattcacctggtaacttgctaaaaataccgatgtccaggcctacctttctagattcggatacataaagtgacactttccatattaaataagctgctctaagtgtttctgaagttcaggaacgtttgggaccatcagatccagcaattgactctcaaaggctgcggactggaattagtacgtcgtgctgccgttgccaggcattttatattttcctaggctgaggcttcccaggctgttgcttttttyccccccacctttgcagatggattttgcaggctgttaaatcccactcccgaagacctgccctgacagcgcctctttcctaagtgctgttacagggagctgagcttgccgaggtagacagtggccacgtgactgctaaaccggttgccagaggcgcggccatttttggggcgggcacccaatctctcgccctgtaaactgcggggtgacgggacgctgttactaggactcaagatggccaccgcgcccgctagtcatctcgctagcccgcgcgccagtgagctggcacgagacacgcggtggcccacggcgtctggggacgatctccagcccttcgcacggggcggagcgcccgccttccctccaatcagcacgccgggccggctagccaggggccgcccgcgcgcggggtgtgtgaggacgcgctcccagtcgctgagtgcctgagccgggaagcagttgctgtggtacctgctgctgcccgagcggacgtagagcatcggacgcgggcgccgtggcgytgggcaggagggcgaagccatgacgtcagtcaggtaacgagcgggcggctgccttgactgctccgagctgggcgttagcctcccgagcgcgtgagcactgtcgctccttctcgcgggtggtctggagcctgcctccgcctctggtycccctcgtgttgggggttccctccgcacttttcatttgggcatttctgctttcctcagaagttttcgggtctgtggcacattgcggagttctgtgtgtcgctgcttggtcgaggtgaccctcgcccaaattccagggttgcaagcgttcttgggtgtgtagtggatttcccatgaaaaatgtgccccacccgcgcccccgggggcggcccagggccggagggagcgtggcgtgcacagtgtgtgtcatgcctgcgtgtcatgccctctgacagaacttcattgttggccgggagcagacctgcaaagttggcccttctctgatgcaggtatattgccctcaagttgtgaaattgtgtgtctctaaaatgtttgctcatgactggaattaggaccctggttcccgaaggtaccatcttgtttctttactccttttatctcagagtcacaagtgaaatgagttgagagatactgggcatgtagcgaaatccatgaaactggagactttcccccaattgctcttccagtttggaaggttctttttttgttaatgaggacaggataatgggcttgtccactttctcccagtagccttgactgaatgtttaatttacgctagttcaactatttataaaaagagataaattgccttatatacccagtgttctgactggcctttttaaaagcagaacttgggctttgttgtcccagagaaagggaggccccagcacaaaaatgtgaagagaaataaaataagctcatttatggtctatgagctttccaggctccacccgtcctggtgatttgagggcttctcaatgccaatttttactacattgtgtttaagagacagcttgggaacctaaccctcagtaagatctaactgtgctgaactcggacatagtctgtctcttaaattgcataattatatatatatatatatatatatatttttttttttttgagacagagtttcgctcttgttgcccaggctggagtgcaatggcgcgctctctgctcactgcaatctccgcctcccgggttcaaacgattctcctgcctcagccatccaagtagctggaattataggcgccagccaccacacccagctaattttgtagttttagtagagatgggggtttcaccatattggccaggctggtctcgaactcctgacctcaagtgatccacctgccttagcctcccaaagtgttgggattacaggagtgagccaccgctactggtctaaattgcttcattctgtactaacatagacaaagtacttatctcattatgcagaaggagattcaggtgctgaaacatggagacccacatggaaggatttcacagtaaattatattggggcatataaatctagcttttaaagctaacagtattttaggatgaattagaattaggctattatacccagagttaattccccttcttcccattcccactcttattatcacagaatgctactaattaggtgtaggggtcaaatactttctgtgttaagaatcagttgttatgtggattcagttttaattgactatcatcttcctgaccgtgcctcattggagaaacatccaaatctaaagcttctgctgtttaataagtgacagcaggatgtatcttttactgtaggggttgatagttttttttaaaagactgatgtaaaggttgacaccagccttacttgacatgttttgaaaggatggataactgataataaaatttatttatgcttgtttcttcagatgtcagtctgtattttacataatcttgaactatggtaacatggctcgagaaagctcttttagatgttatttaaaccagctattacattttacacctgaggaaactgagacaaaagttgagtgccttgtgcaaaatcagcggcaaaattaggaattgaatccagatttccatgatttagtgctctgcatggtgcctttgtagaaacaatatactatttaaacttcctgaaaaagctgtttctgtggacagaaattgtaaagtatcatgagagacaactatagtaactcttttgctttcttcttatcctgcaacgaacttgataactggggtttagaagtaggcagggttagccaagagaacacaactactgggtgttgggaagtgcagggaggccattgaaagtgaagtgactctgtatggtgatagttttgaatgagttggtcatcctacagataccagccatttcctggtgaacactacatttaatacaattatgtcatatctttagtttttgcaataatgatgtcagacatgttcctatcagaggcatttgagccagagygactccatcttgaatagggtctgggtaaaataaggctgagacctaccagggtgcattcctaggaggttaggcattcttagtcacaggatgagataggagatagtcagaagatacaggtcacaaagaccctacaacaggatgcagtaaagaagccagcaaaaactcaccaaaaccaagatggtgatgagagtgacttctggtcatcctcactgcttattatacactaattataatgtattagcatgctaaaatacactcccaccagtgccattgacagtttacaaatgccatggcaacgttcagaccttaccctatatagtctaaaaaggtgagagaccttcagttctgagatatcagaactgatttcttcctttcctggaaaactcatgattaatccaccccttgtttagcatacaatcaagaaataacaagatacttagttgagcagcccatacccgtgctctgtctttggaatcgtcatccttttgtttctttatttctctaataaacttgctttcactttatggacttgccttgaattctttcttgcatgatgtctaagaaccctcttggggtctagatcgggacccctttctgttaacattcccattttgtgctcagtctaacagtagcctaaaaggtaggtattattgacccccttttactgataagctgaatgattacaagatatccaactctgactttgtgtccaatgttcttgttttataccacccttaattgttgctaaatatagtagtatgtgactcttttcatagcaatggctatgaaagaatacaggattggaaatcaatgaggaccaatggtcagaatatcttgggccccaytgagggccttttctgagttactgagcttccatttctcttttctttttattattattattattattattattgttattattaattattattttgagacagtgtcttgctctgtcgcccaggctggagtgcagtggcgcgatctcggctcattgcaacctccacctcctgggttgaagccattctcctgcctcagcctcccgagtagctgggtttacagacgcctgcctcacgcccagctaatttttttstatttttggtagagacggagtttcatcatgttggccaggctagtctttttttttttttttttttttgagacggagtctcgctctgtcacccaggctggagtgcagtggtgcgatccggctcacttgaagctccgcctcctgggttcatgccattctcctgcctcagcctctctagtagctgggactacaggcgcccgccaccacgcccagctaattttttgtatttttagtagagacggggtttcaccgtgttagccaggatggtctcgatctcctgacctcatgatctgcccgcctcagcctcccaaagtactgggattacaggcgtgagcaaccgtgcccggctggccatgctagtcttgaattcctgacgtcgtgatccccccacttcggcctcccaaagtgctgggattacaggcgtgagccaccgcccccagccccatttctcttttctattctggacatttgtttaatgaaataactcagtagcagagatactaatatgcatcctaccagtgttgttggataagtgtaaaagtgcttttaaattttaaagcattttaaaaatagaataaaagcactttgagccctctagagaatggtgtcatctgaggaaaaaaatgtttaaatcttaaatttttagacaggaaacaaatttacctatctaattttctcattttacagttgaattaaagcccagagatagtgtgacatgttcaagttcacacagttacatmtcttgaactagatatgagatctctagataccttgttcagttccctttctagtatagcattcaactctgaggaattcctaaataatgattttttttkggggggggtctctttaggaattcctaaataataattttaaatgaaaacttttctttttttttaacttaagatctttgaatttggctggagttagtatttcatcatttgtattctattctacttaattactgattaagagtctaaatttacagcctctgaaaccagatatccttggggaacaacttatatcctttgttatgtatatcagattcctactggtcttcatttgggaaatgatagaacatatttgataaattgatgcttttgtcattttaaattggcccaatagttaagttggcgcctgagttaagttcaggagacagaggaagatgcagaatgtcaggattcaaagaggatcttagcattttactttttttccttttctatactggatcttgtgtccaaagtaaagtgaaatgtcctacttagacctagtggtagagcctaagatagaatttagaccttctgactcctaatttatgtatttttcactgagcaacactatttcaaaattcccctctgaatattgccttgttttcctaacatcagtgtctagtctggttttgggcatcgcttacagcttgggtttgcgccagggaagactaggaaatggagttggggaatatttgttgtagagctaatgagccctattctttggtctgcccagataggtcaggtttggtctaaaactattctgggactctggacatcactgtgccctacatgatgattctggaacccacttttgtgggttaagcctacattggaaaatttatgtgggcagtgggtggggtcgtggggtattttccttctaacactcgaaactttttgaggtatgtccaatagaatctgccaagccactcagaacattcatatggagactaaaatctggctaagattgaaactgtctttgttgagttggtttctttagagccttaaagttttcaaactcatttttacctgtgtttttaaaatacgaattgtaaattcacattactgcacaattttttttatgctgtgggatgtttttagagaggtaagtgagcttttaaactaaaattgtttcatttatggaatattttgaagaagtaaaacagaaatctttttatttatttatttatttatttatttatttatttatttatttatttttgagacacagttatactcttattgcccaggctggagtgcaatggcacaatatctgctcactgcaacctccgcctcccgggttcaagcaattatcctctctcagcctcctgagtagctggaattacaggcacatgccaccatgcccggctaatttttgtatttttagtagagatggggtttcatcgtattggtcaggctggcctcgaacttctgacctcaggtgattctcctgccttggcctcccaaagtgctcacaggcatgagctaccgtgccggccaggaatcttttatgtgcaacgttgtcagctgttaatgctcctatttatraataggtcacctttgtttgaaaaaagcgtacaaggttttctaactccaaatctttccagccacaatattgctacgttaagcagaactgtcaaagataaaacttgaaccaaagtgattttctagactgtttgaatgttaaccctttcctgcaatattggttaacagtcacgtctccctacctcttcatacctccttggttttattttattatttttattttttgaggcacggtcttgccctgttgcccttgctggagtgtggtggyatgaacacagttcactgcaacgtcaacctctgggcttaagtgatcctaccacctcagcctcctgagcagctgggagtagtcccacttgtagtccctacagtcccacctgtagtcctgtagtcccacctttgtattttttgtagagatggggtttaaccatattgtccaggctggctttgaactcctgagctcaagtgatccacctgctttgacctcacaaagtgctgggcctcccaaaatgctgggattacaggcatgagccgctgtgcccagccacatccttggttttaaattgttatttaaaaaatactgttgctgggcacggtggcacatgcctataatctcagcactccgggaggccgaggtgggaggatcactttgaggccgggagttcatggccagcctgggcaatatgataaaaccccgtctctacaaaaaatacgaaaatttgcagggtatgatggtattgtgcctgtagtcccagctacttcagaagctgagtcaggaggatcccttgatcctgtaatgaaatatactatttttttttttttgagatggagttttgctcttgctgcccaggctggagtgcagtggcgccatcttggctcaccgcaacctccacttcccaggttcaagcaattcacctgacacagcctccctagtagctgggattacaagcgtgtgccaccacacctggctgattttgcatttttagtagagatggggtttctccatgttggtcaggctggtctcgaacccagcctcagcttacccacccacctcggcctcccaaagtgctgggattataggcacaagccaccacgcctggccatgaaatatactactaataaaataaaatactgtgataaaacataaataaacatttttattttttactttttacttttttagctggcattctggtctgagattattttattttatttttattttattcgagacagagtctcgctctgtcacccaggctggagtgcagtggcacaatctcagctcaccgcaacctccgcctcccggattcaagcaattctccctgcctcagcctccygagtagctgggattacaggtgcccaccaccacgccctgccaatttttgtatttttagtagagacggggtttcacaatgttggcaaggctggtcttgaactcctgacctcaggtgatccacccaccttggcctcccaaaatgctgggactacaggtgtgagccactgtgcccggcagagatttttattttttaaatggcaaagctaggttatgaacaggatgaccatatgttccagtttgcccaggacaattctggatcatgcctgttatcctgacattattatttattattattttttcttttgtagacacagggtcttgctctgctgcccagctggagtgcagtagtgcaatcatggctcactgtaaccttgaaatcctgggctcaagtgatcctcccacctcagccctccagagaggctgggactataaacacacaccaccatgcctggctatattttgkgtgtgtgtgtgtgtgtgtgtgtgtgtgtgtgtgtgtcaggggggtgggtaaagatggggtcttgccatgttgcccaggctggtcttgaacctcctggcctcaaactcttggtcaagtgatcctcccgcctcagccacctaaagtgctgggattataggcatgagccattgtccccggctatcctgacacaattattaatagacacataaatgtgtctcatttactctcaaaagtgtcccatttggataataaattatctggtcacctacatatgcattacaatcattttgttgtactaggttttgtttgttgaaatgttatttgaactaggaccataagataatggaattttggcctattttgggtacatttggatgtttttcattggtcagacatttttattgtatggagagttctgagtgtacaaatgtatattaaatagtaatgcacatgatttgaaattagggattatttgttatcttacttttgggaggttacataaccttgaggaacctcttgtttcctcatccgttaaaaagagataatagcgatacctatcctacatgggtgttttgaagatattaaagaggtgacataccaaaaaatgcattttaagttgaaaattgttatataagtgttagtcatgtcacacatgtgcctttctgcaattgaatttaaaatgaataattttacctagtttggggaacttactatttgatagagcactggtagtgttttgctgtaaaggagagcagggaaataatggtagttggaagtacatgctgggctaaggttttctgcggggaggttttgaaattttcacatttgtgtgctgaaaagagtggtccaatagaaagcagaaaaaatagatgatgcttgacagaaggaagaaatcaatgttgagtaggaaagaaggatagaatctagaatacatatggaaggattggctttacgtaaccaagaaacacatttccctagtctgttcactttaaaaaaaaatgccaacaatataatttttttttttttttgaagcagagtcgtcggccggcgcggtggctcacgcctgtaatcccagcactttgggaggccgaggcgggtagatcacgaggtcaggagatcgagactatcctggctaacacagtgaaaccccgtctctactaaaaatacaaaaaaaaaattagccaggcgtggtagcgggcgcctgtagtcccagnnnnnnnnnnnnnnnnnnnnnnnnnnnnnnnnnnnnnnnnnnnnnnnnnnnnnnnnnnnnnnnnnnnnnnnnnnnnnnnnnnnnnnnnnnnnnnnnnnnnnnnnnnnnnnnnnnnnnnnnnnnnnnnnnnnnnnnnnnnnnnnnnnnnnnnnnnnnnnnnnnnnnnnnnnnnnnnnnnnnnnnnnnnnnnnnnnntgcaacctacctctcctggggtcaagggattcttctgcctcagccccctgattagctgggattacaggtgcgccccaccgtgccaggctaatttttgtatatttttgtagagatggagtttcaccatgtcggccaggctgctctggaactcctgacctcaagtgatctgcctacctcggcctcccaaagtgctgggattacaggcgttagccactgtgcctggctctctcagtataatttacctaaagtcaaatcagccttccctttccttcccttcccttcccttcccttcctttcccttccccttccgcctttcccctttcccttctcccttctcccctttcccttctcctttcctttccacagggtcttactttgtcgcccgggcttgagtgcaatggggcaaacacgtctcactgcaaccttgacctccccagcccaagccatctacttgcctcagtcccccaagtagctggggctacaggtgtgcaccaccacgcctggctattttttttgtattttttgtaacaatgccgggggagtggggtgggggtggggtcttgctatgttgcccagggtggtcttgaactcctgagcccaagtgatccacccacctcggccttccaaagtgctgggattacaggtgtgagccactgtgcctgatccagcctctttttaattaattctgtcccccttctcacccaggcaaccacttttggacttcttttactatagatgttagttctgcctgttctagaacttcacataaatggaatcatacagcaaggagtattttgtgtctgattacttttgttcaatataatattttttagattcacccattttggtgtgtgtatcagtagtttttcccttttattgtgaagtaatattccattatatgtatgtagcaacaagtcttctattgatgggctttgggttatttccagtttttggttactatgagtaaagttgctatgaacatttttgtatatatctttatgtggacttgggtaaatatctaggagtgaaattgctgtgtactagggtagatttatgtttaactttagaaaccactaaacttttccaaaatggaaaatttaacactttttacattcccaccagttttttttttatgagagttcagttttccacattcttcacaatgtttggcattttaaaatttaggcattctcctgagtgtgtacttgtatttcatcatggtttttgtttatatttccttgatggctaatatgtgattattggccatttgcttatcttttattttgaagtgtcaattcatttctgaaatattatcactgaataatatttcattgtatagatatgccacaatttatccatttatcacttgatagatatttggattattttcacttttgggctattatgaacaatggtgctataaacatttatgtacaagtttttattaaacttttatgtgcaaccctattttattgggttgtctttttgttgctgatttgtaggagttctctttatatctgaatgcaggttatttgccaggtttctcagattttacacgcacatacacacacacacacactctttctctctctctctctaaatattttctcctggtctgagctatgttgttgcattttcttaatgccttttgagagcagaacttttaagttttgagcaagttgaatttgttgatttattttattttatggtattaccttttctgttctaagaagtctttccttactctctgctaggcttgtgaaactattctctcatggtttttttctagaagctttatgtttttgtcttttgtatttaggcctatgatctatcttaaactactcttttgctatcatgtaagggtttctcaaaaggattttcaattaattgattagatagctgtgggtcttttcttggatttgttctattctgttgatttatttgtatcttcttatgtcaatgccacactgtcttaattattgtagctttataagattggtattgttactttaaattttgatagaattaatcagtgcagccgtgtgggcctggagtgtttttgtgggaaaaagcagaaggttttaaattagtgtaattacttttacaggtttaattactttagctgatatataagcattcaggttcttcactttttcctgtggcagttttaagaagttgaatttttaaatgaatttattctcaattgttgagttgttataaagttcataaaatttcctaatattctgttattgcctgtatgaactgctgtatgtctccatttgcattcttgatgttggtacttcttttgaatttttggatcagttttgctaggggtttagcaattaatcttttcaaaaacccagattttgttttgttgaatttctattttggacatgtatttttaatttttttttttttttttttttttgagacggggtcttgctttgtcacccaggctggagtgcagtggcgcgatcttggctcactgcaagctccgcctcccgggttcacaccattctcctgcctcagcctcccgagtagcagggactaccggcacccgccaccacacccggctaattttttttgtgtgtttttagcagagacggggtttcaccgtgttagccaggatggtctccatctcctgacctcgtgacctgcctgcctcggcctctcaaagtgctggtattaggggcatgagccactgcgcccggccaccttgctctcctcttgtggatttgatttgctctcttttttctaccttttttgagttagaagtttagattattgtttttaaacctttcttgttttctaatgtgcatttcatttcattcattcattcatacattcattcagagacggagtcttgctctgttgcccaggctggagtgcagtggtacgatcttcgtttactgcaaccttcgcctcccaggttcaagcgattcttctgcctcaggctcccgagtagctgggactataggcgtgcaccaccacgccaggctgatttttgtatttttagtagagacggggttttaccatgttggccaggctggtctctaactcctgacctcgtgatccgcccaccttggccccccaaagtgccaccgctcccagccacatttctttcattattattattttttctttgctaacccctagtagtcattctaatgtacatttcttatataattaacattttcttctaagtactcctttagctgcagcatacaatttcgatgtgttcaattcaaatttctatttccattgtgatttttctggtccacaggtcatttagaagtttattgtttcttaatatttggggattttttagctattttcaattttacatggtgttcagggaatgcgttgttgacatattgtgtacatatctgtaccatatatctgtaaatgataagttgtttatcattttaatcctttgatagctactgagattagttttaaggcctaccctgtggtggtctgttttggtgaatgttacctgtgtctctaattccgctctgcaatattttgaggttttcagtgtagatattttatgtatcttttattaaatacggtgtatactgcagttattgaatttagtgttctataatttatcaattaggtcagatagttttatgtgtttgttactatataactgagatataattcagctactgtaaaatgcaccacttaaaaattgcacagctcagtagttttcagtatattcacaaggttgtacagccatcggcactatttaattccagaacgtttttgtcccccaaaatgaaaacccatacccgttagcagttactcttcatgtctccctaacctctaacccctggcaaccactaatctaccttgtccctacaaatttgcctattctgaacatttcctaagtggaatcatataatatttggccttttgtagctggcttttttttttaactaagtatgttttcaaagttcatacatgttgtagcgtgtatcagtatttcattctttcttatgactgaaataatatttcattgtatagatatgccccaatttatccatttatcacttgagagatatatgggttattttcacttttgggctgctatgaataatggtgctataaacattcatctacaagtttttgtggtgttctatttttctatttcccctaagggtagaattgctggggcatgtggtaattttatgtttactttttgagcaactgccaaactattttccaaagtggctgaatcactttataatttgcaacagcaatgtatgaagattccagtttctccacattcttgtcaatacttgttactgttctagtcttcgctgagaggctctgtgtgcttgttggagcacactttcagcactcaaccaggctttcagttcatccatagccttgacttcctgttttgccgagcttcatgctcagtcagtggtgattgcttagggccttctcaggtctttcttgagtatgcccataggcctgggcacactgttttcatcttccagggtcttaggaatttcagaacttttcaaaactccctatggacatctcattctcctacttttccttttgtgttttttggttagcttgtttgccccagctgcttcagggagctgaaatgttaagcaattgtagctgattgtttttgacaaataaataccttgggggaaaagcctgttagcaatgggcaagctctgaatcaggttaaatattaggaagtcttgggagtggggtttttcagggaattgctagtcagctcaaataataactgtactctgaaaatgggactttgaaggaactctagccctgttctgtcacctccactggctgctaggctccaggattccacagattgtggtttgctgcttttcagggctagcctggagctgggaagaggggcatgggaataaggcatgttaaaatgccacaaagcttgctattcttactgagatgcagccatctttttttgaataaatgctccttggattgttgcaaactttttggttaatattcagagttctgaaaaaggctatttttgactttttttttttttttttgagatgcagtcttgcattgtcgcccaggctgaagtgcaatggtgtaattttggctcactgcaacctctgcctcccaggttcaaacgattcccctgcttcagcctctggagtatctgggattataggcacctgccaccatgcccagctaatttttgtatttttagtagcgacggggtttcaccaggttggccaggctggtctcgaactcctgaccttgtgatctgcccgccttggccttccaaagtgctgggattacaggtgtgagccactatgcccggcccaagtcttgacatttttttgccagtgttcttgttggttttatggaagagaggatttttggaggtccttactctgccattcccaatgatgtcacccaatttgttttttaagcattaaaaaaaattattttaaaatataaagacagggtctcactatgtcaattaaaaagacagggtctcgcccaggctggtctcgaactcttgggctcaagtgattgtcctgccttggcctcccaaagtgctgagactacaggtgtgagccaccacacctggcctaaacatttttaatatatctgtttttatatcctgttcctcccttttcttttgaaatacaactcacagaaattgcaaaaatagtacagaaagttcctgtgcaccattcactcaacttcccccaatgatatatcttttataactatagtgtgttaccaaaaccaggaagctgatttcggtgttatacaatagtattaaattaactatagacgttattagaatttcacgggtttttgtatatactgtttttaattgaggaggtggtggtgtatagttctataaagttttatcatgtccagattcatgtagctattaccacattcagggtattaaactattctgttaccacaaagaaatttcttcatattatttctttatggttatgcttttctctgaaccctaacccctggcaactactgatctgatttccatcactgtaattttgtaacttcgagagtgttatataaatggaatcatatagtaggtaacccgtagatacggcttttttctcacttagcacaatgcctttgagatccgtttaagttgttgtgtgtgtcatagttcattcctttttattgtttctcttttatgggtgtaccatagtttgtttacctatttacttgttgaaggacatttattatgtttccagatttttaccatttttttttctttttctttcttttatttgttttttttgagacagagtcttgctctgtcacccaggctggagtgcagtgccgcgatcttggctcaccacaacctccgcctcccgggttcaagtgatttttctgcctcagcctcctgagtagctgggattacaggcgcacactaccacacccagctaatttttctgtttttagtagaagcaagttttcactatgttggtcaggctagtctcgaactcctgaccttgtgatccgcccgcctcggcctcccaaagtgctgggattacaggcgtgagccactgcacctggcccattttttttttttttcaaacagatatggttttgctctctctgtcactcaggccagagtgtattggcatgatcattgcacactacagtcctcctgggcttaaagaattctcccacctcagcttcctgaggaactaggagtagagacatgcacaactgcacccagctagtaattttaatttttgtagagatgaggtcttactatgttgcccaggctggtcttgagctctggcctcaagtgatcctcctacctcagcctcccaaagtgctgggattacaggtgtgagccaccatggctggcctagtgttttacaaataaatctgttaggaacatttgtgtacagatttctctgtgtacttaagtttttcttcctctgggataaatgctgtgtagtgtgattctttaatttttggtgtgtctgcctgttttactaattactgaaagaagggtgctaaactaagattatgtatttgcctatttcttttgtttctaagtttttaaaaaagtattttgaagccattttatttggtgtgtacatattttgtattgttacctttagcatttcttttcttgatgatttgacctattttcatgaaatccctttgtatctggtgatactctgtattttaaagcttaccttgtctgtgtcttaatatagccactgtatagtgtctatatagtgtcttaatatagccactgtaatttatgattagtgttttctttttttttcttttttttattatactttaagttttaaggtacatgtgcacaacatgcaggtttgttacatatgtatacatgtgccatgttggtgtgctgcacccattaactcgtcatttaacattaggtatatctcctaatgctatccctccctcctcccgcctccccccaccccagtgtgattagtgttttcatggtgtgtctttttgctaactttttattttcaaaacttctttgtctttataaaagtgtatcttgtgctaggcatgctggctcatgcctgtaatcctagaacctagggaggctgaggcagaagtatagcttgagcccaagagtttgagatgagcctgggcaacagagggagacccagtctctattaaaaagaaaaaaattaactgggtatggtggctatagtcccaacttattgggaggctgaggtgggagagcttgggaggttgagcctgcagtgagctgtgattgcaccactgccctccagcctgggcaacagaacaggagcctgtctcaaaaaaagaaagaaacaaaagatcagaacctataatcacagaatcactgaaaacccatggaattatcatatgctagccattgggaatacaaatgtaaatgagatttcaaaaaaatctttaccctttgttgtctaggtggttaagatcagttgattgagataaagttcaaagcaacccctaaaatcaactaaaaagttcatcaaaggacttttagaactgagcaggagggaatgaataaatctttgggagggagggatgcagtgccttgatatacagtaccaggagccattttctacattgttaacagcactcttgagtgatgttggtggcagcttgtatatcttatgtggaagcccttgggtaggagtcgatcaggaaaaacttcccaagacaggtagcatacagggaattttaaaaagatgaatgggagtttgccrggcaaaggaagcaggagaagaactttacaagcagagtcttattcaaagaacagtaaggcattatgattaaaatagtttgtatatattagaatggtgagaggtaaggttaaagaattactgaattttgattatcttagtgtgcacatttcttcccattttaacaactctgaaattggcatacatcttacaactgattgtgttttgcatcaccattggaaattgggattattttatgaataatggcatcttagatatgatgaaatatggtaagtttgagtagattcaatgtcctttaagttatgcttttggattttatcctattaataatcagaagctaggtagattttaagtagaaaaatattatgtctagaattgtttaaaataatatgattttggtgatattgtgcaggatttattgtggctaaaacaattgctaacaatgtagaaattcaggcaatgtctgcagagggcctagtgctagtgggtgtattgtgggaaatccaggtacaggaagcgtttgataaaaccaagatgatgtcgttactagtaagatggggctagttgacgtagagagaagagtcatataaagctgaggtttctggatttaaagagaagatgactggtgtaacagttaaaggcagtcattgttagtgtttattctggcatcataattaaatgtttctattactgagagggctaatcaacattcaaacattaatatatcaatagccaagaaaagattttctcaggaactcttactgtaaaatatatgtcagtataaaatttgttgactgtccaataaaataataattatagtgtaggtttatgttggctgcaagcctaaattatgagacatttataaaattactgaccgctcccccccccaaaaaaaaaagattgttcagaatctctcatcctagcatccattccaagaaaaagatattgctaacatttggaataaaaagtaatcccagtacgggttagtcatagtttttggctatagactaaacctcatcttgttcacattctagtagaacaagataaaaacaaatgcttattcatatagtatgttcatcatttaagaaggtcatagtatttacyggcctggacactagtttatatgtgtttgtatttaagaaactagccattataatctcaattatgtgcagtgaaggagagagaaacgtgacatgagcaaagttttatttgcttttgaaaataattgtatcttttttacttaacttactatttcaagatatcttttatatgctactttatttaattaatttgtttttaagacagggtcttattctgtcacccagggctggagtgcaatggtgcaattacagcttactgcaacctcgaccttccaggcttaagcgatcctcccacctcagcctccctggtagctgggattatgggtgtgcaccaccatgcctggctcaattttttatatttttctttttctttctttctttctttctttctttttcttttctttcttttttttttttttttttttgaggtagtagcatactcatggctcactgtagcctcaacctcctgggctcaaggattcttccacctcagcttccctagtaactggggctataggcacatgccaccacacgcggctaatttttgtattttttgtagagatggagtctcgccatgttgcccaggctggtcttgaactcctgtgcagaggcaatgcgcccgcctcagcctcccaaagtgctgagattacaggtgtgagccactgtgcccagccaattttttgtagagatggagttttggcatgttgccctggctggccttgannnnnnnnnnnnnnnnnnnnnnnnnnnnnnnnnnnnnnnnnnnnnnnnnnnnnnnnnnnnnnnnnnnnnnnnnnnnnnnnnnnnnnnnnnnnnnnnnnnnnnnnnnnnnnnnnnnnnnnnnnnnnnnnnnnnnnnnnnnnnnnnnnnnnnnnnnnnnnnnnnnnnnnnnnnnnnnnnnnnnnnnnnnnnnnnnngtagcaggttcacttcaggccagagctcaagtccagcctgggcaacatagtaagtcctcatctctacaaaaattaaaattactagctgggtgcagttgtgcatgtctctactcctagttcctcaggaagctgaggtgggagaattctttaagcccaggaggactgtagtgtgcaatgatcatgccaatacactttggccccaccgacagagagaacaaaaccatatctgtttgaaaaaaaaaaaaaatgggctgggtgcggtggctcacacctgtaatcccagcactttgggaggccaaggagggcagatcacgaggtcaagagatggagaccatcctggccaacatggtaaaaccccatctctactaaaaatacagaaattagctgggcatagtggtgcgtgcctgtaatcccagctacttgggaggctgaggcaggagaatcgcttgaacctgggaggcggagtttgcagtgaaccgagattgcgctactgcattccagcctggtgacagagcgagattctgtctcaaaaaaaagaaaatgagcactaataatcttttctatattacagttttataataaaaatgcattacatattaaacagattcacaaagtgaactaatgacaatttacgtctgtccctatactttcagttgtaagtaactaaaaaccagcctcaaatggaaataaacaaaactaccgacatatgtaattgaaaagtccagatacctgggtgatgaaataacctgtacaacaaacccccatgacacaagtttacctatgtaacagacctgcacttgtacccctttacttaaaaaagcaaaacaaaacaacagaaaagttcagatggagtataggtttcaggtaaagctttattaggtggtccaacaacttcattaatgacctggtttctttcagttttcgcactctgctttctgtggtgttaaatttatcccaaggcagccacattgaagccattaggtttttaaggcttctagcaccttcttcatttatatctattagggaaaaatatgttctgtatctgagcatcatagaaaaaaatcttgggttcattctgattttcctggcttaggttacatgccagtctctgaactgattactaaggctagagaaatatattgtgctgattggcttaggtttgccccagggatcaattccacccaaattccattcttgagtgaggaaatttggggtaaaagagggaggatagcaaggaaaagatgacagacacacaattccagtttattataagaatgacttcaaatgaccttaactgaattgtaatattatttgggaacaagtcaaacattattaacatttaggcccagagatggtagatggcttgcttaagtctcccagcaagctacctcaagaactgagacttgggctgggcgtggtagctcacacctgtaatcccagcactttgggaggcccaaggcgggtggatcatttgaagccaggggttcgaaaccagcctggccaacatggtgaaaccccatttctactacaaatataaaaattagccaggcgtggtggtgggcacctgtaatcccagctactcagcaggctgaggaaggaattgcttgagcccatgaggcagaggttgcagtgagcagagatcatgccattgcactccagcctgggtgacagagagagactccgtctaaaaaaaaaaaaaagaaaaaaaaaaagaactgagactcagaagtgaattatttgactcttgaattgtacttcattcttagaatcaattattggcctctctgtaagactgtctttactgagtttttaaacggagtataataaactcttttgggaatgcggtagatgttcaaaggtttgacttcttaaaaagaggtgtaacaattatattccttaaaactgagaggggaccaattgagggtagagggattgatgtgggggcaggaggatacttttttgttgttattgtgatgaaaatgttccatagttttgtggttatatgactgtatacattgaactggatgcttacaaacggtgataaaaagggtgaaggaaaataaaaaaccaagtagcccaataacactgctcatccttgtttttttgttttgttttgttttttaaataacaagttctaggagtttttgtttgaataagaatatataaatcaggcagagtagtcccagtgaaatcatggttagattttactgtatttgtctgttgatccttcaccttctaagcacttaaaatacttttttattagacttgctttgatcacatatgcaatttaagtgtgaataagtaagtgtattatctttccctcctccactcagctttctttaaatagaaaagggacaaatatctctttattgcatattcagccatagttgctcaatctatggtgttaataagagactgtaattttatcttctaaaaatcattacagattataattataggctgtacctcattctcttaaagaaatattggcatgttagtccattgatattactgatagttgccaaatggtgagaatggtaactggtttggaggcaactgaaagggagggggaatcatcagtaaactggagaccaataaaaaattacacagaaacaaatctttttggataaactagatgaatgtctcttattgagactgatccaacagtattcactggcccatttcttgctgctagatgagcttctgtttaaggcatcacttgtggtggagttctttcttttatttggattggaaccatactgtgatctcttatggaaaacagacttcctccaagtctgttaaatataatttaaaattatatcgtttcttgttgatttgtttgtttttgttttgctttatttcatgttataggcatctgaaatgaatccttatatatataacatacaagtatatgtatgagaagacatgaatataagaagtataggaaacataagacatgaataaaagttttagctagacatttttagatgaaaagatgtgcatttaaatttgtaaaagttacaaatcgttctataaaaagttagcatatatttaaattttttggatacataataagagaattatatcacttctgatatccattgtgaagaccctaccacagtcatttttttgtgaagggtagatagggctcttgcttgtactcttccaggatgtgccacgggctccctaataacattcaggggagtgcatgtgcaggtttgttacatgggtatatcatatgatactgaagtttgggtttgtaatgatccccatcgtctaagtagtgaacatagtaaccaataggtagtttttgagcccttgctttcctgtctccctccctgattttggaatctccagtgtcttttgtcccgacatctttgtgtctctgcgtacccagtgtttagcttccacttataagtgaaaacatgtgatatttggctttctgtttctatgttaattcacttaggataattcagctgcatccatattgctgtaaaggacatgatttcgttctttttttatggctgcatagtattccatggtgtatatgtattgaattttctttatccattctaccattgatgggcacctaagttgattccatgtctttgctattgtgaagagtgctgtaataaacatatccctttttggtagaatgattcattttttttcattttttttattttttaggcagagtctcgctctgtcgcccaggctggagcgcagtggcacgatctcgactcactgcaacctccacctcctgggttcaagtgattctcctgcatcagcctcctgagtagctgggactacaggtgctcgccactacacctggctaattttgtattttttatacagatggggtttcaccttgttggtcaggatggtcttgatctgctgacctcatgatccacccacctcggcctcccaaagtgctgggattacaggtgtgaaccaccgtgcccagcctagaatgattcatttttctttgggtatatacccataatgagattgctgggtcggatggtaattatattttaagttttttgagagatctttaaacttcttttcacaggggctaacctaatttgcattcccatcagcagtttataagtattaccttttctctgcaaccttgacaccatctgtttttttttttttttttttttgactctttagtaatagttattctgggctgggcacagtggctcacacctgtaatcccagcattttgggaggctaaggcaggtggatgtgctgaggtcaggagttcgagaccagcctggccaacatggtgaaaccccatctctactaaaaatacaaaaattagccaggcatggtggcaggcacctttaatcccagctactcaggaggctgaggcaggagaatcacttgaacctgggaggtggaggttgcagtgagctgagattgcaccattgcactccggcctgggcgacaagagcgaaactccgtgtccaaaaaaaaaaaaaaaaaataggtattctcattggtgtgagatggtgtctcattgtagttttgatttgcatctttctctgataatcatctttttttctaaatgtctttatgctacctctaaaatgttctacgtataataggcaaatcaaatgtttaataaactggtgtgttaggtttattttcaggttgaaatgaagatagttatttttattttgtgtaccttttacatatcaacttacttttagaagtatttctaacttgtgttttgtgtttttttagagaaaatattctctttggaatgggaaatcctctgcttgacatctctgctgtagtggacaaagatttccttgataagtaagtattaaactcttcatatgcactatgtggaacttacatttgaagaagaatggatgaaaactttagaagtgaatttaccaccgaatgtcttcaattaaaggaaaactcaggaaatttaagtttggtgatagcaagtgtgctatcattaactattgaataactgagtacagttttccttgggaaaacttatatacattgctatttttacttaaaacttttttgcttattatttggaaggagaaaagtttatataatttacctaattatttaattccccaacttttaaactactgtcagtgagctacgtctataatggtatcataatctacagacattctaccccgaatgtgcccagtctggtttcctctcagaagctataatgggagaagaaagatgattagagaagacaagagaacgtgcaggatataattcagaggatatgaagctctgctgtttccgctttattagtaacttccaatgtttcaacttagctgagaaatcagtttgtttatttacctaagtatttgaggccatttsgtacaatagtccccacttgtgtccttgttttcagtttctgaggtctcagttacccataggacagtgtaataagacattttgagagagagacaygcaccacgtccacataacttttattacagtatattttaatagttgttctatttttagttagttgttgttaatctcttattgtgcctaatttataaatgaaactttatcatagtatgatgtgtaggtatgtatgtgtaggaaaaacagtgtgtgtgtgtttgtgtgtgtgtgtatatrtatgtatgtatgtatgtatgtatgctatstatctatctatctatctatctatctatctatctatctatctatctatatatggttcagtactatccatggtttcagatacccactggtcatcttacaatgcatctacctcggataacgggggcactactatatggcaaatttaagtagtaaaaaagattaatgatgagaaagcaagatcccccctctcctcacacaccctgatttctgtacccaagagtaattactttttaaaaaattgaggcaaaatttatatcgcataaaattgatcgttttaaccattataaagtatacaattcagtgactgccagtatattcacaaagttgtacaaccatcaccactatctaattcaggacaytttcatcaccccaaaatgaaatcccatacccagtaagtagtcattcgctattccctcctctaacccagtctcctgggaactactagtatacttagtttttctatgaatttgtctattctgagcattttatagaaatggaatcatataataatatatgatcttytgtgtttatatatatgaccttttgtgtttgggcttattttacttatgtaatgctttcaaggttcatccatgttgtagcatgtatcagtccttcattccttttaatagtggactattccattgtgtggatagaccacattttgtttatccattcattggttgatggacacttatgttgtttttattttttgtctattaggaacaatgcttcttatgaatattcatgtataagcttttgtgtaggaatgtgttttcatttctcttgggtatacacataggagtggaactgctgggtcacatggtaattctgtgtttaacttctagagaaaccaccaaactgttttccaaagcagctgcactgttttgcattcctaccggcagtgcataagtgttccagtttctctacgtctttgccaaagcttattttttattttttaaattatagccatatgartgggtgtgaaatgatgtctcattgtgattttgatttgcatttttctattgaaaacttttgatgttagcatcttttcatatgcttattggatatttgtatatctttgggaaaatgttgaagctctttgcccattttttaattgggtcgttgtctttttgttaagttgtaaaagttctttttatattctggatactagaccctatcagctagcatatgatttgcaaacattttctcccattctggggatttactttaattttttgatagtatcctttgatgcacaaaagttttaaattttgatgatgtccattttatttttcttttgttgcttatgcttttgctgtcatatgtaagaatctattgttaaatccaggatcacaaagatttgtgcctgtgttttcttctaagagttttgtagtttaaggtcttagatttaggcatttgatcaattttgagttaatttttgtataaggtatgaaataagggttcaactttattcttttgygtgtggaaatccaattgtctcaacatcatttgttgaagagactattcttttccccactgaatgatcttgatactcttgacaaaatcaggtgaccatagatatatgggtaaatttctggactccattctattccattgatacatatgtctgtccttatgccagtatgacattggtgtttttgtgtatgtgtgttttgttttttgttttttttttggagacagggtcttgctctgtcacccaggatggggtgcagtgatgcaatcatagctcactgaaaccttgaactcctgggttcaagtgatccttctatttcagcctcccaagtaactgagactatatgcaggtaccaccatccctagctattttaaatttttttttgtataaacagggtctccttatgatgcccaggctggtctcaaactcaagtctggcttgatcctaggcccaagttgtcttcccaccttggcctcccaaagtgctgggattataggcattagccaccatacctggcctgtacgacactgttttgattactgtagctttgtagtaaattttgaagtcaggaagtgtcagtcctccaactttgtttttcaagattattattattattattattaatttttaatttgagatccctcacaattccatatgaatttttggggatagctttttcatttctgtaaaaaaggcagttggaattttgattggaattacattgaatgtatagataaatacatgattaagtcttccgagttatgaagacagaatgtctttccatttatttaggtcttttttttttttttttttttttggagacagaatcttgctctgttgtccaggctggagtgcagtggcatgatctcagctcactgcaatctccatttcccgggttgaagcgattctactgcctcagcctcctgagtagctgggattacaggtgtgtgccatcatgcctggctaatttttgtatttttagtagagacagggtttcaccatgttggtcaggcttgtctcaaactcctgaccttgtgatccacccgtcttggcctcccaaagttatgggattataggtgtaagccactgtgcctagccttaggtctttttaaaataattttagcagtgtttagtaggttttcagtgcataagtcttatacttctttggttaaatttaattttattatttttgatgccattgtaaattgggattgttttattttcttattgttcattgatagtatgtagaaatataagtaattatgggggacaataatttttttgaaacttttttttatatcctggggattacccctgtaagtatatttggctaaactcaaatgtcaaagggtaaggcaagaatttataaatgtgtaaatttgacttacggtaatataataggaaatgtgctgggggtctaggataaactgggagatgtgttttatcctaagacattcagatagaaactttaaaacacactttcccagtcagaaaatactactatatacagttactttaatgattttagttcttttggttaccttgtacttttaaataatatactatacttacatttcttaaaatttctttttctgtcaaatttcaggctgggcgtggtggctcacgcctgtaattccagcacttttggaggctgaggcaggtgaatcacttgaggtcaggagttcaagtcatgccaacatggcaaaaccctgtgtctactaaaaataccaaaaattagccaggtgtgatggcacgcacctgtagtcccagttactcgggtggctgaggcaggagaattgcttgaacccgggaggcagaggttgcagtgagctgaaattgcaccattgcactccaacctgggtgacagagttgacactctgtctcaaaaaaaaaaaaaaaaaaaaaaaaaaaattaaaccaagccaaaccacaccaaaacaaaaaaacccaaatttcaatggaatccattgacttctcattatggagaacgagattactggtgcccctattctttcctatgctacttcttctatctttctattctattaactgtgtttttaaggttgatgttttcattctgttatctatctataattgttttcccaactttgaatacaaattcataatgaaagttgaaaatgacttacccacattatcactctgtgtatcatttattgcagaattaagtagtgtaccaggaatgtagagcaggttaacatttgaaatgtaattagaagactgggcgtggtggctcacgcctgtaatcccagcactttgggaggctgaggtggatggatcacttgaggtcaggagtttgagaccagcctggccaatagggcaaaattccgtctctattaaaaatacaaaaattaactgggcatggtggtgtgtgcctgtaatcccagatactcgggaggctgaggcaggagaatcgggtgaacctgggaggcggaggttgcagtaagctgagattgcaccactgcactccagccagtgtgacagcctgagaatctgtctcaaaaaaaaaaaaaaaaaaaagaaatgtaattagagtaattcactatagtaagaaactaacataacagtctaagaaaactccatataattatctcaatagacaaagaaaaaccttttgacaaaatctaatatctattcctgatgaaaaaaaataacttaaagcaacctaggtaactatgtcgataactttcttaaccctataaaggttacgttaggggaaaactggtagtgtgatgcttatatgggtatataacgtatcaaattgtatactttaaatgtctacagtttattgtatgtcagttatatatcaaaggctgtaataaacagaaaataaaatcagttggacatgaattcatgggtttaaaattagatctcttttgtttgtgtagtgtgagatattttgttcaggaagtcaactaattcatggtcactattttaaaaaaatcatgatgtataaaagtaaagagcaacttaaaaatttgaaattttatcrtgtatttcaaaagtaaaataaagtatagagacaaacccataaatgtagaacattttatatgggaagcaagaattgaaatttgggatatacacacagaccaggtggtctttgctatgtctgaagaagaaagataagattggaagttttataaaaaggtgaaatgttttgtattgttttgaaagaaagctcattggcactagttttggggaggtggcaagctttgattggtgagtgactgcagtgagtagaactagtcttttagagtcacagctcattgtttcagtagctactggataaaactgttttcagatgacaacaggcagtttcagcagccaggcttgcagagaattaccttcttggagcaatgttatgtgtgctgagtgctcttccccccagcctgtcacctgttttagtcagatatgacaagaatgacccaatttatatgattagctttcacacatatataatcagtgttgttattttggtgaacatgcctccagatgtttgttaggcatatataacctgaagatgaatgtttatgggctaatactatgtgtagtctttgttagtatgctgtttttcactcaacattatgtttttggatcactgtttttaaaatttcaggcaaatgtgatcagagtgattatgacttggcagctgtgtgatgatgtcacaggatccttagggtgtcgcttttccagccagaagccactgtggttggtggagcctttgcctgaggtttgcttgtgcctgccaggcttgttctgcttgtttggcctggcaggctgcgttcggctcatgctaccagcctggatcccacacctgccaagggcgagccaggtgcagagtggcgtggcaaagagtgtgtgagcaagcgaatatgggatctggccactgtgtacagccactcatgctggctgctgtggtggggtgggcatctccaggcactggcacaggtgctggcttcatgcaagcttgcggctggatctgatgcatctcaagtggcttccactgtaggaacccacgtctggacgaggataatatggtggtgcccagaagcttggagacaccagaaaccacagagccccaaagagagtgtcacagccctggattgggaaccccctaggtctgggctctcagaagggctgcagctcttctttccttcttgttgcctgcaaggtgctgagtggggtgaggcatattttagctctgtttgtgttacagctgtttcagtcctgccacttggtgggtcttcttatcctgcatccatgaacagtgaggtatggggacaactggagggtgagcaaggtggagaggagcttcattgagcaacagaacagctctcaggagacccgaagtgggtagctcctttctgcaggcaggtcgtcctgacaagtgttcacctctcagtgagatgagaccccgagggggtaactcctttccacagttggtagtcccaggtctcttctgtaagtctggctgagtccagggtttttaatgggcttcacaagggagaagtgtgtgctgattggtccatgggcggctatgggtgggtctggaaaaagcaccatgagtctcactcccctcagtggaccccacctggaactgatagcctggcccccatgcttcaggctgtccctggcttgaaggcagggcttcacctgaacccaccccttttttcccaggagagtgtctgcctcctgctgccatcaatcatgttgtccacagtgtgcaggctgttggtgatgagggtacttgctggccccattgagctgccctcagtcccaccttggcctccttcccatgcttctctgcacctaaagtccagagggggctgagggggcagggggctggtatgtcagtgctgccccgagcacatgcacacctgctgggttgtgacagtgcctgggcttggccacgactttgctccaccctggagcaggtgctgggatcgaggagaggccaggcatgggaacaggcacttctgagtctgcaggggaaagggggacttcccgggccccagagagtgcagggatacctgggtccacagccatggctgggtggctgcagctgcactcaggagggtggggctccagccctgccaacttggaagtgggtgtggctcccacctgttcccagctcccatgggctctgtggagcatgcagccctggctgcatctccccaattgtagccagtgtctttgcagcagctgctctagacagcctgctgctgccatcaatgacgctgctgggagctcgagtaacttctttgtttyacatgttttactagcagctggtcctaagtggctagctgaagttctattttatatttggaaggttttaatctttaactttgattttcaaataagtacttgaagataaaaaacaagtctttggaccctaacaataaaagagtcttctctattgttactcctggctatttcttccaaatatatttaaaaacttaccttatgatataaacgaatcgtgtttagcctacattttgagccaccattagataagtatttagataagtactatgtatatatatattttttatttttttatttttttattttttatttttgagttggagtcttgctctgtcacccaagctgcagtgcagtggcgcaatctcagctcactgcaacctctgcctcccaggttcaagcgatcctcttgcctcagcttcccgagtagctggaactacaggcatgtgccaccatgcccggctaatttttgcagttttagtagagacagggtttcaccatgttggccagggtggtctcgaactcctgacctctggtgatctgcccacctcggtctcccaaagtgctgggattacaggcatgagccaccgyacccagcatagataagtggtatattgctatggtttgaatgatggtatcctctccaaaaattcatgttgaaacttatccccagtgtagcagtataagaagtgtgactcttgggggttgaccaagttatgaaggctctgctcttatgaatggggttagcacacttgtgaaaggactcaaggttgaagggagagctctcctgcctttacattccttctgycatgtgaggacacagtgttcctcccctctggaggatgcagcaacaaggttccatgttagaagcagagaaaagcctcgccagacaccaatcttgctggtgccttaaccgtggatttcccagcctccaggaatgtgagaaatatatttctattgtttacaaattaccccaaacaaaataagaaaaataaaacaacaacaaaacataagtaagtaaataaataaatagcctggtctgtggtatttttgttatagcagcacaaggggaccaagacatataccaaatgaatgagatatatactgattagtatcttacactgtgaaagtgagttctaattgtcaaaattcatttgataaaatatttttctgattctgatttttttttttttagagacaagtttttctgtttcccagactggagtgcagtagcacaatcatagcctagtcactcactgcagcctcaaactcctgtccctcccaccaaaaaaagaattgaaagttattaggaacacctgtggcagaaagtacattattgaaaagaatcttttctagtaaactgtagggacacagtgggcatgaggggataggaaatgtggaacatatgaatacctccagttgagccctggtctgtaattatggaggtatgtattaatagggatgaaaaaggcagggaaggaatgtgtaaggtaggtttgccttggtttttcctgacactagataaatatgaaagtaagaggaatgagagaatgaatgaaatggtaattgagaaaggaaaaccatcagtagaaatgaaaatactcagttttggctgggcgcggtggctcacacctgtaatcccagcactttgggaggccgaggtgaacggatcacctgaggtcaggagttagagaccagcctggctaacaaggtgaaaccccgtctctattgaaaataaaaaattagctgggtgtggtggcacacgcctgcagtcccagctactcaggaggctgaggcaggagaatcgcttgaacccaggagcggaggttgcagtgaaccgagattgcgccactgcactccagcctgggcgacagagtgagactccatctcaggaaaaaaaaaaaaaaaaaaaaatagaaaatactcagttttatgacaggagtagttgaggagacgtgtttttcttacagatctaaacctttaataaacatacaaaccttacatgagtttttattaatctgagtatgcatgaaagatgttacttaatgttcaaacctaaaatgcccgaagtagctggctgtggtggtgcttgcctgtagtgccagctacttgggaggctttagctgtagtgcatcatgattatgcctgtgaatagccactgcactccatcctaggcaatatagtgagaccctgtctctaaaaattaaaaaaaggaaaatgctcaaagtaattggccataaattttagtgctgattattcagtgccaataatttacaactgaattatttctataaataaaaatttatttcttctacaaatgggtgtatgttagctttgaaagtgaaaaaaatatttagtgtcaagtgagactgcatgtgttaggttaaaagctagacatttaattgttttgctttaaaatgaattgtaaactgctctgacacttttgtagttaattttttttttctttgagatgaagtttcactgtcgctcaggctggagtgcagtggcatgatctcagctcactgcaacctctgcctcccgggttcaagctattcttatgcctcagtctcctgagtagctgagattacaggcatgtgccaccatgcctggctaatttttgtatttttaatacagacggggtttcaccatgttgaccaggctggtctttaactcctgacctcaagtgatccacccacctcagcctcccaaagtgctgggattacaggtgtgagctaccgtgcccggtcttttaattaattctttataaagctattgccatatttttttctacagctttcaacattatgttttgtatatttaggtctttaattgacctgaatattctgtctgggattttgtttagtatttatggattaatttggaaaaaagagatctttaccaacaaattttcttatccttacaaatatttctttctgtattttaggtattcttctattatcttttaataacatgtaaaatttaaatacatttaatatgggttacaaaatggttaggctgatttttttaaaaaacgtatacatcttatggtagtgatcatttgctaaatctgttagattcaaaaattctaaaagtaaatgctttttagaaaaaaattcagaccatgtagaagtcaataaagtacaaatgaaatctggggtcagtatctttgcagcagtgtgtgctgtccactagaatgtttcatgattatggaaatgttgtgtatctgtgctatccaacatggtaaccactagtcacatttggctttgatcatttgaagtgtggctagtgcaactgatgaatttcaacattttatttcatgttaattaaattttaatagatataattagcatatatgatattaaccagtacagcttaggtttattgtaaaattttacatttctttttatatgtttatattttttaaaggtatcttcaaaaaaagttgtatctattgtgtatatgatatatttttctacaacatattctagattattggtggtgtttggaaatgcttcttaagtttgaatattttctcttatttgactaccttgtgacctacattaacagatagtctttggttattctgcttctctccttcaaaattctaaattcttagaatttgaaataaactgctatttgaatctttatgtcatttcacatattgagtgattggtcctgagttgctctggggcttcctcaaaaaacaacctaaattatggatactaaatgaacacagactactttccttcattttgcccaaatagatgctgttctttgggttctttgatgttcaaacttaactttgaatattgaaggaaatggtacttctaaggataagtaaacatagattcttttttaacagttcatttcacagctcaacacacactttttggagcatatgttttatggttactcttttgccaaatactgggaatacaatattaaataactgttttgcctttaagcagcttgtaatctaattgaggagacagatgtggaaagaaatcacttacttcttcacagtggcattatagaatagaggttaagagtgtgctctggagctgtgtgaccttggttatctatggaagctcagtttccttgtgagtaaaataaggttattagggttcttgtgaggattgaatgagattatttgaatgtttggcatatgttagctaatattactggctactgagcttgaaatctctcgtgcctctattattggcaatggagagcacttgagagatttaagcaggcagatgacatggttggattcatattttaggattatgtgaattgctttgtctgtagtggatcaatagatttgaggaggctatagtgataaacctgttgcgagatgatgacttgatcactttagttatgatagaatggttgggagagagtgcagtaatactttcgtgttatcaaggtaagacttgattgatttaatgaagagggtaaaggagttagagataacatttgaatttttggttttggtgactgatggtggtatttacaaatgagttagggagtataggaggaggatatggaagaggggcttgaaagattgaattgagttttgttcaagcttgagatgactatgatatccaggcaggcatattcaggagacagttggatttatgtttttggtgggtagaagagtcatggctggactccttttgtttctggagacagggtcttgctgtgttgcccagtctggagtgcagtgagtggtgctgtcatgcctccctgtagcctcccaggcttaagcgattctcttacctcagcctcccgagtagctgggactacaggcatgtgccctaccatgcccagctaattaaaaaaaaatttgttttttagagatgggtctcactatgttgcccaggctggtcttggaatcctctgacctcattctctcaaagtgctgggattacacatgtgagctacagtgccttgcctggactctttaattgtatttaattttacatagtttgacgcaatattattcaataaatggtagctattactagcactatttttattattatgtggctggtatttaaagcaaccagtagatgaaactttctaaaaaaaaagaaagagtaaaaagtaaaaggagtgggctggaagctagaacatttaatagatggatagataaagaatgagtatagaatgagattaagaaaaagcagaactaagacaagctctgatgaagtatgatgagtttatataagaatagtcaataatacctgatgcaacagagatatctagtaaagtaatgcctaaaagggtcccctgtatttgaatgggatgtcagtggcgccctctgccaggcaaatcacagtgcaaatatggagacagaagccagaaataaaatgtattagcaaataaatgggaggttgatataacatgggccggttttgctgatgtgacccaagagctaagcagtgatatcaatatcttccaattccaaattttaaaatgtcctttaataaaatatgtggctagtcattttgaacaattatcagtaaaatttttaaaataaaaagcataagaaaaattaagaatacaaagagtatagttctattttaggtatttaggtttaaatctagtttaattctttcagctttctctaattgagttttaatcctcgtttactttgctaatgagatttaaaaatattattttcataaaccttgtaactttttgcttttttattctaaccctgtgatttactcttaatctatttctttataagcttcttaaatttcagtccagctttagtctcaaacattgttgtagtgattaatggttttgcccccccattttcttcctttgtaatatattttaatcaacttttttttaaattggaagagccaattaaatatgttgtttaaaatcttgccatatccacactgtctacctgattggttttgccaattctgtaaaactttacttgatactgttgggattctttggactatgtggcaatatttgtagatttatagaaattttactgatttaattcttggaaggcaattttagttccaagtatttatagaatattttattgtcatctgctatgtaccaagtcttaacttgacattaactgtgcaacattaggcatggcacctctcttatgactgtcctatttcagaacttcacagtctgttcctgcgcctttcaaggcactaagctctgtgctatgctgatcttcagaggaggagcacatttgaataaaaagtgtttgtttcagtctcattaaaaggctcttataaaagttatgaacatttaaaagtgccctttcctccctttttgagctaattgaattcttcattttataggggtagaagattccaggaagagggggcagggatgagtatttatcataattgttaaataatgcgctggacactttttgtgtaatgttatttgatctggatagcaaccctgtgacataggcaggtttatcctcattagagaaattaagtggcttgcccagttcagaaaacaagttaatgtcagaatcaggatgatattgcaggttttttgatttgtatctagtgatttttttcactcagttgttctctttgtaggggctagaggcagaataaagaggccccttccctgtgctccctcttgcttccccgtcttctattctttggagtgtatgtcatttttctccagtaatttagggcagaaaaaaatgttgaggactaccactgtaccattttgttgtctctgatttttaggaactatgttcatggtaagaattgattataaaagaatacctatctatgccattagaaaacaaaacatccaaaatataggctgtgctttgcatcattctatgaaagccatggtgggaagttgggttatagctttctactaagttgaaagtaggctctgtcgcctaggttggagtgcagtggcacaatcttggctcacttacaacctccatctcccaggttcaagtgattctcctgcctcagcctccccagtagctgggaccacaggcgcctgccaccacgcctggctaatttttgtatttttagtagagatggggttttgctgatggggtttcgctgtgttggccaggctggtctcaaactcctgacctcaagtgatctgcctgccttggcctcccaaagtgctgggattataagcatgagccactgcgcccagctaatgatttttaataactttatataatactgataaatcactcttttttttttttttttttaagacagagtcttgctctgtcacccaggctagagtgcagtggctcgatctcggctcactgcaagctctgcctcctgggttcaccccattctcctgcctcagcctcccaagcagctgggactacaatgcctggctaatttttttgtattttttttagtagagacggggtttcaccatgttaaccaggatggtctcgatctcctgaccttgtgatccgcccgtctcggcctcccaaagtgctgggattacaggcgtgagccaccgcgcctggcctaaatcactctttttagtggactctaaataccactgtgatttgataccccttttattcatttataaaaatacataaacagcttccttttttgatgtttaaaaattttatagtcctttctgtcttgaatttgcatttctgttatacttttcacaccagattctattcttatatgatgtattttatgcataagttatattttgcctgtaacatgcatacattatgaaggtagtatattttkatgcattacagtctttcatgcatattgattaccctattatatgtctttgcagccagccaaaatgtgtaaattttaaaatatctcttagtcattaaattgtaattagcacacggtaaaataacaaatgtattaaaatgttgctaaattattttttatttattaaaaaaattttttttctccttctctgccttcaaaatgttgcttctctgccttcaaaatgttggtacattattaaacagaagaaaataggccaggtgcagtggctcgcacctgtaatcctagtactttgggaggacaaggtgggcggatcacttgaggtgaggagttggtgaccagcctggccaacgtggtgaaacttcrtttctacttaaaatacgaaaattagccgggcgtgggggtgcatgcctgtagtcccagctattttggggactgaggcacgagaattgcttgaacccagcaggcagaggttgcggtgagccacaatcatgccactgtacttcagcctgggtgacagagtgaaactctgtctcaaaaaaaaaaaataaaaaaaaaaaagtttcrcagacaaaatatgaatcattccttgtttaacacttaaaaggtttttatactcaggcaatagaatagtgtatagtttcattcacaataggtgaggagtatgtcatcctttttatattaataaaaagtgagaggagcccagatggccgaataggaacagctccggtctacagctcccagcgtgagcgatgcagaagacgggtgatttctgcatttccatctgaggtactgggttcatctcactagagagtgccagacagtgggcgcaggtcagtgcgtgcagcgcaccgtgcatgagccgaagcagggcgaggcattgcctcactcgggaagcacaaggggtcagggagttccctttcctagtcaaagaaaggggtgacagatggcacctggaaaatcgggtcattcccacccgaatactgcacttttccgacgggcttaaaaaacggcacaccaggagattatatcctgcacctggctcggagggtcctacgcccacggagtcttgctgattgctagcacagcagtctcagatcaaactgcaaggcggcagcgaggctgggagaggggcgcccgccattgcccaggcttgcttagctaaacaaagcagccgggaagctccaactgggtggagcccaccacagctcaaggaggccttcctgcctctgtaggttgcacctctgggggcagggcacagacaaacaaaaagacagcagtaacctctgcagacttatatgtccctgtctgacagctttgaagagagcagtggttctcccagcacgcagctggagatctgagaacgggcagactgcctcctcaagtgggtccctgacccctgacccctgagcagcctaactgggaggcaccccccagtaggagcagactgacaactcacatggccgggtactcctctgagacaaaacttccagaggaacgatcagacagcagcattcgcggttcacgaaaaaccactgttctgcagccaccgctgctgatacccaggcaaacagggtctggagtggacctctagcaaactccaacagacctgcagctgagggtcctgtctgttagaaggaaaactaacaaacagaaaggacatccacaccaaaaacccatctgtacatcaccatcatcaaagaccaaaagtagataaaaccacaaagatggggaaaaaacagagcagaaaaactggaaactctaaaaagcagagcacctctcctcctccaaaggatcgcagttcctcaccagcaatggaacaaagctggacggagaatgactttgacgagttgaaagaagaaggcttcagacgatcaaactacgagctacgggaggaaattcaaaccaaaggcaaagaagttaaaaactttgaaaaaaatttaaacgaatgtataactagaataaccaatacagagaagtgcttaaaggagctgatggagctgaaagccaaggcccgagaactacgtgaagaatgcagaagcctcaggagccgatgtgatcaactggaagaaagggtatcagcaatggaagatgaaatgagtgaaatgaagcgagaagggaagtttagagaaaaaagaataaaaagaaacaatcaaagcttccaagaaatatgggactatgtgaaaagaccaaatctacgtctgattggtgtacctgaaagtgacggggagaatggaaccaagttggaaaacactctgcaggatattatccaggagaacttcygcaatctagcaaggcagccaacattcagattcaggaaatacagagaacgccacaaagatactccttgagaagaccaacaccaagacacataattgtcagattcaccaaagttgaaatgaaggaaaaaatgttaagggcagccagagagaaaggtcgggttacccacaaagggaagcccatcagactaacagcggatctctcggcaaaaactctacaagccagaagagagtgggggccaatattcaacattcttaaagaaaagaattttcaacacagaatttcatatccagccgaactaagcttcataagtgaaggagaaataaaatactttacagacaagcaaatgctaagagattttgtcaccaccaggcctgccctaaaagagctcctgaaggaagcactaaacaaggaaaggaacaaccggtaccagcygctgcaaaatcatgccaaaatgtaaagaccatcaagactaggaagaaactgcatcaactaacragcaaaataaccagctaacatcataatgacaggttcaaattcacacataacaatattaactttaaatgtaaatggactaaatgctccarttaaaagacacagactggcaaattggataaagagtcaagacccatcagtgtgttgtattcaggaaactcatctcacatgcagagacacacataggctcaaaataaaaggatggaggaagatctaccaagcraatggaaaacaaaaaaaggcagggcttgcaatcctagtctctgataaaacagactttaaaccaacaaagatcaaaagagacaaagaaggccattacataatggtaaagggatcaattcaacaagaagagctaactatcctaaatatatatgcacccaatacagaagcacccagattcataaagcaagtcctgagtgacctacaaagagacttagactcccacacattaataatgggagactttaacaccccactatcaacattagacagatcaatgagacagaaagtcaacaaggatacccaggaattgaactcagctctgcaccaagcagacctaatagacatctacagaactctccaccgcaaatcaatagaatatacatttttttcagcaccacaccacacctattccaaaattgaacacatagttggaagtaaagctctcctcagcaaatgtaaaagaacagaaattataacaaactgtctctcagaccacagtgcaatcaaactagaactcaggattaagaaactcactcaaaaccgctcaactacatggaaactgaacaacctgctcctgaatgactactgggtacataacgaaatgaaggcagaaataaagatgttctttgaaaccaacgagaacaaagacacaacataccagaatctctgggacacattcaaaatagtgtgtagagggaaatttatagcactaaatgcccacaagagaaagcaggaaagatccaaaatttacaccctaacatcacaattaaaagaactagaaaagcaagagcaaacacattcaaaagctagcagaaggcaagaaataactaaaatcagagcagaactgaaggaaatagagacacaaaaaaccgttcaaaaaattaatgaatccaggagctggttttttgaaaggatcaacaaaattgatagaccactagcaagactaataaagaaaaaaagaaagaagaatcaaatagacgcaataaaaaatgataaaggggatatcaccactgatcccacagaaatacaaactaccatcagagaatactacaaayacctctacgcaaataaagtagaaaatctagaagaaatggataaattccttgatacatacaccctcccaagactaaaccaggaagaagttgaatctctgaacagaccaataacaggctctgaaattgtggcaataatcaatagcttaccaaccaaaaagagtccaggaccagatggattcacagccgaattctaccagaggtacaaggaggaactggtaccattccttctgaaactattccaatcaatagaaaaagagggaatcctccctaactcattttatgaggccagcatcatcctgataccaaagcctggcagagacacaaccaaaaaagagaattttagaccaatacccttgatgaacattaatgcaaaaatcctcaataaaatactggcaaaccgaatccagcagcacatcaaaaagcttatccaccatgatcaagtgggcttcatccctggatgcaaggctggttcaacatacgcaaatcaataaatgtaatccagcatataaacagaaccaaaaacaaaaaccacatgattatctcagtagatgcagaaaaggcctttaacaaaattyaacaacccttcatgctaaaaattctcaataaattaggtattgatgggacrtatctcaaaataataagagctatctatgacaaacccatagccagtatcatactgaatgggcaaaaactggaagcattccctttgaaaactggcacaagacagggatgccctctctcaccactcctattcaacatagtgttggaagttctggccagggcaatcaggcaggagaaggaaataaagggtattcaattaggaaaagaggaagtcaaattgtccctgtttgcagacgacatgattgtatatctagaaaaccccattgtctcagcccaaaatctccttaagctgataagcaacttcagcaaagtctcaggatacaaaatcaatgtacaaaaatcacaagcatttttatacaccaataacagacaaacagagagccaaatcatgagtgaactcccattcacaattgcttcaaagagaataaaatacctaggaatccaccttacaagggatgtgaaggacctcttcaaggagaactacaaaccactgctcaatgaaataaaagaggatacaaacaaatggaagaacattccatgctcatgggtaggaagaatcaatatcgtgaaaatggccatactgcccaaggtaatttagagatttaatgccatccccatcaagctaccaatgagtttcttcacagaattggaaaaaactactttaaagttcatatggaaccaaaaaagagctcacatcgccaagtcaatcytaagccaaaagaacaaagctggaggcatcacgctacctgacttcaaactatactacaaggctacagtaaccaaaacagcatggtactggtaccaaaacagagatatagatcaatggaacagaacagagccctcagaaataacgccgcatatctacaactatctgatctttgacaaacctgagaaaaacaagcaatggggaaaggattccctrtttaataaatggtgctgggaaaactggctagccatatggagaaagctgaaactggatcccttccttacaccttatacaaaaatcaattcaagatggattaaagacttaaacgttagacctaaaaccataaaaaccctagaggaaaacctaggcattactattcaggacataggcatgggcaaggacttcatgactaaaacaccaaaagcaatggcaacaaaagccaaaattgacgaattaaactaaagagcttctgcacagcaaaagaaactaccatcagagtgaacaggcaacccacaaaatgggagaaaatttttgcaacctactcatctgacaaagggctaatatccagaatctacaatgaactcaaacaaatttacaagaaaaaacaaacaaccccatcaaaaagtgggtgaaggacatgaacagacacttctcaaaagaagacatttatgcagccaagaaacacatgaaaaaatgctcaccatcactggccatcagagaaatgcaaatcaaaaccacagtgagatatcatctcacaccagttagaatggcaatcattaaaaagtcaggaaacaacaggtgctggagaggatgtggagaaataggaacacttttacactgttggtgggactgtaaactagttcaaccattgtggaagtcagtgtggcgattcctcagggatctagaactagaaataccatttgacccagccatcccattactgggtgtatacccaaaggactataaatcatgctgctataaagacacatgcacacgtttgtttattgcggygctattaacaatagcaaagacttggaaccaasccaaatgtccaacaatgatagactggattaagaaaatgtggcacatatacactatggaatactatgcagccataaaaaatgatgagtttatgtcctttttagggacatggatgaaattggaaatcatcattctcagtaaactatcacaagaacaaaaaaccaaacaccgcatattctcactcataggtgggaattgaacaatgagaacacatggacacaggaaggggaacatcacactctggggactgttgtggggtggggggaggggggagcgatagcattgggagatatacctaatgctagatgacgagttagtgggtgcagcacaccagcatgtcacatgcatacatatgcaactaacctgcacaatgtgcacatgtaccctaaaacttaaagtataataataaaaaaataaaaataaataaaaagtgaattttaggccattttctgttacttagaatacctgaaactgggtattttataagaaaaggaatttatttcttacagttatggaggttgagaagtccaaggtcaaagggctgcacttggtgagaaccttcttgctgatagtgactctacagattcctgaggtggtgcagggtatcacatggcaaggggcctgaacctgctaatggtagctcaggtctcttctcttcttttaaagccaccagctcccctcccatgataacccattaatccatgaatggattaatccatttatgaaggtggagctctcatgatccaattacttcttaaaggccccagctctcaatattgccccgttggggattaaatttcaacatgagatttgaggggggtcaaatattcaaaccatagcagtgggtttaaaggtacttgtgaaagaggagaccagagaggaaaatcaacatgacctttcaaatggacctatgatccattttcaggcagattaattttaaattttatgaaagggttgagtatgaatgagaattgaagacctgggaattgttgtccattgttgtttatctatttctgtgtacccttcagaaagtctgtttaccttcagcagtacaaatatatggtactgtgaaagatccctgatctagtatttatagcaacctgtattttatgaccagagaaactgagacttaaagatgtagagtacttgcctatggtcacttagctagtaaatggtcaatcaaaaactccaaaacttgaggccgggtacggtgactcatgccagtaatcccagcaatttgggaggctgaggtggttggatcacttgtggtcaggagttccagagcagcctggccaacatgttaaaaccccttctctactaaaaatacaaaaattagccaggcatggtggtgcgtgcctgtaatcccagcttctggggaggctgagacaggagaatcgcttgarcaggttgcactgagtcaagatcgtgccactgcactccagccttggtgacagagtgagactctatctcaacaaayaaacaaacaaacaaaaaacacacaaaccctccaaagcttttctttccctcctgtgtcatgctacttagtacatagcctggttcacagtatatgattactatatatttaatgaatgatttacatattatttgtgaagtccaaaatacttaacgttgtagttgttscatcagttttgaactgctgaataagtgtgacattacagatgattcactacagaagaatattgaagatcttcaaagcattgttaaggtgatctcctttcagttcctggagtggtgttcctggaaatgactaatagaacagcaaaaaaccgtctacttgggcattcttggtgttttatcaattaagtcagagacctataacagtgttggagtgcttgttttgaagaggtcagctaacttacgttgacactgtgtgtgtatgaagagtgtaattttcgtttctgttatacaggtattctctgaaaccaaatgaccaaatcttggctgaagacaaacacaaggaactgtaagtgcattaaaccattggttgtaaatagtttactctgtctatgaacttgatatatgtatatgtaaattatctgattttcaaaattatataatgacaaagtataattaacactatgaccttaatcctaacaattatgataacctacactatataatttacactacataaagtttacacaggacataatttctcctgtattcacattaaaagatgtagtgttgtattccatcatctagactaaagtcttactgggaaatatgtcatgctattttctctttccagataaaatattaaatkgttcctattttctttctgactgctctaccagaaaaaagtaaaaaataaaaataaattgtcactcttaatttttgggtcttactccggtggatcacccaccttcatgrtaatgatagacaaatataattttgtttctgtcactggtttatgcaaaagtaaatgtcaattgtttggtacaaggtaaaacactttattttatttttatttttttgaaacagagtcttgttctgctgcccaggctggaggcgcaatctcggctcattgcaacctctcattcctgggttcaagcaattcccctgccttagcctcccaggtagctgggattacaggtgcccgccaccatgcctggctaaattttgtattttaagtagagatggggttttgccatgttggccaggctggtctcagactcctgacctcaggtgatctgcctgccttggcctcccaaagtgctgggattacaggtgtgagccactatgcctggctgaagacattttattttcacatctaactcaggtcgctcttggtttagtttaatgtaaccttcacttgtactcatttatagggacagtaattttttttcgtagaggacttcaagactattattttcttcttgagattaagtaataatttttttccaagtacttttaaactgctttttaaaaactgtcttgaaccttttgtaaattattttcttctctcctatttaaggtaacataaattgttaattataaaatggcaggaccaatgttcagggaaaggattttcttatgcrttcttaccgtttacacattccactattatgctaacctttcatcagtatttttatatttggcctatccttatttgagtataatctccatagtgggttctcaaatatatatattgtcaagaaatttttttgctctttctttatttcctagtatagtcagtgagggccggtgattgttactgtagcattggttggttattatttataggtctggtaacagagcttcttttgctttgggaattaagtagttggtgagccttaaaagttcctttagtccttagactatgaccaatattaaaaataccagaaatctgcttttaaagaatatgttatttaatatgtaacccattttaatgttttaattcatttgaaagtttttttaactgtccaagatataattcatctctatgggtataacttggcraactgatacttttttcttacctttttttttgtttttttgagacagactcttgctccgtcacctaggctggagtgtggtggcatgatcttggctcactgcaacctctgcttcctgggttcaagcgattctcctgcctcagcgtcctgagtagcagggattacaggcacccgccaccatgcccagctaatttttatattttagtagagatggggtttcgccatgttggccaggctggtcttgaattcctgacctcaagcgatccacccacctcagcctcccaaagtgctgggattatcacaggcttgagccacygtgcccagcccctacattttattacgaaaagttttaaacatatgttatgtgttcacccatatatttaccaccaaggttttatcattaacatattactgcacttgttttatctatttattcttctgttcgtgcattacttcatctgttttttggatgcatttcgaagtaaattgtagacatcaatatgcttctctctaaatatttcaacacatataccattaactagagttttatatttcaaagttttttttttttagtttcacctgttctaaaatttcttataaactgagtcatatatatgtcctattttgtataaggcttctgtcactccctgtgtttttgaaattcatcagtgttgttgcatatatcagttaattccttttyatttttgcagattaacattctgttgtttatttgttctattattgctaagtattgccacttgtttgatttgtcattattgatggtcttgatatttttggctgctggctctcttccttgtagtttttgacctacataccaaagaaaactttcagttgaatatggcaccataaaagcagagtattaattttaaaaaattaaaacagttattgaattaatgaatttcatgaattatgaaagctgtttataaataatctcatttgtgtctttgcaactcaaatagccaaaatcttggtagggtggtggtcatggaagtcagagtctgctaaggagtgtataacaactcacctgctgtattaaaaacaaaaaaatctttttgtgttcaagactaagctttaaacaatataagagatatggatataaaacaaaattttatctaatcagtaattccatgctttattctcataaaacattattacaacttcttaatttcagtctgttaaagcttgattaattataaaattgtaaaaatgtgttggcaccatcacattgacctgctctttgaaaattaaccctaattctataagagtaccaataagagagtacagtgatagctctaattatcttgatattaataaataaagagtggcctggcatggtggttcacatgtgtaatcccaacactttgagaggctgaggtggaaggattgcttgaggccagcagtacaagaccagcctgggaaacatagtgagaccccatctctacgaaaaacttaaaaaaggccgggcacggtggctcacgcctgtaatcccrgcactttgggaggccgaggtgggtggatcacctgaggtcaggagttcaagaccagcctggccaagatggtgaaaccctgtctctactaaaaatacaaaaattagccaggcatggttgtgggtgcctgtaatcccagctactcaggaggctgaggcaggagaattgcttgaatctgggaggaaaagttgcagtgagccaagatcacgctactgcactccagcctgggtgacagggcgagactctgtctcaaaaaaaagaaaaaaaaattagcctgatgaggtggtgtgtgcctgcagtcccagctgctcaggaagctgaggcaggtagatctcttgggcctaggagatcaaggctgcagtgaaccatgatcattccactgagctctggactggacarcagagtgagaccttgcctttaaaaaaataaaaaaagaataccaataagagagtacaatgatagttctaattatcttgatattaatgaatattaagtatgttttcattaaaacatttttagttcctgaaattttgtgattcagatttcatatacacttagtcactgatgcttcacgagtatacttgtttctctgtctgaggaagattggcatgggaaaacagggaaatattggtcagcagtgacacttgtttttctaagcaaagtggtttttctcaacttcctgtttttcattattctacatactgaagaccttgggggatgattttaagtagagaaagctgagcaattcaagttgtgatgtgatttatctaaaactataggatttatagtttgttctatacatgatccagtaatcaactggtttcattagctttctagtttttttcagttttagttttgtaaatggaataatttaaaataaattaggaaaacatcactattttactaagtattttttcacctactttccattgtgctaggcattaaagaaaagatagtgtgcagctttttatatgtcaattatacttcaataaagcggtttaagaaaaagtaaaagatactgattttatttataaatggaatcttactctccaatagtggcttttcaaaatctttggacacatctgcagttattgaaaatagaaccattttgtttccatgaatatctattttatgaatatataaattttgtattaccttggattatgagatctgatcatatagatttaggtaaggaaagttaaaagttgtctggagttaggggtgaattccaaatgcaaatataaataaattcagaagtatccatactacttaacacagagtaacctggtatctgaagattttttttttgtttgctataaggcaaggggaaaatctctttaaaagggattcacatttatttacttggctttttaagatagctaccaaggtaaacagtgaacttttgtaagcagtgtatactgttctaaatatgaagtgtattttcccttctgatagtgaatgaattccattatgattttttaatgtcaaaaattaaattattttgtcagaataaccccttaaatttttaaatgttgtcttataaaagttaattatattgtgatatttaaatgcttgccaatttacgattatgatgagatggaagaaaataaataaattatgcaataggcatgaaccttcaagggtattaggacgtgctcaggatatgatctttggtgcagtgtaaaaatgtaatttcttagtgaataggtcaatttccaaaccagcaggaaagttataagtatttaaatggaatgtgtagggatatgtcagggaagttagagacaataacatctggtatgctttttttttttttttttttttggtgagatggagtctcgctctgtcgcccaggctggagtgcagtggcgtgatctcggctcactgcaagctccgcctcctgggttcacgccattctcctgcctcagcctccagagtagctgggactacaggcgcccaccaccacgcccggctaattttttgtattcctagtagagaaagggttttgccgtgttagccaggatggtcttgatctcctgacctcgtgatctgcccgtcttggcctcccaaagtgctgggattacgggcgtgagccaccgcgcccggtctggtatgctcttaaattaattgttaatgctgtgacttagcagttctttgaaatcatcaagatcatagactgggcttgtgcctataatcccagcactttgggaggctgaggcaggaggattgcttgagtctacgagttggagaccagcctggacaatatagtgagactcttgtctctacaaaaagttaacaaaagtagccggatgtggtggtgcctgcctgtagtcccagctacttgggagactgaggtgggaggattgcttgagaccaggaggtccaggctgcagtgagctatgatcygtgccactgtgctccagcctgggtgacagaatgagaccctgttaaaagaatcttttttttttttttttttggtaagaatgagctaagaactggatatctgtaaagctaatagaaaaaaatcctgtgaagcaaaaagtcaaaattgaaataagctaggacygacagcaaggttaaatgcttatttttttttagtgttcataaataaggtacagttttaaaaatatcataaacatttttatgatcctattctcagggcccggttttttttgtatctttaaaattatagtattttgattctagaaatgaacccttgaaccaatatccgtattttatcatgaataaggtgagagtaacattgataaaatgacttgctatagtttacattgctacttaaggacagtactagaccagaaaccaagtctcctgagtcccatttaagtgctgtttttgtcacaccaagcagttctctaagtatatagtcttttttttttttttgaaacagggtctcgctttgtcacccaggctagaaaacagttgcatgatcatggctcactacagtcttgtttttagagatgaggtctccttatgttgctcaggttggtctcaaactcctgacctcaagcagtcctcctgcctctgctcccaaagtgttatgattacaggcatgatctactgcacccagccagtaacttttttttttttttttgagacggagtctcactctgttgccaggctggagtacagtggcgcgatcttggctcactgcaatctccgcctcccaggttcaagtgattcccctgcctcagcctcctgagtagctgggactacaggtgcctgccaccacgtctggctaatttttatatttttagtagagacagggtttcaccatattggtcaggctggtctcaaactcctgacctcaggtgatccgcctgcctcagcctcccaaagtgctgggattataggcgtgagccaccgcgcctggccgccagtaatttttttttttaaagggattaatatccattgcaagacttggtaacggatcacagagaactcattagttaattaaatcagtttcacagtattgtgttttggttttggaaatcacttcagacctataaccaatattgagtgagttgaaaagaattaattacttccaaatacaaggcactttacattcttctaaggagaggatgcaacacaaagctatttggtcagcttgatacaaaagctcttaggtgtgctcatgaagtaagtcaaatgtatacattttacaaccacatattaaatagaattagttttttctttttccttcccatttctttgaacagtcttattcagaatcttcatcattagcaactttgtcatcattggagcccttttctctagaacacatcagcctctttctatgtatgatattttcgctggaaattttatcctgagctataaatgcctctcatgtaagaaaagttttttttttgttttttttttgagacaagatctaactctgttgcccaggttggagtgcagtggcgtgatcatgactcactgcagccttgaccttgtgggcttaagcaatcctcccatcagcctcctgagtatctgggactaccactgtgcaccaccacacctggctaatttttgtattttttgttgagatggggtcttgccatgttgtccaggctggtcttgagctcctgggctcaagtgatatgtctgccttggcctcccaaagggctgggattacaggtgtgagccaccatgcctggccaagaaaagttttttttaaagtttatttttgtatgtagtcataatacttgtaaggtaaccttttcactgtattgctttttwaactaaggtttaaatagttcattgtaataagagttacmgtttgtgcttataaggctgcatctccaggagtaagtactaaatctgtgttagatttctttgctgcttttttttgtttgtytttttttttttcttttactgatatggtcaggtggtcaggttacttccgtaaggatccaaaactagagttgattgagatcatttcaggcttatacataatctacaaatgattctcaaccaattgagatctgagttcacctcttttgctgaacttttaattgtgatcttactgtaaaattctaggatctcataacttctatgaaatttttatacctggattataaaacttcggaaagatttgcttaaatattttgttgcttaaaagaaaataattggccgagtgtggtagctcacgcctgtagtcccagcattttgggaggctgaggcaggtagatcagttgagctcaggagtttgaaaccagccttggcaacgtggcgaaaccctgtctctactaaaagtataaaaaaaattagctgggcatggtggcactcacctgcagtcccagctactcaggaggctgaggtgagaggattgcttgagcccaggaagttgaggctgcagtgagcaaagattgcacaactgcactccagcctgggcaatagagtgagaacccgtctcaaaaaacaaacaaacaacccccccgcaccccccccccccaaaaaaaaacaaacagaaaataattaacactgtcatcaaggaaggtaactcattataaggatttaaaaaaaaaatttttttttgagacggagtcttgctctgtcacccaggctgaagtgcagtggcacaatcttrgctcactgcaagctccacctcccgggttcacgccattctcctgcctcagcttcccaagtagctgggactataggcgcacgccgccacacccggctgatttttctatttttagtagaggcagggtttcactgtgttggtgaggctagtctygaactcctgacctcgtgatccacccgccttgccctcccaaagtgctgagattacaggcgtaagccaccgcgtctggcctataaggaataattttgtgattaaacatggtcttatattcatgaacgataggtgaatgaaaaatgtgtgttattggtggtaaaatcttaaaatccttaaagaattaatttaaattgctaccttctacttatgaagcactatatggtgccctggacttagcattagaagaaacttagtttatgtatgagttttgccataggctgtagtcttggggtattagttagaattcaatgccactatgatattaagaaatttattacaggaattaaatcttattcaatcatgagaaaaactggggatattaaggtccctaaaatgtgagagaaaaatcgctaaactgccttttgatgtaggttaatgaattgcgtgttctgttaatagggaaactgtgaaggaggttcgtgtgttgtgggctctttgcaactaccacctttatgggcctttagtgaaaaatctggtgataggcttggtcctggtagttgtggacgtaaggtagagtggggatgagtaaggacagattacagttctgcccatacctttgtgtctgtccttcctgcctctaaccaatgactgcctttggaatgtaatggctactgcttcaattgcatcccctaaattttttgcaaatttctcttgtgacatatcttaagctgaaaccatataggagaggaaattaggggaagtgtactccttcttgacatagtttaataccttaactttgtttaatcacttagtcttccaaacttaagttcctccgatatcattttgggtttagattagtgcttttctgtcattgtccattaaacaaatgatttctttcattacctacttctcttttagtctgttcagtgatccctctgggtatagcttctgaatttctagcataaaactcttcaacaataacaaaaaaggataatgatctttcctgtcaatttttagggggaaggataaggtgtttcctagaaactttattcagagcactttagtcaaagtgtagttcattgatccttaactgcaatttacttgacaagatatatttatgggatgaaatttattgagggtaacagaatggagagagaaactgctggtgtgatgaattctctttcttcttggtctacaacaaacagaaatattttgagaatgtagctatggcagattttaatgtaagagttatgccaacactatttccccttaagggttgagtcagaccttttgggaatgatatagacttgggggtcttgagtgaacttttagtatttattagcagccaatctaaccttgaaaactctatgttgatttctttttggaaagtgttgaacaattaaataatacatgttaaagaacaaggaagaagggcattgttttaattattttgtgatctaatttaatccccacagcaactctgtgaagcagatattgtaatcattcccattttacagatgaggaagagacttcgtaacttggtttatataagaaaaggatagaactgtttagatctttttgattgctttccattttgtataagttcagtgacttaggaaccttttttaaaaaacttctttggaggagtgatattgttcattatgaacatacctacttgaaaagtatttaaaggtatttttcatggaaattatattttataagttttagtatggttcactagaaatacgtcacaatttgtaggtaatactgtgttttattttgagttggctaattgttaaggtaaaactttagaggataaagtgagctcatattgatgaatggtaatctgatatttccaacagactaggtctttttttgaagttcatgtattataactttattctttgtgatactagctccctctgtagaacttcaataagattgcaactggactttttcaataatttagaaaagtgatctaaacattatctataacatttccctgtaaaattttactttgtattctaatcagttgcaagtgggtttttaaaagtataaatgtaacatttataaaaatgtttcactttgtacacacaaagttttaataacatatacaaaataaaactttcttcaaacattcctataactttaatgcttttttatttaggaaggctagagagaggtgtgatttctaggtctgtaggtctgtgttgagtaaagcctgatggaagccctaggggaaaaataaattttgacgtttagctggatacttgaaattatcccttttttttttttttttctgaaactttccggtttgacttgggtgggaaaatgttcataagggattttttttttttatcttgtagagaaggggaaagcaaacttctacaacaggtagaaagagcaaagagaaaatcttagcaagatccagaaatttagtggagaattgcaggaaaacattcttgacatttacggtttaaaaaaattttcctttttctttttttcttaagaggtggtctcactctgtcgcctagactggagttgagtggcatgatcatagtgatcgttccacctcagcctcctaagtagctgggactacaggtatgtgccaccacgcctggctcctttttgtatttttagtagagatggggttttgccatgttgcccaggctggtcttgagctcctggactcaagtggtctgcctacctcagcctcccaaagtgttaggattacgggcgtgagccactgcaccctgctcacatatatgagttctatgagtttatgctgttgttggaaaatcctttgttatcaaagtctaccaattttcctgtgtgggagtgagcttacttattttaccaccactttttctcctttctttctgctatggtttgaatgtttgtcccctccaaaactaatgttgaaatttaattgccattgtaacagtaataagaggtggaggcctttaagaggtgattagatcatggggctctaccttcatgagtgcattaatgcaggagtgggttagttatctcttagagggttgttataaagtgagtctggcccctcaagcacttgcttgctgtttgccttctgccatgggataatgcagcaagaagttgctgagcagaagctggcaccatactctaggacttcccagccttcagaactgagaaacatattaatgtttctttcctttataaattacccaatctcaggtttctgttaaaagccgtagcaatcaaactaagacactcccctaaaccattttatattaaattgtaagttgtataattagctcttcaaagatgttttctcagacataatgtaagctcaatgaaggcagaggaaatatgattgacttgcaacatggaatttagaaaaatgagcgaactgatttcaaccataaagctagggactaaaacatacaaatgaggataagaaagaactgaagtacatatgctctttcagtttctaaaaatttaactgtattttcttctaagtagattgaaggatgttcttaggattatgcttgagtaggcttttaaacaattttgtgtggataattatctttgaagcctttgttagtactaaacatctttattctgttataatacagtttattcaaacagacgtacagtgtgtattgtggcacaaagaaattcaagaatgattcttattctttttgtttgttggccttgactaaatttgataycagataattgctttaaaggataggccaattttattggtataacaaatctacccttcattatccataaaccacttatatagtaatctggttttcctatacaggcacaccttggagatattgggggtttggttctagactatcacaataaagtgaatatcacaataaagagaaatacatgaagattatattccccagtgcatataaaagttgtggtgatatcacactgtaatctattgtatacaataacattgtgtataaaaaatgtatatgccttaatttaatgtaatctattgtatacaataacattgtatataaaaatgtatattccttaatccataaaaatactttatggatgaaaatgctaacaatcatctgagcctttagcaagttacaatcattttgctggtggagggtcttgcctcagtgttgatggctactgactgatcaggatgttggttgctgaaggttggagtgtctgtggcaatttcttaaaataagacaataatgaagtttgctgtgtcagagccttcctttcatgaaaaatttctctgtaatatgcaatgctgtctgatagcatgttacccacagtagaatttggaaaattggagtcagtcctctcaaaccatgctgttactttatcaacttaagtttatggaatattcaaaattctttgttgtcatttcagyagtgttcacagcatcttcaccrggagtacattccatcttaggaaaccactttttttgctcatctataagaagcaactccctgtccattcaagttttatcatgagattgcaacatttcagtatccatcttcaggctccacttccaattctagttctcttgctatttctaccacatctgcagtgacttcttccctgaagtcttgaagcgctcaaagtcatccacaagggctggaattcacttcttccaaactcctgttaatgttgatgttttgacctcctcccatgaatcacgaatgttcttaatggcatctagaatgatgaatacgttgcaggaggttttcattttagtttgtctgatccatcagaggaatcacggtctatggcagctatagtcttgcaaaatatatttcttaaataataagaccttgaaagtcaaaattacttcttgatttgggggttgcagaatgaatgttgtattagcagccatgaaaacagcattcatctccttatacatctccatcagagcacttgggtgactgggtgcatcatcaatgagcagaaatattttaaaaggggccaggcatggtggctcatgtctgtaattccaggactttgggagactgaggcaggcagatcacctgaggtcgggagttcgagaccagcctgaccaacagggagaaaccccgtctctactaagaatagaaaattaggtgtggcagtgcatgcctgtaatcccagctactcgggaggctgaggtaggagaatcgcttgaacccaggaggcggaggtcatggtgagccaagattgcaccattgcactccagcctgggcaacaagagtgaaactccatctcaaaaaaataaaagcctagcctcccaaagtgccaggattacaggcatgagccaccgcgcctgtctgtccgcccgtcttcttttttaagagcaagaaaaggtttcccagaagtactctggtagattcttatcacacacacattcctaaaccagttactggcaaagaaaatagaattatcatgattaattagcatattctgaagtacatgcttccttataactgaacaaaaattagagctccactggcaacgcggaaatggctgttgacttggcaactaatagtgaattgctcacaatgtttaagtgaaatggcctgtcagatttcctgggaacacaggaaccagggccagacttagaaacggcctcagtaagaggttttctaaaactattttctggtatcgtaattattcctaattaccttgtgcactaaaaaaatttaaaaattttaaatttagaattttaaacacatttcctgacagtaaccaagatataaaaatgtgtaaaattgagtgaatatattttaaagcatggaagatttgtgttaccctcagacttgaaagggaacctgcaaagttatggtctcatgggaaatattgtttctttttgccttgacataattttcaggctctttggttttattctaagcaacccagcagggcacctttaaaaagaaacaaacaaaattactgtctctaaaccaaagaagatagaaaaatacattcaggagaatagtatacattgaaaactgccactttagctagtgcttttttttttttttttttttttttaagacggagtctcgctctgttccaggctggagtgtagtggtgcgatctcagctcactgcaacctccaccttccagtttcaaatgatacttatgcctcagcctcctgagtagctgggattacaggggccagccaccatgcccagctaattttttcatatttttagtagagagtactttttaactgagaagagatgctgtaaagttttaggaaatcacagtggggacagtagtcatacttctactttcttctgaatataatattgtttcttttttctcctgcagttacttattttttttttctttttgctttaaggcttggtagttctgagaattttagattcagttataatcgaatgtaactatcaacacatgttatggagtagtataaattgttacttgatgtttggagttgttttactcagtcactcagcaaaggtaagattagatctccrttagatgaaaagtattatctcttatgcaaagagacattggttagctctggatgaagacaatggctatggggtcagtcaaccttgtagaaagaataggctaggcacagtggctcatgcctgtaatcccaccactttggggtggtcgaagccagtggatcacttgagcccagcagttcgagaccaaactcggcaacatagtgagagccccctctctacaaaaaatttgaaaattagccagggcatggtggtgtgtacctctggtactagctatcaggaggctgaggtgggaggatctcttgacctggggaggttgagtctgcatgcagtgagccatgattgcgccactggactccagcctgggtgagaaagtgagaccttgtctcaaaaaaaaaaaaaaaaaaaaaaaaaagacacaataaaagtaaaattgtataatctctggaaaaaacaaaataggctgtcatgttctaatactcaatatgtaaggatgtttagtatattagtgggtataattattaataaaatattctatttagttatctttgaaccagtttgtaataaccaaaccacaaaaattcaatttgctttgtatgtaaaaatcttttaaaatagaaagtcctgccttaactttcataaatctgaatgtgagcatatatttatgcttttcatttctttgcacagctttttttttttttcctctaagacagagtctcactctgtcactcaggctggagtatagtggcacgatctgagctcactgcaacctctacctcccaggttcaagtgattcttgtccatcagcctcccaagtagctgggattacaggtgtgcaacaccatacctggttaatttttgtatttttagcagagacagggtttcgccatgttgtccaggctggtgcacagcattttgttgttgatgtgtgagacttgtaatataacagtaataatgctgtcatttcttaaagatgatatataatcctatcaaaatattcctgggaagtaggtatttgtcagcctgtcagtgttttccttttattttgtgtgtgtgtgtgtgtgtgtgtgtgtgtctgtgtgtgtgtgtgttttagtacattctcccagatgctgaaattttccctttaaactgttactatgatgtatgtcttatttctttctcttttttggtcctaattatgctctcaggagttaagacagtataaaattatgttttttaaaggaaacttcatcaaatacttggaaattagcaaatattttttagaggtagaaactgtcatttatattcctaagacttgtaggccattgtatttgttgactgactgatttgactgagaacctagtgtgtgataacgtgtcactgtttctgtcaacttatataattgagggtctttttaattgttcttaccttagaccactatatacttgtggtcttataaagtatatttgaaaattatatgcattttcatgttttgtctgggcctgggaaaaatatttattttaaaactgtaacatcttaacctttaaaacccattgtcagttatttggaaaaattagtattatatgatatgaagcacttctttttattgctgatttcaggtttcactatctgggaaactccggtgtggagacataggtctgttaactgtcttctttgttttatctggaatgttttattgatactataaaacaaaacttatcagtaagactgatttggaattcatattgtttgacagcattatcactgtcaataattatccattgtcagtatttgtaaagcagaataaaagaagccattatttaagtttaattcctgagatgattcagcatacggtgtaatgtcaatctgtgggaattttattttaaactttttcttagtaaagtttactttttagagctgttttaggttcattcacagcaaaattgagcaaagatacagagatttcccataatcctcctgccctcacacatgaatagcctcccccattttcagcatcccccaccagagtggtacatttgatacaattgatgaaccaatattgacacatccaaataaaactattttttggggaggggagacggagtctctctctgttgcccaggctggagtgcagtggcgagatctcagctcactgcaacctctatctcccgggttcaagcaattctcttgtctcagcctcctgagtagctgggactacaggcacacgctaccatgaccggcaaatttttgtatttttagtagagacggggtttcaccatwttggtcaggctggtttcaaactcctgacctcaagtgatccacccgcctcggcctcccaaagtgctgggattacaggcatgagacactgcgcccagccgataaaactcttagaacaagattaattgattgattgagacaaggccttgctctgtctcccaggctggagtgcagtgatgcaatcatagttcacagcagcctgcagctcctggcctcaagtgatcctcctgcctgagcctcttgagtagttgggactatagcttgtgctactgctcccagaagtctcttatttaatctgtctcttctaaagtatagatgtatagttcatacctttagaaatttctgagtttttatggtggttctgcaaataaacctgtttgcttcttatttctgccttcccttccttctgagcctttggtttttgattttctcttatatgctggttcagctatccttgtttctgttgctttaaagccttcaacatattatgaacattttccaccaaacatattgttcttatgagtacatcgtaattttagggcaagaagcagagatgaactttgctttaactcttttgtgttgaagtatgctaatggcaagcatgttttttaaatataaaagttgtacaagttgagatgtttaattcctttactttaagaaaaagcatcataattagaagggagaattgctgttatctggaaggtgttcagacagttkggggagaaaaaaacaaccaaaacagctgcagtgtaatttccataagggaatgggcttatatctttgtttatttgtgtttgttttccattgtacactcagtgcctagcacggggtaacacagtatgtgattaaccaacagttattggaaaaatatattttagtgtgttattttagataattaaaagtacatttaggaaatatgcaacctttttgtttggctttattaatcagctttaaaatgctgatgatagaagcaggaggcagagaaattataggcaaataggggtgggtccctggtgaaaccccacctccaaggtgaaaagcttgaaaccagcagcccaaagtgagaacttctattcctgtttgcctgcactgtcctgattggttctttctgaataatgtctttttaccaattgaatgttgccttttccaaagctacctatggcctgccccacccgcatcctgtgcctgtaaagccccggactcagtaggtagagaggagagattctgccagactttcgggaaaagagatggcttgacttcggggaagagactactgctgtacttcagggaagaccacctactcttcccgtcccctctccagctcccctctccactgagagccatttccaccgctcagtaaaattctccaccttcaccatccttcaagtgtctgcatcacttccttcttcttggatactggacaagaactcagaacccacggagtgcaggtacccaaaaaggctgtcatactggccctttgccctcgctggcggagggcagccaccccacgcaatgtggtaagggaccaactgagctgttaacatgcacacagacagacggcagagctaaaagaccactgtaacactttctctggggttttggggtcgtgggcaccctcacctgggtgctgctgtgggacctgcatggagctttctctcgctggctcctggagcagccggccaggtcctgcactctcttgctaacatgctccctcctgcagggggttgagygctgtggcgtgagtaaactgtcgcccttgttgcaagtccaatgaagggaccaagaaaaatcctgcatcactgatatgaaatgtaccaaattaagtaacatcatcttatttcttctgattttgttttcagtttgtttatattcctttccataggtattatgtgtctgttttagttcataaaattgtggcctaatttatattttgaccattattcagcacactgttagtactcaggactaatttcagttgcttatttagacacatcgaaataaatcacattttaaggctgggcgcagtggctcctgcctgtaatcccagcactttgggaggttgaggccaggagttcgagaccagcctgggcaatatggtgaaatcccgtctctactaacaatacaaaagttagctgggcatggtggtgcacacttgtggtcccagctacttgggactctgaggcacggaaatcgcttgaacccaggagtcagaggttgcagtgagccatcacgccacactgcattccagcctgagtgagattacgtctcaaaaaaaattttttttaaacataaataaagaccacactatcttttttgaagattatgttcacatttcattctctccattgaactgtatagatgtattacctgtatataaagaatgtaaatttttttgtattaaaaatcgacaccttaaaaaaaaactaataccaccacaaggttaagctctgaggagatttcagctttacaataattacattgttacaataatgtttaacttctcaataattaaaaaccaaagcaatgttgcaaccttggttcaatattcaaatatatttttcttggtaaccaagctacttcactatttatagtactttataaatgatttagaattgttatgcagttttttcaaagaagtattcataaggtaaatttagaaaattattttaaaacgaaagtgatgcccaccagatggtgctatttcgcctgttttatctgcgacaataagtaggaaaaatgaatatagaacttcaaaaaagtgtatggaagatctagaatatttgggcattgtattttgggtgtagatgagctcagtggaaggaagcattcaaatattctaaacttgtgtttagtactgtatgtttatcttgataaaggtaaagatgaattcccagagttaatatgccagataaccttttatttagtctaaatgttaagtagattttttgaaaagttgacctatatgcaaattttattaacttcatagctgtatatgcatgaaaaatgaaattatttattagatatgtgttaccaaaatttgtttcaagatttctttatattgttaagtaaacaatattactatctcatttgagttacattgtgatttacaaattaagggaaacattttgatttttttatgtgtttgtaattattacccagaaacttaggcttgaattcactatttttacaaaggaaagagatgactcttctaaattaatttttgtattaggaagagggcaaactatgtggtacagtgttcacttagatgcagccattgaatgacgatccattagagtcaaaatggttagttagctaatgaaatacacttttcagtaaagctggaaagatttagccagctcttaaaagtgtttctaggattttaatgtagtctttttcccgctgattttattatcactctgtattcttctctggtcatgagattgaaccataaaagtcatgtagatgcttgttataagtatttgccaaagtcatcattgtcagtgattttattggcatgtgtgaaattagagattaaacttgcttttaaatcttgcatttgaatttttcttctggaagggtacatgtataactttcaatttaatgttcaattattggtaacagaatgaagcatctctctataggccagtaaatatatatagtagattttattgtattcctgtactgtttttgaatgaatattttactaattatattaacataatcctcatacatacccttaagattaggacctactataatgctttatttgaacttgtttcatagcatttgtcttttttaactttggattatagttttggaatataaatcagatccctcctacaaaaacataaagttcttcatgctttctctcattccacttatcacaatactttacatgtagtagatgaccctatatattttttatataaatgaatagttttgtcatgccaagtattgatattagtattagtgacaacaagtattcctcattccatagtttttgtttttgtttttttttttttttgagacagagtcttactctgtcacccagggtggagtgcagtggcagaatttcagctcactgcaatgtctgcctcccaggttcaagcaattctcctgtgtcagccttcttagtagctgggattacaggcatgcaccatcacgcctggctaatttttgtaattttagtagagatggggtttcaccatattggtcaggctggtcttgaactcctgacctcaggtgatccactcacctcagcctcccaaagtgggattacaggcataagctactgcacctggtctctgttctacagttttttatcttatgcttttctgaaatgactttttatagttgggtttaaaaggatcatctcattggaatctcatatcacagttatgatgcattctgtcatgatgaggataagtgtatattcaggttaaaaaaaatcaaaatattattgtcagcctgcatcagtattagagattgtctggtccaggagttctcagattgtgattcaagggcctcttgtgggaggggggggtcaggggtccttaagaccttgacagaagttctgtgagggcagaactatattcaaagtaatactaagactgtgtttacccttttcattctcattctctcatgagcataggtggagttttctagaggttgcataccatgccatactgattgaatgyacaagttatatgaaactctagcagttctgtcaaaagacaaagttacaacaaatttagtttaaagatctcagtcagctttattgtgattctagaatcaggcaatacttcattccataaagtagagtgtgtgttctaatgagttgagcagatggttggttttatagacagaaagggctgaagaaagcagattggtcatttcaaagtgaattctcttgtaaggtctggatggggagacaggacaatagaaagactggttaatatcaggttacttcagattagggattaaaacagaggaaacttcattatcatgcccattgaatacttcattatcatgtgcattgaatattgaaaattgtcctgtttgggatattaggctgttatctgtctctcctgattttttagaaagtcaagataacaactcagtttgggtttggtgagcatgggtgactccattttgatttttagtctggtcttcttttggagcctagtgtaggagttttgttcaaaacagtggcctataattttggcttcataagccagacattaaagagatttgcaaagattataaaacagtgcttctcttgtcactaagatkttttttagtttggaaatagttattttcataaaatgttacattaacatttaatgaatttattcttaaaataataaatatttaaaaaagttatattttaacttctaatatgataactagggctagatattaaagctccttgaattactcgatactctttttaaagtgtaaagtggtcctgagatgaaagtgtctgagaacttatgatcctaattctttatcctcatttcatagatgagaatactatgagcccagagaggttagtttagttaagtacactcatccagtttttggcttagctgattcttggatcactgacatctggctttttttgatttttttttttttaagttttttttttttttttttttttttgagacagagtcttgctgtgtcagctaggctcgggggctggagtgcagtggtgcagtcatggctcactgcagccttcactgcctgggctcaagtgatcctcccacctcagcctcctgagtacctgggactacaggcacgtgccaccatgcctggctaatttttgtgttttttgtagagaagggtattttttgttgcccaggctggtctcaaactcttgggcttaagtgatcagctagccttgacctcccaaaatgttgggatgagccaccttgcctggcctgatatattttattagcagttttgctgtttagatattcttcaacctaataccaaccatcagctcctttaacagtttcttcatttgatattttaactaactttattaagtacatgagtaaattaggaatattgacctactttttcaacaacaataaaatggtgtttttttaaactcaaaaaatgtctagaaaaagggaattgatatatgaaacagtgtaaccttagcgtcagaaagaataatgttgagggcaaagaaataggttcttgtgttttagagactcttttactgtcttttttcctttttttccccccttcttcaacaacaaaacattggttacaagcttccctgggcatttatggcagcccacctacagaagaacaagtgttctgttttaaaattttaaaaattttatcaagaggataataattacacatatgctgcttttttgatggatatgtattatttctcaggttgagcctcatggtgggggtggtagattctaaccccctccttttaattgttgaatgaatttaaaactatgtcataaagaaactgcgtaattttaattcaaagaaagataattaggatatacataatatccctcttcctttgaggggcttccttcgtgtagaagacatggactgagtgatttttgctcaataaaggaaaactttctagtagtaaagaaatacaaaaatagaatcagcttgtttggaagtagtgagttccctttcttatgaggcattaaagcatagaccagattattgactgttagtaggagtactagcaaatgaatcagtagatggagggttaattgggttacatgacctttcagattgcttttttttttgaggtggagtctcgcttgtcaccaggctagagtgcagtggtgcaatctcagctcactgccacctccgcctcctgggttcaagcgattctcatgcctttgcctcccgagtagctgggattacaggcacgtgccaccacacctaattttttgtatttttagtagagacggggtttcatcatgttggccagggtggtcttgatctactgacctcatgatttgcctgccttggcctcccaaagtgctgggactacaggcatgatccaccgtgcccagccttcaaattcttttattaagtgtttgagtatacttgttcaaaataactttttaaacaagtataaaaaggcagttggtttagcagatgtattctacttttatatcagctgctctgttaacctaaagattttatggatctgtggtctcaccatgatcactgacatcaattctccttgaaggaggatgagttttgtttgttcattttattgcaaaccatttgaagagatgatagattggtagcagaaatttggcagagaaaaggatgataaacattagaaaggaggataaagcccactggaagacataaatgaattgatgatattttggtgtatattttctcattgctttatgattataaatattttctgctgctttttgccactatctatttttcatgtcttccaataaagtattccatggccaaaatttgtgtgaaattctcttcggttgttgctggttttacaagttatagggttctttggaatataattactgaaatgatgactacactaaaacatatttcttcttaatttaacaaagtatttagtgggaggaaggctctagcttttcttattttctttaatgttttttaggcatgctagaggaaaatagtgttcttactattagttttgaacattttttatgactatagagttgaaagcccaaaacactagaagtaaatggatcattgcaaaatatttgttttgttttcatttgtgagtggggcattcgtgtgtcactgtgtctatgcttctatttttctctgtatatagtttatatccttaagactttcagaaagaaattgagatgttatgttgttttattgtatatgcatgtacatgcatacacacacacacacacacacacacacacacagttttatttgttcatcatatatttaaggcctgacataggtcttacaaagttcaattactatagggcttaagtaggaaatgaatggtaaaatgagccaatttgaagcaataaatactgattgatagattatcaccttcttccaaataagatatgtggcatcgtagaatcttgctcttagatacacagatatgtgtgatgtttaaatagttgagaaattcaaccagaaatgaatgaaagggttttcccgttatcctgtcatacgcaaattaccagatcattcagttcttcaatttatcaattcatgtatttattcatttaactaatatttgttagttttatactatgtgtaaagccctattttagacactgaatacagtgccagacagtaattttcctgcactcatagtttatactctaatagagaatgtagaattgagctttaaatttcctattcaataagtatttttagtaatatgtgaagtacaagagcttctgaagacttattgcgccactctctccctattcatccatttaccagttgttactgaatgcttactctatgtactagaaatgcagagatgagtaagatacaacctgkccctgaaaaaaattcagtctatttggagttatagacaggcagtaactagctattatatagtgtgatgatggctatgatataattacaaataatattctgcaagaacagtaattttctctagctgtgaggtatgcaagaagctatcatagagaactaatatttgaggatgagtagaaatagtcgggtatagggagatcaaaggagaagttactcctattccccaaatagagggttcttcatgaacacacagaagtaggcaaggtctgtttggagaatggtgagatattgtgtagtttgggtaaaacactgggtatgtcatggagggagaggtaaaagaagaagctacaacgtaggttcaggccgaattgtgaaaagttttatatacaaggttaaagttggctttttattttacagttagttggggacctgtggaagatttttcagcaggcaaacatacttagtctgcagtttacaaagatagttgatagaatacaggatgaagtagtgagaagttgaggctatggaaaggcaggtataccagtttgaaaacttcataatagatatgaatgaaataatgagggtctcttatagggtagtagtagtagtgactttagaacacagggatggattaaaaatcaaattcagaggtatttttgttttgcttcatttttttgagacagggtcttgctctgtcacccatgctggagtgcagtgacatgatcacagctcactgcagctagggctacagatgtgtgccaccatggctrgccaattttttatttttatttttatttttggtagagacaaggtctcattatgttgcccaggctggtcttaaaatcctgagctcaagcgattcttccatctcagtctcccaaattgctaggattacaagcatgagccaccatgcctggtccagagttagaactgacaggatttagtgagtgatccatatggagagagggcgttgaaaaagattttgaagttttgtgtttagtgtctgcataattaaatgctggtactattaacttcaaaaggaaaagcaatatggttgagggaagcaatgaatttggttttgtaatattgagggcaggagtaaacctaagggaatgttggaggcatttaaattctaagtggaggagatgcctattcaagagaaaggaggaggagtagggggaagagatagctgttcagtgtgtcattaaacctctcaaatcctcagtttgttatttatcatatattggaggtagaatcaataatttttctggttttgaaataacctgtgttttagttatcacaaattctaaattagtagtacaaaaattataataattatagtttatatgttatagactgatgataatatttattgattacttcctgtgaagtttaggtaaaatgctaagcattttgcattcatcatccatttaattctcctagcaatatgagttaaatattattactatctggattttcagaaaagggaagataacttgaccaagattgttacagcaaataagtggtggatgggtattcaaacccaggacaatctgacattaaaactcaagcttttaaccactatattatttgcctgtcttgtagaacataagagttgtaatgaatctaaaacatcatctagccctttcctgtaatcagatttatgtcatagctaaggtctgtaattaatgtcaaaattagctatccaatttacttaataagaagcttactccacagccattcattactgctgttttccttgtggcagatacttttttttttttttttttttttgtcgactcacctctttaccgtgtgatgtgagtaaattctgtatagtctaggccactcatgattatcccatttttcttgctagtcattaattaagacctgaacataggactgatatctgaccaataactcatttgtggccaatgagacatgaggggaggtttggtggaggggcttcttggaaaggtaacacctcctctcccctcatttttggatgtttctatctagatgggttcttggaattgtgagagctatcttggaattatttggggcctaggtcaggataaaaccaaaacactggatggcacagtgaaaagatggtgagaacttggatccttaatgatcttgttgaacttctaaattacccattcctaaagctattgtgcctcaggactaggtcttacatgaaattagagggaatttattaggctgtgtgaaacaaggactttttaaggctactaacagtttttttcttttaaacgatacttatcactgaaagaaacctaactgggatctgcagtgtttatctttgtctgaagtaaatagaaaggcactgtagggcttgcattactgttgagacacaattaaaacaggaatagaagacaatttttgtgtcactgcacctaatttaattggtgtagaagttggagatgatcatgctctagaaaacagatcttatatatgttaaaggtagcaaagtgtcattgaggaaatgagtctgattattctgacagtttctgtaggtaaaaggaatagaaagtaagtgttcagattaggttaggaaatagaaatggatttagtttgtagacagttaacctacgtttcagggtccttccaagactctggaagaatctcaagcaatgtgttaacataatattttgggtgaggcggggtaagatttgcaaaagttaggtatttaatccattaaaactgctattccttttcacttagactttccctgtatcataccctcatattgggtggcattagagtggcctgagctaagggaaaattgagtagaggatacatttagagatagtatatggttagcagttgtttatgtgtccagttattttgtaggcattacttccaggaatgttattactgtccactgtgtctacttccctggccttgtgatacatagatgtagttttgcagggcaggtgagccccaaagtggggctcagcccgtgagggttcttggctttgcccagaaaagaattcaagggcaagccagaggtagaagaaaatagatttattgaacaggcagtgttacagctctggtggtgttatagctcggtgactgctcctgcagagcagggctaccccgtaggcagagagtagcagttcagggcagttattaatacccttttttaataacatgcagattaaggagtggtttatgcagaaatttctagggaagggatagtaacttttgggtcattgggtcattgccatggaaagtggtggtaactcctgggtgttctcatagcagtgttgacatggcacactggtgggtgtgtctgatggaaagcttcttctgcctaaycatctttcagctagtcctcaatttaattgggtgtctgaacctgtctctagagtcaagtcctgcctcctaactcagtaggggcaagggtcttagagcattataaatatgttctttgtggtagaggtagaggaagagaaacatcgtttaagtgtttagagtgagaaactagtctggaaaatttttctaaatcttggaacttgattgtggttttcgtaaatttgataatattcctaagaatgtatatgacattatcagtaataagttataaagaagttataaagctgatataaactctctacactgccttttttttttttttttttttaagatggagtctcctctgtcacccaggctggagtgcaggggtgtgatctctgctcactgcaacctctgcctcccaggttcaggtgattcttttgcctcagcctcctgagcagctgagactacaggcaygcaccatcatgcctaacaaatttttgtatttttagtagagatggggtttcaccatgttggccgggctggtcacgaactgctgacctcaagtgatccgcccgcctcagcctcccaaagtgctgggattacaggtgtgagacaccgtgcctggcctacactgtcagtactaaaaattgatcaaacacagtagtaaaaagataaaattatctttctattctcttaatgttgcaaaattgttatatgaagaggaaatcaagaaatgcagccagaaatgtaagaaaataagagcattatagagatagattaggcaattaataaagatatgctcttctttttgaaattcatgtttttggcatttgttagccttttaaagttagtgtttagttgtaatttattttctcattccagatatttacttcacacctaattttgtattcctttccttaaatagagtcccacaaattgtaaaaaaggaattagctcaccaaaaacaccaaatgcagtatttttaatatttacctttcaggttcggttgctggatctagatatgcctcttttttttatttcctcattttttcttctaaaaagaaaattatgtattttaatgtcagattgcttttgattaaaatgtttcatattaaaattgtatacctgaaaaatattattcaataacacacttcaaaaagttgacagttaaaaaaaaaagaatagcccttgttacttttcttatctaatcacagagtttgtgtagtgaatgtaaaaagaaaaaaaaattgttacaagtttggagcaaagagctctgtgtttaaaaggaatctccttctttttttgtgtgtttttccttttgtaccaatggggaacctaaatctgttttagttgcacagacacaatggacaaatagtcattttgtatttgccaagtgtgataccttcctttgtttatttgctattaaactgttgagagttttatggctagtggataatcattgttcaaactttttaataactacagtgaattgtgttaatataaaattatgctgtacagtattttcttgttatgttgatggtcaaagtgaacatcagatattaaaaatttagatgagtaaaatattaaacagcctatttttgtcatgtaacaaaagaccatgagatccatggaggaaaaaaggacagctttatttttctatagaaaacaatagtaggttggggatatgcagcctgtggtgtaaaatgaaaatgaggtcctagttgggggttggagagttagaaattataaaggcaaaaattgtaggacaggggaggtggggtcaaggaagtaaggaataaagtcttgattagatgacctttaatccccaaatcaccagtgtgtcttagttggttgtttccaggtggttggtcagttggcaccaggtggtcttttggtgatcatttggggaatttccaaatgatcaccaaaaggaactgttctttgacttggtggcagaaaaacaggttttgcaacacttttaaggacacagggtataattgctcccttaccctgtcattgcctcttggttctgcttttacctttgagccacaaggagtctatcttgtcaattaactgggggcataatttgacagtccaatatgtataatgatgacaacagctccactaacatgaatgccattcttagaatttctcatagatcctggcatttggtacatctgagttgaataaataaaagtctggggaatgaatgaaagaaaaattagttcaatgtcctataactttaagttaatttattagaattgccaccaacaaaattagctctagcatttagatactaaaaggaatttgttaagcaaacttacttttgcagttatctctccatggacagtcagaacaggtattcttcatttctaaaacatactgctgttctttaagaccattctttggcactgtggaactttagtcattttctagacatttgttagccactaaatgtctcataccagggactcatatttgtaaataatagtgtctgcctttgagaagctcataactgggtagtcaacgaacagtcacagtgcagatctggaatcagtgttgagggagtacaaaatcctttgggtgttgtaatcagagtcaagaaaagcttcacagtggcgataggcttaagcttagttgaaggaagaggaagctttcaagtggaggtggcagagaaagcattctgacatgtgaaaaggcaggaaagcctgcgtgcagcatatttattagttttgtctcccttggagcattttgtaaattttattgagtattcagagttgacagaaaggcagtcagggatcatttcatggagcgccatgctgagaagattagaggattttaagcaagtgatgtggtcaaatttgcagttttgaaagagtacttaacattatcctggttatatgtttagcagatttggcaagaactgattgttatgatttgatagtcatttaatacaaaaaggaacctggaatgctcttcgtctttagtgaacattatgtaacctatcttcatggccttcttagtgaggtaaacattttttttttgaaattgtaaagatttaaactttttgaagggtaaactttctcagataattatgcttagttgtgagcagaagtaaaataatgtttttacaggccagagcatttaattaccagtgcaagactgtccagactactctttccatttaccatgataactggtaaaatgtgagatggtgattgctccatcatcttgggtactgagatgaaaagatgtggggtggagtcctcaaatgacttatgatgaacagctagtgtaagcaagaaaatgaccttattgttttaagccactgatattttgcagttcttacctgataaatggtacatgaacctaacgtgtttttattgatgcaaccatatatcaaaacagtatttttgaaggaatcattgtagaagtacagacatttatagaaaattttttacctctctgatttagagaaatttttgaaakcacaataacttaggtaacatagtaacataaaagttctcataatatgtgtaaaccaaaatgagttactgcaactaagagtcattttgaaagagactaaaattgacttatctttaatttgttaaataaaagtgtgatattaaatccattacaaaaatgggtaaaaattgaagacaactgcaattttataggttactgaactttatattttacatgatattacagtcatccttcagtatacatgggcgggtggttccaggacccaagtctacaaatatgttaagtcccacagtgggtgctgtgaaacctacataaaggaaaagttggctctctgtatgcgcaagtttcgtatcctgtgaattctgtattttcaatccacatttggttgaaaaatttcagcctgtaggtggacttgcgcagttcaaacccacttcattcaagggtcaactgtattttatagtcagtatttgcataataaggaaatctaaatggtactttgatattcaaagtttcataataatctatatgtatgttttaaagtgagtgtggtgatattaatacttaaatgaaaaatatgagttaataaagcaatttataattttatatcaattgagcatattgtttttgaaatttaatttagaataatcatctatacataatctatagatactttagtctttctatatgacattcttatggtggtttattgattatcataactatgaataatgagtaaaaattatacaactatacaagccaatatatgcttgaaattattatttattgatagtaaattagattttgacatgaaatgatttctgtttaggcaataaatttaaactatagaaaaaaatgcagtgtaacttgtactgtaaataaacgattagcaatgaacattacagtgagagctgatagtttatgaattattcactgcaaacttattgtctctgtgtcattaacatgtaagataatgagcctaattaccatggctttaaactcaggggagttagcaatttatgtgtaaaagtttctgggctgtagttaccacccacaagggtattgagagaactgcagacactacttctgtgttttgtttcagaaatgttctttttcctcacttgcttccttcttaataaattagtttttatttatttttatagtgagaattatgagcttttcctcttgcttgaatacctttttaaaggagttatgagaaatatttaagtatttttttagtgtagtttagtgttgtaagtagacaaaatattattagatgtattcttttatttgcttacataagttggcatcacttactatagtaaatgaccactaatagtgtaatttcttggaaaatctagcctaaaaggtcaatattaataattggttttctcctctaaaaggatttgtactaagatgatttactttcaaagtactcagtattagcctatagccttttttctaatctttaatattgtatctttgatcttaatttaaagttttgatgaacttgttgcttctattttctctcttatagtataaattatctgtaataagccaccttaattaaagttggtaaatctacaactgcttcaattatacactaatcaattatacactaatttaattctacttagcaggatacggtacatcattaatcagttttagacttaatacaacagatttagaagtaatcaaaattgaagcattttatttagctgggaaaaaaatgaagggtcataatctagtaattcacatatcaattctgataaaaatcaaagattctttgctaaaaatgaaggaatgtagctgttatgtttactgttgagtgccatgggctgaagctgtgattatataatatctttagatgttaatagcataatagttttgtgctctacctttttctttaaattgttattcatgttactaaatgggttgttttctgtaacatgattgtttaacgtatacataatataagaattccttgagtgaatatcttttttgttgttgttgtttgtttttgtgttttttttttttttttttttttgagacggagtctccctgtgtcgcccaggctggagtgcagtggcatgatctcggctcattgcaacctctccatcctgggttcaagcgattctcgtgccttagcctcccaagtagctgggattacaggcatgtggcctagctaatttttgtatttttagtagagaagaggtttcgccatgttggccaggctgatttcgaactcctggcctcaagtgatctgcctgcctcagcctcccaaagtgttgggattacaggtgtgagccactgtgcctggcatatagaatatttactagtagtttgttttgaacatgtaagcatgtgcacaaatgtatttttttcagaattatgttaaataagatgattagatataattaactcaaaaatctttagcaaaatgatctttgttttctgtgattgaggtggtgacaaatttgccttagaattcttggggatgtgttataaactcgatgtaatcatttttcttttccttttttttttttttttttgagacggagtcttgctctgtcacccaggctggagtgcagtggcgcgatctcggctcaccgcaagctccacctcctgggttcatgccattctcctgcctcagcctcccaagtagctgggactacaggcacccgccaccatgcctggctattttttttgtatttttagtagagacggggtttcaccatgttagccaggatggtctcgatctcctgacctcgtgatccgtctgccttcgcctcccaaagtgctaggattacaggcgtgagccaccctgcccggcccatttttctcaattatctgctcattgaattaaatgactcagattgaatttcattactcattctttctatacatgttcatattattggaaacacttcttgtcctgctcagctttctttccaataaattagtaattctttgctcactcgtcttgtattcctttataagaatgttctagatagggatattctaagttttgaagactatgtatgttaagtgcattttacccttttgagagagttttagtaacaagtttcagggaacccctaggactctgacccattatagctttggccatttaaaaaaaaaaaccttcaaaggtaatatgtgtacatggttaacaatcaaatagaacagatggtctgtctaataatgaaaaacaagaaaaatcttgccctatgtttctctgttcccactccccccaaaatcagccacttgtaactgattctgttttcagtgcttattgtggttgtctcaacctgtagtagaattatagattcttttgtttgtttgtttgttttgctttttaaattagagacaagttcttgccctctcaccaggttggagtacattggtgtgatcayagctcactgaagccttgaactcctgggctcaagccatcctcctgcctcagcttcctgtgcagctgggactacaggcatgcaccactccacccagctaattttttaatttttttgtagaaacagggttttgctgtgttgtcccttgaatgcctggcctcaagtgatcctcctgccttggcctgtgattataggcgtgagccactgtgcccagccttagaaattatttctcaatgcttttgctcttctgtgttctgtgattaggtgactctttatctcacaccacttctaccttttctccatccttccaagttgtgatcactgttttcgttcctaaattggttatttttaaacttcaaataattcaggtaaatttatattttatgttttgttaactgtgttccctgcttactgtttcttccattaatttaaatatcatcgaagttgataatgctaagaacttgtttgtgttaaggtaattctcacatgtgrataaaaactgattagtgccaaaagtttacaataaaatataacagtctcctatcctaccctgggttctccagaagcggcaacttataatactgttagtttgttctttctgatactagcttattcctaaataatatgtgtattcagcttttctgattaaccaattttagatgttatctattgacctttttattggggcctgggatacagatcatattatatacctgtgcacccagttctgaaaagttatataataattttggttcaatctataagcagtctataatcgttatttatattatagtgactatgtaagtattgagtgctgtaatatagcacattacattcatttgcttaaacaaatatttggtccccctttcccaccacattatttatagccttgtttattcatttgcttggtttcctattggctaatttgctaatctcccccctcagtgtttcagcagatctctccagcacctcccattaatttttctttgtttatcataggttcgaaactcaataattttttttcctggaagtttctctccttcagccctctattctactttaccaaggagttgtcttactcttttcagctctgatcctgggacttccctttgttgctcttttgggggacaatttgctttttgattgtttttagtcttattagtttatgcccttgttttgctcaagcacattctccagagcttcctgagaaaagaatatgtgagaaataaaatttttccrtacatgtaggtctaaaatgtctttattctacctttacataggttggtatttcaattaagtctggaaatgcagattgaaaataattattcctcagaaacttgaaggccttgctccattagcaaccagtgtttcctatgtgaagtttgatgccacactgattgctgattctttatatgtgacctatttttttctctttggacattcttagaatctcctctttcctcctggtattctggcatttctcaatgtgatttttcttattatggcttttttttttcattgttctgagcaygtaatgggcccttatagtccagagacttaaatgttcttcctgccattcatgcaggtttttgaaatttcttctctactattttctttagagctatgagttatttttattagccagttttctattaatagacactggatttttcaagttttccaccacaaaaaacactcatgggccgggtgtggtggctcacacctgtaatcccagtgctttgggaggccgaggtgtgtggatcacctgaggtcaggagttcaagaccagcctggccaacatggcgaaaccctgtgtctactaaaagtacaaaaattagctgggtatggtggcaggtgcctgtaaatcccagccacgtgggaggctcaggcaggagaatcgcttgaacctgggaggcagaggttgctgtgatcacgccattgcactccagcctggatgacaagagtgagacttcatctcaaaaaaaaaaaaaaaacaaaaaaactcctcacatatattatcttttttgcatgtacttttatataattgtgccagttcttctgtaagatatacatggcttttatcttattactttctctgagaggtagagggtggggcagggaaggcaaggagaggaagaagctttgagattctcctacctgaacttcagattctggtgtgatacctcaatattgagttagaatggctttatcaagcatgtttatttctagtttttcatattatttttgtcttagtcatgaagcacaacaaaccaacatagaacccatttcatactgatgaataaacaggtagcttcattcatgtattcatttattcattatcatttattcattcagtcatgttgtgatactctttgggaatacaaaggtgatactgtacttgctgtcatgggatttacaattctagggataagtaggagtgtaattgataaaacatgtatttgtgcttttcaatagtaatattgactaactcaagaaaacttttggagacaggctttctttgaatggactgtgwtgcttgcttgtttatgttttcatgaatacatttactagcttttgattttttatattaggagagaacagagtgtcttgttgtggcagaaatacctaatatgtaatcctctgaattcttcaattgttgcaaaacataaacatttactaaagagttcagcagagtagattaaatgttatttaaaacatatgttatattgacctcatggctaaatggcctggtttaggaatccatgaattatcccacaggtaatagcaaagttttctccctgcctcrtctcccaccccaaatatttgatttccacatatactgcacaggggaattgaatttgatgtcgaaagccataagaaaaagagaaactttgctttttactgcttttactaggaaatagaaaacatttttagtgacaggctatgcttcatcatgaaaatacggttgggtgttttaggccttcacaaatttgatttcattgtacttagtgatggatgttagtaagctgtgtgagatggagagaaattaaagaataaacaggaacctctcaaacttgctagtgatgttctacagtttgtagcatgaattttcttacttttagtttttccttatgaaatactttatgtagaacaaactagcagtactaaaacaaacacccatgtacccaatctgtcaacacttagatttgttgaakatttgggtgggcagagtcttccacccaaatggtaaaaggggaatacattacaagtacatctggggttctctgtatacctgtcttcagcccattttctgtcttatttcaaagttcactggtgttccagttttgtttttagctgtaatgcttttcttagtgcttaaaatatatgtgtatatattcataagcaatatgaagtattgatttgcgtgttctaaaacatattttacagtgcctctccttcggctcgctttttygtgtaacattgaatttttagatttttccctgttaatgcacgtaatttatatgtaatttattttcacctgtatagacttgtatgaatacatcacaatttattctttggttgaggaattacaggtttttcagtattagaaacactactgygtttaaggttcttgtactgatctgtttatgcatatgtgaaagattcttgaggactgtattttaaatatgtggatgtttaaatttcaattaattaaaattaactcagttcctcagttacactagcaacatttaaagtgtttaatagccacatgtaactagtgagtaatgtattggatattgtggatatggaatcattccattatcataaaaagttttataggctagtgctccttggggtttatacctgtgtgtggaattgttgtgtcactgggcttgcacatgttgcacttcagtagatgttgctgagttgttctttccagtggtatctgagcattccctttctcaattgtcttgctaagaattggtataaacagaaattctaatttctgttttgtaggtgtgaactgtatctcattgtggttttaattgaattttgaaaatatatagtgaggctgagccttttttcttatacatgtgtttaccttttacagttctcatcttgtgattgcctcttaatgtcctttactcattttttcttttgagatattttaaattactgatttgcatgagttttttttgtattttatggatacaaattctttgattatatttgccatatatctgtgcctagtatgtgacttgtctttcattttgtggtgtcttttgcctcacacaagttttaaaatgaaatgtaatcacattatcaatttttaaaaatgctttatsttcttatgccttatttaagaaattacttcctactctaaggtcagagtttcccatatgtgctttgcagaggtagatctttcatctggtagtatgtaatttttgtgtatggtgtgaggtagagttggagacttgagtttttttgcatatggataaccaattatctttgtataattttctgaaaacttcattgccttaatagttttttgtttgcatgggggtcaatttctgggttctaattctgttccattggtctatttgtccctataccaatgtttcagttgaattttcctttttgtcaaagtacctatttttttctttattttttgtagagacagggtcttgctttgttgggtagactggtcttgaacatcaaatgattctcctgccttggctttccaaagtgctgggattacagttgtgagcaaccacacctggccaaattttcttaaaatgaaaataacagtgataatttaggtccaagccctcttcccaaaattgatttagctgatgataagctataatattggaatttataatataaaatgctacaatttttttttttttttgagacggagtcttgctctgtcaccaggctggagtgcagtggtgcagtctcagctcactgcaacctctgcttcctgggttcaagcgattcccctgcttcagcctcctgagtagctaggactacaggtgcgcaccaccacgcccagctaattgtttttattttagtagagacggggtttcaccatgttggccaagatggtctcaatctcctgacctcgtgatccacctgccttggcctccaaaagtgctggctgagattacaggcgtgagccaccgtgcctggcctagaaaatgatattataaccagcagatgtgaacaataacatttttttctgtgatgatatttgagaaaagcgcaacttaattacaaaagagtgaaaaacaatcactttaatcaaagtcagaacttctatacactttcaagtggtgaattgagcctcacttaaaatctaattttcacttttaatgccatttgttttcttttgagatataactgattcatttaccaccaatttttataaattggatttgtagtttggccattgtatgaaaatatttttttaaaaaagtatatgggtcatatgggtagtaatcaggcaaattggttttagatttgcagtacctgttcaattatctgagatttaggggatctagggcatgtgagtagaggttctattaggtttataaagtgcttgtgatgataatataggttaaggaccaagtacctgggaaagatcaagggcatactaaatagttgttcctaaagtaatgggacaattgcagagagagggatgagagaaggagacttaaggatgatgtgttgatgtgtatgtatatataaatgagacataaatgacttttggaaggattactaaagaaaaacagcaatagaagaagactagcctatgtccagcagcaaaaggaagtagaagacagtgagtcagatagtgaccagtacaggacgctaggtggtgccattagtcttagactgcttatttgaagtctctggaggctcagtaacctcagaatagaaagatcgaaaggcggccgggcacagtggctcacgcctgtaatctcagcaccttgggaggccgaggtgggtggatcacgaggtcagcaattcaagaccagcccggccaacatgatgaaaccccgtctctactaaaaatacaaaaattagcctggcgtggtggcgggcacctgtaatcccagctactcaggaggctgaggcagagaattgcttgaaccggggaagsagaggttgctgtgatcggagatcgcgccactgcactccagcctgggtgacagagcaggactctgcttcaaraaaaagaaaaaaagaagaaaaaaaaaggcactgcttgtatagtaaatgagcgaattgtcttattgagtataacccatagtatattatagttcttgatattttcttctccagtgatcattttgaaaaattttctggaatttgcattgtaaagaagtttgtccaccaaataaactgtgttttaaaagtaatagttcatttctttctaattttaaaggttgtatataaaaaggtattttcatttaaaattcatattaaaaaagataattgaaattttcatattgaaattatataatcagaaggaacttggtgttttaataagctttagtggccttttcctaggtcaatgtacaattccactgaatttttttgaaatacatatccatgggttccacattggtggattaaaccgtggaaagaaaatattagggaaaaagaaattgcctgtgtacagagcatgtacacatttttccttgtcaatattccctaaacaatatgacaaaagtttacatacatttccattgtattagatattgttagtaatctagagatgatttaaagtttggggaggatgtatgcaggttatatgcaaatacagttgaccctcaaacagcacaggtttgaactgcatgcacctacttatattagtttttttccagtaaatacagttggccctctatatgggttggtttggcatctacaagcaaaaatggatggaaaatacagtattcaaggaatgtgaaagttgtgtatatggagagaagggccaactttttggatctatgggttcaacagggccaactgtggtactttagtatgtgtgcattttggtatccaagttgggtcctggatccctcaaagatactgaggaatgactgtattgaagatgattccttgattcctgttacatttttttttaagattccagattgggaataattaagtgcattatttgatttctggagatgagttacaccattaaatttttgttgatatgtgtatcgtgcaggtgacagaaaccctaactcatactggcttaagtaaatggaaattattggatcacatatctaaaaagatgttggtatggctgattttaggtgaagcttgatgcagaggttcaaataattttatttggaccctcttcacctcatcttctagaggtagggtactgccatcagctattggcttatatccttatttgtgtgtgtgtgtgtgtgtgtgtgtgtgtgtgtgtgtgtctgtctgtctgttttagtggctctaaaaacaggtgtaggattatgtcatattaggcctctttggcttgtttgggttccatatctactctgcaactggagatagagttaacactgctggaaatttatggattaagagtgttgaagggatgattccccaaagaaaatttggatcttattagggaaataaagaatggttgtaaaattgcacttatttctttaaggaagtcatcttaaagctgtttttctttgccaggtatggtggctcacacctgtaatcccagcactttgggaggctgtggtgggaggttcacttgaagccaggagtttgagaccrctctgggcagcataatgagatcccatttctacaaaatatttaaaagttagccagagatagtggcatgaacctgtagttctagctacccaggagactgaggcaggaggattgcttgagcccaggagttcgaggctgcagctcgattgcgccactgcactccagcctaagcaacagagcaagtcaccatatctttaagaaacagcaacaccccccaacacatgaaaaacttttttttttttttggctaagctgttcttacactattgattttatttcactagaatttgtttttactttaatctcatttgtgctacttattagttgtgtgacttctcagagtccatttcctcactggcaaaattgttgatacaactattgatatagttatggtgatgataaaataagataatgtgtgtgaaatacctagcctagtgcctggcatatattagatattacagaaatgttagtccacttgtaagcatggttattacccagacatgtttggattttatcagtctttgctatatgttttaaattagcctataatctgtaagtatcacagatrttgtagaatgatcaattttcagattatcagtttgatttattgattaccgctttcagtgctgaaaatgacagttggtagatattgtccaattcatgacttgccagtatttttatcctagtacttaatgtgcagatttagcttctgtaagatttttacaattaatctatgtggggaaatataaattatctttaaggagtagcagtaagtgtagtgaaattatgataaatggttttattgtttggggaaataatatcaactgcttcatgtgtttgaagaataaaaggaagttggcagcaagggagaaagatgaatgattaagtatggcttaaacttgttttttaattaaagtgcttcattgttgtacacaatattcaaattatatttaaatgtaacattaatttttctattaacattcatctttattagaaaatattgcttgtatttatcataatttttttccccaccaactataacactcttataatctatttgggttaatgcgtgtgtagtctcaagaaaagagcctccttaattgtttttaaactgtttgaacactagagatttagtaacctacatttccaataactaacaatacatatgaaactcttgatagtgatggaatagaactaatcatttccttataatatagtgatacatcattatttgacttatggcatatttaactctggttagctacaagcagctttatactggtgtcttttattcagatttgagaagtatcagtgtaacatataaagaacttatttttactaattttcaccatattttatagacacaaaccacatgagaccaaaaatagtgtatactgacctggctggtcattttatggttggttattgtgtttattattctgtactatgtttgttgtatttgtgctttagttgctatttatttttaagaatattgtgttatataggtgtaaaagtgataagaatgtgccaggtatggtggctcactgtaatcccagcactttgggaggccaaggcaggcagatcacttgagctcaggagttcaagtatatcttttgtaatcccagcactttgggaggctaaggcaggtggatcacttgagctcaggagttcaagaccagcctggccaacatggggaaaccctgtgtctactaaaaatacaaaaaattagctgggcgtggtggcacgtgccagtagtcccagctactcgggaggctgaggcaggagaatcgcttgaacccaggaggtggaaattgcagtgagccaaggtcatgccactccactccagcctgggcaacacagccagacttcatttcaaaaaaataaataaataaataaaagtgataagaatgtgacatgttaatagggagagatattagtccgatggtaattaaaagcagagaaagttttaaataaactaaatggtgaagaattggtttgttcaacaataggagttattttgaagaataaagcaagtgattaaacatgtgaaaagtaatgtgcctatgccccaaagtgctattgcttagtgggttatatctattgataattacaatattagaaattaaaatggaaacggttgaaaatattcaatacatttaaagataactgtaataaacccagtatttgctagcataaacacatttttstggaaaataatgatattttctaaaccagaaaaaaatagttaaaagaatggtattgctttttgcaaatctctttaatgtctgacttagtagaagacagctggattttcatctgcttctgcctgccatctgttgtaatatattgaactgatccagaactcctggtctcaagccattgttccacctcggcctcccaaagagctaggattacaggtgtgagccactgcacccagcaaagcaaatagttttaaccttgttggttccctgaaaagattttgtgggacccttgtagtccttagactatgctttgagaactgctggccttagcaattgaamgtaagtacagtaggagacattggtagaaatgcttttgaatttacagtagagtctgggcatcartattagatgtctattgatcttttattaaaagactaagagtttgagaatttaaaggctaaaacattataggtcctgctgatcagacttttcatagccagatagttctgtaggcttaaggccctttaaatccagataatgtccaagtaagtggcaaggcagcaatttggattccatagctgctaaaaagtttyttayggcatttgtacatagatcattaagaagagaggaattatttctcacaaccaatttttagtgtagacaaaactggaatattttggagaaaaatgtcttaatagaatgcatatagcggtaatgtagtcttctatttggcaggaatatatatagggatggtcactttagattaaagaacaaataaaacttaacctacttataaacagaggcttctgtattgagaatttttcttagtataacatatattcaccttagtatcaagttgtgggggtttttgatacccccaaattgacagttattcagctgaaacttggagataggacagaccttgattaatatttggcaataattgtcagttctaatgttggaatttttgctctaaccttgttgattaagcatttaacttatttacatttttatgcttagggattaaaagtatgtctactttacatttatattcaggtatatatatatttttgttgttgttgttgttttttcttattattattatactttaagttttagggtacatgtgcacaatgtgcgggttagttacacatgtatacatgtgccatgctggtgtgctgcacccattaactcatcatttagcattagtatatctcctaatgctatccctcccccctccccccaccccacaacagtccccagagtgtgatgttccccttcctgtgtccatgtgttctcattgttcaattcccatctatgagtgagaacatgcggtgtttggttttttgtccttgtgatagtttactgagaatgatgatttccaatttcatccatgtccctayaaaggacatgaactcatcattttttatggctgcatagtatatattcaggtatattttaaggcagtttttaagtatatcttttttctttaatagtacttacaaaaatgtaattatttgatatgacaaagctgcttcatattttcatattagcttgaactttccattgatatgtcaagcaaataaatacttagtttttttctgagtagaaaccaactgtactgcaaaccccattgatagtaaattaattgcagggatttaacatgtagggaaaccttaattattctgaatatacttatgttatgatgtgtagatgatttgtttactgtctttaatgtgactgagtcaaaatatgtgtagttatttgcataaaagggaagtgttgctaatatattttgcattacttaatgttatatataaaattaattttccttgtaagggatgtgagaaatttttttactcctcatttctgtttattctcatctatttctttgaaaatgtagatttaatttatttaaatactgtgtgatgaaaacattacagatatgttcttgctctctttttttttttgagacagggtctcactctgtcatctaggctgagtgcagtggcataatcatggctccctgcatgtcaacctcctgggctcaggcagtcctcccacctcagcttcctgagtgtttgggactacaggcgcgcaccaccatgccgggttaacttttgactttttgtagagatggggtctcactatgttgcccaggctggtctcaaactcctggatgcaagcaatcctcctgcctcagcctcccaaagttctgggattacaggcatgagccaccacagccaatatgcttcattttctacmtctgattataawttaaaggatagtattataaatgcttaattttataacctccaaatagtgatattgtattgctccttattgtgatggataaattataagacatatgtgtttaactggtttggtggcaagtctgtttacagaaatttgctgttaatttctcagttgttcacatgaacttatctgatttatagctttggccagcaatttacaaagaaasttcagtctgtagggcttcctgttgctctgagtgggggctccttctacccctgttcaacttcagtcagcccatggtctatagtatacctctcacaaggtccttatactgcagatcctctctgctgcagatgcttgggcttttgccttaagcacactggtgtaattagaagaagtagaaaagaagagaaagggtgaataataagagatgagaggatttaaaaatggttgaaacaggagttgtgaagtttgagtgtggtggatatggagatgtgcagccctgatcctccttcaaggaagaattgtggcccagttgtggggaggtcagtcatcagaaaaccttcagctgtctggcctacagaggacagccaraaaaaaaaaaaaaattgccttaagctgtcagctccttcaggctctacctcagttgcggagagcctccttgcttaaggtcacatcctttccagggcagcacttatcctgcaatcaagcaagacatgtttaaaggcccagccattttgttcaggcctgagacaactctgacaggtgatataccaccagagatctgccaggttgcttgaggctttgttgggccygaattgcaatttgatttttccctctgcccaattcggctttcttccccaaatctcttcttcttctttttttttttctttgagatgaagtcttgctcttgttccccaggctggagtgtgatggcatgatcttggctcactgcaacctctgcctcccaagttcaagcaattctcctgccttggtcccctgagtagctgggattacaggtgggtgctaccacccctggctaatttttgtatttttagtagagatgaggtttcaccatgttggccaggctggtctcgaactcctgacctcaggtgatccacccgcctcggcctcccaaagtgctgggattacaggcgtgagccactgcgcccggcctctccccgaatttctttcacagggattgactgctaataaacatcatatacccaaaactacttcagtgtccattttcagagaatccagcttgcaacaggcaggcgtatcggcttcatgttgtcctaaaccttacgtaaagttctatgcaattttttttgtgaatttgcatttttcttaggaggtctgtggcttccattatcttctttaagatagacttgaaaattaaaggtttttctcatcaaggacttaagaaggaaaggcttaaacattttttttttgactcaagatcaaactaaatacacttggccattgaacaatatgggggttagtagtgctgaccctttgcacagttgaaaattgacatacgactttttactctcccaaaacttaactattaataatctactgtgtaccagaagtcctaccagtaacatagtctataaacacatattttgtatatgtattaaacactgtattcttacaataaagctagagaaaacaaagtgttattaagaaaatcatggccgggcgtggtagctcacacctgtaatcccagcactttgggaggccgaggtgggtggatcacctgaggtcaggagtttgaggccagcctggccaacatggtaaaaccctgtctctactaaaaatacaaaaattagctcgtggtggtggcaggcgcctgtaattccagctactcaggaggctgaggcgggagaatcgcttgaacctgggaggcagaggttgcagtgagctgaaattgcgccattgcactccagcctgggcgacaagagcaagactctgtcttaaaaaaaaagtcataagagaaaacctgtttattattcattgagtggaagtggatcatcataaagatctttatccttgtcatcttcatattgagtaggctaaggaggaggaggggttgctttttaagagggggcagaggtgattagtaggagaaaaattttaatgtgtgtatatatatatatatacacacacacattatatatatataattttttgtagagacagggtcttactttgttgcccaggctggtcttgaactcctgggctcaagtgatcagcctgcctcctaaagtgctgggattaccagcatgagacaccgtacctgactggaggaactacgtttttgatatggtactcagagaactgagtgcagtacagaagcttatacacccccttttttttatagggaagtggggaaatggagaatgtagacagttcttttgagggccagtaaatcatttaggtgggaggcagacattgtgggaaggtgagaggtgaagctgcaggttgtcttaccatgcagatgaaggccccctgggtaatctgttggagctgccctgggaagaatagatgaagtctttctgggcagtaatgatcatgacttccagcttcttctcatgtagtcgacctttcctgatcatttgatgagatccctaggaagggagtttaagacaattgcatttcttttggaaagaagcttttttgggctgataaggaaataccagagagagcccctctctgcgctggggtgggggacacgacaagttagagggatcttgattgtgaggcagcttctaaggcctttaagcatgtctaagtgccagtctttgggggtgtggtttgagagaccaaaatagatgcccctttattaactaggacasatcttaaggttaaggaaacaaagttacctatcggtagaaagttcagggccctgctggtgtggcaaatttctaaattcctatggctacaagaaaaatcactcttattaaactctctaacaataggagctttcagacaaattatcacaattctgatttacagcccagactactacaactctggacagaattcccaacttagaaacattcttttcttttcttttttttcttctttgagacagagtctcactctgtcacccaggctggagtgcagtggcacaatcttggcttactacaacctccacctcccatgttcaagaaattctccagcctcagcctccagtgcggaccactatgcctgggtaatttttgtatttttagtggagatggggtttcgctatgttggccaggctgttctttaactcctgacctcaggtgatctgcctgcctcagccttccaaagtactgggattacaggcatgaaccactgtacccagcccttagaaacattcttttctgataagctttatagaccttgagtttcaaccagctttagaggctgggcacaaattgtctttgcatcgtatagtttttatcttttgatgtaaagagccaaattccaccttattttaatgctaaagccccaccccaaagtgagcataggatgtatattacacatatgtttacccattgcacgtgcgctcagctcttctcgtaaatatgaatagctttcccctaaatctgctgaatatatatgattctgttgtgtaatatgggccctgtgaggcataaaacccaacctatccttcccctgtttgaagacagagcacctttggtttgcactggagactttttcttcgctggttgcaaacccatattcccagtaaagctctcctttctactacgtagcttctggttatcttttggatgacaggggtattgctttctgggccccaacactgggaagcagcacttaaccattgtaagcaaggagaagggtgtattaattttctgtttttcagataacaaattgacacaaatttagcagctttaaaacaatacccttttattatcttatagttctataggccagaaatctgatacagtgtgtctcactcagctggttctcagctccaggttttacaaggcagaaatcaagatgctgggaggatagtgtatgttcctttctggaggctctaggggtgaatgtttccaagctctttctggttgttagctgaattcagttacttgcagttgtaggactgaggttcccatttacttgctggctttttgggaagtggtgtttacctgtttaatctcagtggtgtttacctgtttaatctcagtggtatgtgtagttatatgggattgtgtgttttaaattgatctcttttgtacctttcctttctattcctttgatttttgttctttttcatctccttttactttctttgggtttatctattgttccttttcaaatatcttttttttttgagacggagtctcagtctgttgcacagactgcagtacagtggaacgatctcagctcactgcaaactccacttccccagttcaagcgattctcctgcctcagcctccggagtagctgggattacaggcgcctgccaccacacccagctaattttcctgtttttagttagagacagggtttcaccatttggccaggctgatctcgaactcttgacctcgggtgatccgccctcctcagcctcccaaaatgmtgggattacaggcatgagccactacacccagcctttaaatatcttaataagaatacttagctcattcatttacagccttttttcatttctaagatgagcacttaagtctatacatttttctcagaataccttttttgtgtgacctggactgtgtgagatagttttttactttttcattttgaagtgttttaaatttcttttgttttgttttgttttgttttgtttttttgagatggagtctcactctgtcgcccaggctggagtgcagtggtgtgatctcggctcactgcaagctccccctcccgggttcacgccattctcctgcctcagcctcccaagtagctgggactacaggcacccgccaccatgcctgggtaatatttttttgtatttttagtagtgacggggtttcaccatgttagcccggatggtctcgatctcctgacctcgtgatccacctgcctcggcctcccaaagtgctgggattacaggtgtgagccaccgcgcccagctaaatttcttttatggtttctttttgacctgttgattgtttgggaattgtttagaaatacgggtttttaaaaagctattttttctttgattgtacattgtggtcagagaataagttccatgtgatatctatgcttagaaattttttagatttatattttgccagtacatgactacttttgtaatgttttatgtatatttgataaaaatatagattatctaattattggatgcagaaattcatatattccatatatcattatatgatccatacatattcaagcttgttaattattatttcctgaatataatctttgtttatttatatgcttgactggtcagtaatagaaaaatgttgtgtcaaaatctactgggaggggtggcgacgtagctcacccctgtaatcccagcactttgggaggctgaggtgggtggtctgcttgagctcaggagtttgagaccagcctgggcaatatggcaaaaccccatctctactaaaaatacaaaaattagccaggcttagtggcaggcacctgtaaacccagctactcgggaggctgagacaggagaactgcgtgatcctgagaggtggaagttgcagtgagctgagattgcaccactgcactccagtctgggtgacagagtgagaccccatctcaaaaaaaaaaattaaaaaaaaaaaaaaaaaaaacaaccctaaaacaaatctactgtgatgttaggtttgtccatttttttccagatttttttggcttgatatattttgagactattttattagatgcacatacttttaaaattactttgtcttactggtaatgtgaacttaaataattttgttatgatcctttctttcctagttgatcatcttttagtttaaagtttatctgataacaattacatgtagttaaacttctttcttttggtcaacatttgaccaatatgtcctttttccttctttcactttttttatttttatttttagagttggggtctggatatattgcccaggcagaagtacagtgactgtttataggcatgatgatagcacactacatcctctaacttgtggcctcaagcgatcttcccgtcttagcctcctgagtagctgggactacagatgttagccatcacactcagcttctttcacatttatacattargagtccttttgctttttatatgtcttttataatagccattagttggattctttaatcttataatctttattttttaacataatgatttttgatttttgttcatccctcttgttcttggcttcataaaaaaaattgaggccagctgggcgcggtggctcacgcctgtaatcccagcactttgggaggctgaggcaggtggatcacgagatcaggaattcaagaccagcatggccaagatggtgaaacytcatctctcctaaaaatacaaaaattagccgggcgtagtggtgggcgcctgtaatcccagctactcgggaggctgaggcagggagatttgcttgaatctgggaggcggaggttgcagtgatccgagattgcgccactgcattccagcatgggtgacagagcgagactccatcttaaaaaaataaacaaaaaataaaaattgaggccaggtgcagtggctcacgcctgtaatcccagcactttgggaggctgaggtgggtggatcatggtcaggagtttgagaccagtctggccaatatagtgaaaccccgtctctactaaaaatacaaaaattagctgggcatggtggctcatgcctgtagtcccagctacttgggaggctaaggccagagaatcacttgaacccggaggttgcagtgagccgagatcgtaccactgcactccagcttgggtgacagagtgagacttcatctcaaaaaaaaaaaaaaaaattgagtgccttttacccagagcctcaccaacagaattgccaaacttttgattttttctttttttgccagtttgatcactaaatagtgatgtttcatcttacctcgaatttttttttttcatgagtgaagttgagcatcttgtttaaaaacatttgtggccaagtgaagtgctcaggtctgtaatcccagcaagttgggaggctgaggcagaggattgcttgaaaccaggaatttgagatcagcccaggcaatgtagggagaccccgtctctaaaaaakaaaaattaaactggtgtggtattatgtacttgtagtcccagctattcagaaggctcagggaggaggatcacttgagcccaggagtttaaggctgcaatgagttattattgcaccactgcacccaacctgggtgacagagttagactagatctcttaaaacaaacaaaaagtttacttttctcttttctgtaaaatgtctgttcatatcgtctctaccacacttatttttttggtgggattgtgtctttttagtgatatctgtgtttttttgttttttgttttttgttttggagccagggtcttgctcactgcaacctccaccttcctcaagcgattctcctgcctcagcctcccaagtagctgggactacaggcatgtgccaccatgcccggctaattttttgtatttttagtagagatggggtttcactgtgttagccaggatggtatggatctcctgaccttgtgatctacccgccttggcctcccaaagtgctgggattacaggygtgagccaccgcgcccggccttaaacaagtttmaacacacacacacacacacacacacacacacacgttttttagagttggggcttgccttgtagcccaggctggtgtctaacttctggcctcawgtatttctcccaccttggccttccagatagtttggattatgggtgtttacccctatgcccagctctaaataagttttaatgccaaccatcacttctatttgtagagattcctaatgccacccagtgtaatgcttttggggctatggcagtgtaaatttggttttctcactgctgtttataattcagctttcttgggtctattgagttgatcactgcacctcactctgctttccactgtccaaaattttgtcaccattatttttttgtttttcttgtctttcagagttttagtgaggtttcaggaggaatcagaagttcatgcatgtattaagtcctttggttttactgaaagtttgacacatattttgaattgtagttattttgtctttcctaatttagatgcaaaattaagttgtctagtgagatactcagttaatcaagttgagatattaagggttacaaaaaggtttaccacactggtttatatacaggttaagtatccataatttgaaaatttgaaattcataatgctccaaaatctgaaacattttgtgagccgacaagagactcaaaagaaattttgaataaggtatactcaacttggataatattcatttgaagcatgtaaaggaaataatggctgttatgtgttatacacaaatgtgaagatagtgttgatttgatgctttacttttgataatgttgatctgatgccctggttttgatcacttaacagatacccatgtgctttrtgggaagttgagttcttcttatgctcatgggctgagcccgaattaatccaaatcagtaatggtaattttatgccctctcccattgatttgatagtgagtggccttgagagccagttcattgggggaagttccccacttttttggtaaagaaacataagcaaggggaaggcagtctctcttatgatcctagacattaaattgttacttgcaactagtgtagctactttgaaaccgttaggggacaaaaagtcatcacactaaagatgacacaggaaaaacaaggaaagaacttaggtccatgatcttgatgaggcatcataaattacctatccctggagctgctgtagctctggactttttgttatatgagataataattcctcagattgacttagaataccaatcaaaataactattattttagctagctaagaaaaaaaatctgagtaaataccataaggttcagattacataaatatgaagatcaaaactgcaagttttctgagaagttagttattattgttttttactaatatgagctgcattggaaatttattttctttttaaaaaattattgctgtctttgtccataacttttatggacctgacattttagttgtttggaaaaattggtaattttaatcttttgttttggtatgattcaggttgacctgacattttaatacatctggctcctaggactgattaaagagacattttatttgttgaaatatgcacattttcttcatgaaattggttttcttttttatgtgtgacttttcttgcaaaagcttacaaggcacatgcttttgatagcagtgttacatttttaattaatattttagatgtaaaaggtgacagtttaaaagattgttktattagtgggttatccttaaaagcaagtggcatttggttttattttacaatagagtttaatcttacatgttttttgttaaagtaatgttaccaaaaaatctcttattgaactatttgtggtgaactttttaaggatgtttaagatttcacatgcagtttaactgatcacagatgaagttgtaaattaatacctcatgagcgtatttgactgcagggcattgttgtgaatcaaaaccgctttgttcctgtaaactgtgaaaggggtttaagcatatggattaaaattgcatggtgataccgaagtacttatgaaaagacactgtagttggatcatttaaaatgtactaaaatattacgaatagccataaaatataataattccctgaagcttttaagagtggtaagatttagttttatttctttgttggatttaactactttaataagaaattgttttgttgcttttggaactatgcatagtaatgagaataaccatgatgatgagaacactggaagcttcccagaaaacatgtatttcttcagaaatgttcttggttgtgacaaatatatatatgaagcttttccttgttcccatctgagtcattcccttaccagaacctttagaatgaaaggtttaatgatatcttctagtataagattatgaaatgagcattgtttagtgtaaaatcatatttttcttttgctgttaattttgtcttatagtatatgaaaatcacctggtgtagaatgtatttttcctgccataagaaactgtcaagaatctattgaaaaaataccatgagagtagttgttctggatgacaatggtaggttctgatttactgacgtagaagcaagcttcagttagccactttagtcataggtaaacactagattagcctaaggaaaaattgttgggaagcttttggagttctcatctgtgtcactgttttagatctcttcaagttctttgaaaattttggtacctccctgtttaacaaatattctgttttctgctatctaattagttctcatgtagatgacgtttctaatactaattaccacactttcttggactcctcttttataacgacctttatctccattccatttgatcaactgttttttaggactatgttctgaacctacttcctacccaggactgctttaaaaaaagtaatctatgttagcttcctgtttggcttcttcctagtttgactttactctctatatacagcctgagtggcatgctcggttatttcagctacatcttaccattactcagttctctctcccttttgaccttgctggtttctaaatctgggtcaatttgtgtgccttgcttcttgacttgatattamaattaacttattttgtcatactagatgttttcagccatctttgatccccaggttgctcaccaactcttattatcctttgaaatgactctcaaatcttacccctctttttgacttttatgtttgttgccctcatcttcatcttttttttttttttaatgagacggagtttcgctcttgttttctttctttcttttttttttttttttgagacagagtctcgctcttgcccaggctggagtgcagtggcgccatctctgctcactgcaagatccgcctcctgagttcacgccattctcctgcctcagcctcctgagtagctgggactacaggtgcccgccaccacgcctggctaattttttgtatttttagtagagatggggtttcaccgtgttagcctggatagtcttgatctcctgaccttgtgatccgcctgcctaggcctcccaaagtgctgggattacaggcatgagccactgcgcccagctcgctcttgttttcttgttgcccaggctggagtgcaatggtttgatcttggctcactgcaacctccgcctcctgcgttcaagagattctcctgcttcagccttctgagtagttggcattacaggcgtgtgccaccatgcccggctaattttttgtatttttagtagagacagggtttctccatgttggccaggctggtctcgaactcccgaactcaggtgatccgccagtcttggcctcccaaagtgctaggattacaggcatgagccaccacgcctggcaaattctatttttttttttttttttgagacggaattttgctcttgctgcctaggctgtgcaatggcacgatctcggctcaccgtggcctctccctcccaggttcaagtgagtctcctgcctcagcctcccaagtagctgggattacagacgtgtgtcaccatgcccggctaattttgtatttttagtagagacggggtttctccacgttggtcaggctggcctggaactcccaacctcagatgatctgtctgcttcggcctcgccaagtgctgggattacaggcgtgagccactgctcccagcccttcatctcttacattaggtgccatagcactcacctctgtggctctgtttcttctatcccaacagcacatgagggattgggtccccttccatctctccaactccctactcctactaccacataaattaacagaaactccctttagtagtaattctcaaatgaggtgccaaatcttggtctgtatggaatgtgtatttggttttaaaaaaattctaaaagtgattctcttctgaggtcctaaagggtcttttgcaggacttcctcaaattcgtcttttacaatgctataggagtcatctttgtgaaacatagatttactcattttacaactgtgtaacaacttattttttgccaagtattgggatagctactggagttagtaaagtgaatattagggtgcttacttttgagaaaaatgctaataatatagtatagccatcatttactggaacttttttaagtgctaggcacttcatgtatttatccttataatagtccttcagtgtagatattattagccactgtacagatgagcagccattctcagaattctgaggactcacatagtaattcattaggcaagtgataagctttatgataaatacttgaaagggacctctaagagcatagaggagggatatctagtttagagttggaagattaacagaataggcttcacagagaagatgatgtattaagctgagtatttaaagacaagtaggaacttagacaaaatgatagattggaaaatgagtgtgtggcatggttatatttgtgaatagtctttgtacagagatataagagaagcattttatgagaacacctggtgctcacttaggcaacacatatactaaagttggagaacagctcaatatgactgaagcatagtatgtgagatggggaatttagagtggtttagatataaagacattaaactaggttgtattttatatatttatacatctatatctatatatctatatctatatgcatctgtggtcccagctactaaggaggctgaggtgggaggatcgcctgagcctgggagatcaaggctccactgagccgagattgcaccattgcactccagcctgggtgacagagtgagaccctgtctcaaacaaaacaaaacaaaacaaaaacccagttagactgctggaatagtccaaataagaaatcaggaggccttgaaacgtgtcagtgggattaaagaggagagaggtggaattgaaggttatctggtaggtgcaatcaacagacttagtggtttaaaaagtgagtgagaggttatagtcaggttgggactatgtattaatcctttatttttttaatttactgtactgtactatgtattattgktaatatcctttatttcagattgacatatacccttaaatattcttaagatcatatccttaaggtcttaatagtctctgaataaatattggtataagctgcttcctaaatgatttcccatttatttactggtgtttttatatatctatttagagactgaatctcactatgttgcccaggctagagtgcaggagcatgatcatagcttactgtaacctcacactcttgggttcaagtgattctcctgcctcagcttcccaagcagctaggactacaagtgtgtgccaccacacctggctcattttttaatttttgcagagacagactcttgctatgttgctcagactggtctcaaactcctggcctaaagcgatccttcagtccctgcctcccaaagcagtgggactgcaggtgcgagtcaccatggctggcttgaggagtgttttttaaaacatcctggccaactgtgagcattgagacatcaatttatcaaggctttactgagtgctcaagggcccaggcacattctaagtcctggaagagggagcacagtggaagttctaggacttagctatctagttaaatatcttcagtttaaacagatttactcattttacaactgtgtaacaatttattttttggcagtttctgaacttccagttttcacgttctctagtattgacaacaagctgataatcttgctagacacaacagactcttgaggaaggaattattcattgtggtttatagacaatgatatttgaagttaacttgccccagggcaggagtatggttcttatataatgtaggaaaaggccagtcaacaccagacctcagagctaccatttaatgcattgtggcaaatgattcgcatgtattatcacacttaatgctcacaagaatactaccatgaaatagttaatatttaaaacaaatttttttattttttaaggagactgggtctcactatgttgcccaggcttgtctcgaacccctgggctcaagtgatcctcccacctcagcctcttaaagttctgggattacaagcatgagccaccgcgagtggtctttatcattattatcgctgttttacagatgagaaaactgaggcacagagacctgcttatggtgacasaagtaggaattgaaaagatgagatttgaatctagctggtctaatttatcctgaagttcaagatagcaatacaagaattatgaacatataaatggagtgagtggatatgatcrcycaagataaatctcttggccgggcgcagtggctcacacctgtaatcccagcactttgggagactgaggcgggcagatcacgtggtcaggagatcaagaccatcctggctaacatggtgaaaccccctgtctactaaaaatacaaaaaattagtggggcgtggtggtgcaygcctgtaatcccagctactcaggaggctgaggcacgagaatcacttgaacccaggaggcggaggttgcagtgagccaagattgcgccactgcactccagcctgggtgatagagtgagactccgtctcaaaaaaaaaaaaaaatctcttggatgagaaaactagacttaggatttaaggaaatctacgttaatggactggccagaaaaacaagtcataaaggaaaattaggaagtaatcatgagagagggggatgttatgtcctattacctgaagcagaaatataaatggaaaacatatcagtgttattaactgaagggaaaagaaaatataaaaatatatctgttataaaatatattctgtataaaactcgaataccagattgttgtttgcattgacgttgcctgtaatcccagcattttgggagggtgaggtgggagagctcaggagttcaagaccagcctgggcaacatgatgaaactccatctctacaaaaaattagctgggcatggtggtacatgcttgtaatcccagctactcaggaagctatagtgggaggatcacttgagcctgggaggttgaggctgcagtgagccataatggtgccactacactcctgcctggggcgatgtactgagaccctgtctcaaaaaaaaaaaaaaaaaaagagaaaaaaaaatttttaagtacttttttacttagaacctttcaaatgccatgttatgtgtctttatatacagaaaccctgggcaaagacagtatggctctttttttaagaattaggagacatgagtgtaaagcatatttgtaaataacgggcaataaaattaatgcggaaggtttggcttacattatttggggagggaacatataaaattcaatattcaaattgttacatcaacttgaagtacagtgaatcatgactcagaaaatgtatgaagatgagacaaggtagttgcctattggaatcttaaatgatacttttagtagagatcatgtaaatctgtgttgatgktaaagaaaagtgaacataggctgagcgcagtggctcatgcctgtaatcccagcacttcgggaggctgaggcaggcggatcagctgagatcaggagttcgagaccagcctggccaacatagcgaaaccccatctctaccaaaaatacaaaaattagccaggcgtggtggcgggcacctataatcccagctactctggaggctgaggcaggagaatagcttgaacccgggaggtggagattgtagtgagccgagatcacaccactgcactccagcctgggtgacaagagcgagactccatctcaaaaagaaaagtgaacataaacttttaaaacttcattacagagtaaaaagtcttattacgtttttctggccaaaatttataaacttttaaaatatttcagtgaagttgagctatattagaggtatctctttatgtacctctggaatggaactttgataactgtttattacagtagaaaataggatctaaaatgggtaagttcattatttcactttgctttcttaatattcatggaaggtattttgccgaaattatttttggagagtatatgaaaagtaagtaatattttataaaactgtattgcagctgatttggagaatgagtggctactttgaaaattgtcagtagataggaaataaaaataacagaatgaagcagctcacacacttcagagtttattctcaatattgttgaattgggccataatgaagcataatgcctggttaaactttattgcaattcaaacatcmcaccagaaagaaatttttaaaaactatatcaacaaataaattcactgaagtctgtctatagcttcttctaggaactacaatttatttatttgtttattttaatattgttttttgtagagacaaggtctcactttgttgcccaggctggtcttgaactcctgggctcaagtgatcagcccgcctctgaaagtgctgggattacaggcatgagccaccgtacctggctgaaggaactacatttttgatatggtactctgctttaaacgcagtaggtactctgctgaattgggctaaataaacatttcacctctcaaaactatgtgaatatttggcttaagcaaagatagcctgggaccatgaagaaagctaaaacacttaaaaaaaatgtacccttatttaaaaagtagcatgtttctttctgatttggagtgttatgtttttgttgaaaaattggaaattacataaaaccaaaatgaaaaatatagagatgatcagtaatttcaccatgaatataatactcctcttatcattttgtattcccttccaactaatttttctcttaaaagtggcactatgtttttgaaaaagctgactactttaagaaaatttctctcagtttactttcttaatcgtgtgcttttctgaagagttggctctgacgttgactactatagtaaatccaattttgatgagtttttcttttttagtgggccaaaaaaaaaaaaaggaaagaaaattctcctttgtagaaaaaggagggaggatggaatgtatattgtagtacacctgaaaatccataccttttcttagccatatacacaattagtttactctttctcaagataatatttttatagtaaattaggattctttgttacaagtgatgggaaaccaaactagtgctatgctaggttaaaaaaaggaatttagggactcaagtcactaaactactcacgcgcgcamacacacacacacacacacacactcacacacactcacataggggttcaattgggccttaggaatggctaaatctaaggtctcaaaagctgtcagtttttttccttcggttcgttctttgtctctgagagttagcttcactttgtcagcctgcttctttatactcttcctgkttttcactctgacttactgtgtttataattatcttgggttagtttttcttattgctcatttggaaaaactatcagtacttctgattagtaatttcagatgtttttatattttaattttgtatgcaaaataagtatccgtgatattttaaaaatatttactaagtatttccctagtctttctctaaagggtaatctcaaatgaaacaactggaactggattctcatttgtttaatgactgaagaagtcttccaattactctacaaaccatygataacttttgttatttgtgaccagtattcatctagtaagatgttaaatgcttttatgaaagagacaagtgttttacctaaagaatgagaaaaaaaaaaccctaattttttgtgaagttttctccttttttgctgagtgcttaaagaaaaaaagtttatgttgttttaggtttttcttcttgcttatcaccctaggaactaattgtgttactttttaaatgtttaaatttaatttttcctgtcccttccccatgcttgctaattatgttttttaaaggtgaccctttaagatggctcttatagaataaagagagacactgaattttctaatcttgtggaagaggttatatttagccattggtattttaagttggagcacttcattctactgtgcctttagtttatgagtcatctggagaaaatgggctgcttcttgcttttaggaagagtctgtagcaaataataataataagtgctatgggagattttttgccaaataatttaaaatggaaaatgttttgtaatatattttattgcccatatgtaaaatacgtactaaagaatataggagtttttggctcattattatctttagctcataaaaataaacaaaagaggctgggtgcggtggctcacgcctgtaatccagcactttgggaggctgaggtgggcggatcacgaggtcaggaaatcaagaccatcctggctaacacggtgaaaccctgtctctaataaaaaatacaaaaaattagccgggtgtggtggcaggcacctgtagtcccagctactcgggaggctgaggcaggagaatggcgtgaacccaggaggtggagcttgcagtgagctgagaccgcaccaytgcactccagcctgggtgacagagtgagactccgtctcaaaaacaacaacaacaacaacaacaataacaacaaaaccctaatgtcacatataacaaaaagaaagcattttctaccaaaacattatatagattgttatgagttataggtaagtggaaagcaagcataaaccatatgaaattattttatatgcaggatgtacagcagtggtcaaatcttaatgataattgtcagtaactggggagaatattgtgattattgaagtattgattttttttcaaatatttttatattacatgtggtaactttttataatcttgttttatatctactttagtatgatagctttaccatactagatattctatgaggggtagacagttggcaaaggatgtgatattgattctaattttggctacctttgtattatgtgtatcataatgatttcacgcttcagttttctcatctgtacagtattttgttcttcgtgacttttcttgcaggaatgaaaggaggtagcatggaacaaagaaaaaagtgtatcatattgtaaaacaggaaattttaaagtcctagagttcagattttaaatccaagatgtcatttttgaggtaaatttgtcaggtctccctgggacacagaatgactgcatcactagaatcatgagcccgtgggattgtttttttctttttctcaaatgtatttatttaacatctctctccctctctacttacctacctgcctacctacctacttacctctgttgtgaaacttttgggagctcagtattgtctactataccaagaataccagtcctttactcatttttttgcattacaaagatcatatggaatatactggaggggaatttaggtcttttggttctgtgttagaagagcccattttgtttttccctgcatgtggtagtcggtgtataggcctgtttctgtgatgggaagatgacaccttttgtcaaatctctatcctttttgtatgtcaaggaatcatttctttgcagtgaagtagagtgtgccctgtagtatagcactctgtgtccttagtcatagcaatattggaggattggagagttaatcatgtttgagaagttaggggacttgttctttcagcatctatttaatgaatctgcttgtatttttgatatcctaatgtgtcccaacactgaactcctaatctttcctctaaaacctgttccacctgcagccctctctatttcacttgatggcagttttatccttctcgttattcaggataaaaacctgagactcattcttgtttttcctctttctcttatatcccacatctaatccttaaggaaattatactggcaccacttgtgaaatatatcctgaaatctgatcacttataccatctaaatcgctaaagtcatctgtacccccacctctcttttgtgccaccatcatcctttgcctagatttttgcagtagcttcttagttactttctttccacctttgctgccttcaatatcttgtcagcacaacagattggcggacattttaaaaacgtaagtcagataatgacactctaataaaaatgagaaaggtttaaaaatagtaaagataggaagcctggacaacatggtgaaacaccatctctacaaaactagctgagtgtggtggtgcatgcttgtggtcagctactcaggaggctgaggcaggaagattgattgaacctggaaggttgaggctgcagtgagctgtgattgtatcacttcactccagcccccgtgactgattgaaaccctgtctcaaaaaaaaaaaaaaaaaaaaaaaaaaaaggaaatattatttgcaggtgaaatggttgtatttagaaacaagaacatttaagtggcaggtagttacagaattgatacacacaaatatattttttatacttttgtatgtttaaaaaagccacaaattacaaattatgttaacagcaatataaaaagaatgaaacatgagtggggtttattctaagctgagttgttcaaaattagggtatctattaacataatttacgatgcttctcagagggtttctgttgttcactcagtgactgcagacccactagtactaatgaactactctcttaacttgttattgaactacaccttctccaatgagtctgagtctttaacattgcatactcttttaatctgccttggggtactatatagagctttcttatatcttatagttactcttttattagagttaaaatacttctttatgttaaacttctgtttaccttactctgtgatttatatcttttgattagaaaagactaatgtaccatattagtaggtttttggataaatttttatattattttcatagatgctagaagagcatttgccaaaattcatcattgattcttttattaactttttgtgaattaaagtataacatacatagaaaggtataaaaatcataagtgtacagctgaaagaattactgcaaagtaaacatacttgcttaactaccatttagttctagaaatagaacttggccagcagcccagaagcacccctcacccccaccttcttccccaaaggtatcttctgtcctgacttctaacattggagattacctttgctgttttaaactttaaatatatgkaatcatatagtgtgtactttttgtctctggcttctttggctcatcattataagctttatccacattgttgaacatagcagtgcttttgttcattttcttttccatgtcctattccatcatatgaatttatctcagtttatttttatattctactgttgatgatgaatatttgggttgttactagtttggccatattacaaataatgttggtatgtgaacattcttgggtgtgtcttttggtgctcatatgcacatatttcttttctttctttytttttttttttgagatgaagtcttgctcttgttgcccaggctggagtgcaatggcacagtctcggctcattgcaacctccacctcccgggttcaagtgattctcctatctcagcctcccaagtagctgggattacaggcacacgccaccatgcccagataatttttgtatttctggtagaaatggggtttcaccgtgttggccaggctagtcttgaactcctgacctcaggtgatctgcctgccttggcctcccaaagtactggaattataggtgtgagccaccacccctggcccaaagtgttatctttagaacagcagaaatgggagttccagtttttccactgttattttctatcttcagacaaacaactgtttagttatactggtaaactggcagtggtatatcattgtagttttaattgtatttccttgaccatgaccactaataaagttaagcttttaaaaatttatttatatgttgatcaattagatatacttctttgtgaattacttaagttttttacccagttttctattgggtgtttaagaatattttatatttatttatgtatttatttttgagacagggtcttgctccgttgctcaggctggagtgcagtgatgtgatctcggctcactgcagcctccgcctcctgggttcaagtgattctcccacctcagcctcctcagcagctaggactacaggcgtatgccatcatgcctggctgatttttgtattttttgatagagctggggttnnnnnnnnnnnnnnnnnnnnnnnnnnnnnnnnnnnnnnnnnnnnnnnnnnnnnnnnnnnnnnnnnnnnnnnnnnnnnnnnnnnnnnnnnnnnnnnnnnnnnnnnnnnnnnnnnnnnnnnnnnnnnnnnnnnnnnnnnnnnnnnnnnnnnnnnnnnnnnnnnnnnnnnnnnnnnnnnnnnnnnnnnnnnnnnnnnnnnnnnnnnnnnnnnnnnnnnnnnnnnnnnncccgtaatcccagcactttgggaggccaaagcgggcagatcacctgaggtcaggagttcgagaccagcctggccaacatggtgaaaccccgtttctactaaaaatacaaaaattagccgggcatggtggcacgtgcttgtaatcccagctgcttgggaggctgaggtgggagaatcacttgaacctgagaggcggaggtggcagtgagccaagatcactttattgcactccagactgggcgacaagagcaagactctgtctcaaaaaaaaaaaaawtttttttaaatgaaaaatctctgtactcagggctatgacactttttggttggcatatgtctttttggacttgttctttcattctttaaatggtgtctttgatgaaccgatgttcttcattttaatatggaccctctttttggtgttcctccctttttttagttttcagaagatattgtctatgattggttttacttctattggttttatttcttaaatgtttggtggaattcactggtgatacccttgaagcctggagttttctttgtaggaatgttccattaaaaaaaaaatacttaaagggctttttagattttttttcacttcttaaatcaactttggtaaaatttctttttctaagtatttgtacattttgtcttaagtgttaaaatgcgttagcataaccttttccctacagtatctttctgtgatttttaaatatgcatatgacctatcatttctgctaatgattatttgtgccttctttgtaagagttcatcaattttattagcgtttcaaagaactaactttggctttgttggttctctgtagatcatgatgtatgttttctatttccacgtatttagctccttttttttttttttttactttctttgggtttcatttgcagtttttttccttaccctaaccctacagttgtttttaaaaaaagattcttgagatggatacaggaccatataaaaaattttttttatgcatggcaagaagtttgcataaagtcagaagacaaattacaaacttgtaaaaaaattatttaataccaattacatcaaagtccaaggcctacttctttaatatgtagtgagtttctaaaagtcaataagaaggaaatmattatgtattaaaaatgagcaatgtttgtgaagagttgatgtgtagaaaagttaatattaatggcagtaaaacatatgaaaggatgttcatcgtctcatgaggaattcaaaataaaccttctattattaaattggcaagtattttaaaaatcagtaataagtagtatgggcaaagttatagagaataggcgctttcataagctatcataaggatataaattgctacaacctctttgaaggagaagtttacattatttatcaaaattttaagtattcttttttttttttttctttttttttgagatggagtcttgctctgtcacccaggctggagtgcagtggcgccatcttggctcactgcaagccccrcctcccaggttcacaccattcgcctgcctcagcctccggagtagctgggactagaggctcccgtcaccacgctgggctaatttttttttgtatttttagtagagacggggtttctccgtgttagccaggatggtcttgatctcctgacctcattaaccgcccctctcggcctcccaaagtgctgggattacaggcgtgagtcatcgcgcccggcccttaagtattctttaattcacgaactatgtgtataaagatgtttatttccatattamctataaaagccaaaaaactagacataacctaaatgtttattctagagactaggttgtagctacccaatggaaaactatgtagccactaaaaggcaatagactgttggtactggttgttacagaacaagctccaggaaagtttttttgcagaaatacacattttattaaacgagtttgtgggtgaagtgtttgtattttgtgtgtgcatagtaagtttctgaagtgcataactttgtgtatctcactaggtaaatttgagtgttgtatttatggagttggatttacaacatctggtatttactattcagtatcactttaggttatgtttcgttttctcacttatattgtaagctcatagaaaatggaagatatggactgtgttttatgcttcataattttctccacattgcctagcatagtatattgagtgtgaaacagacttggtttttaaaaaacaatttaagaacaaatttaacactaaatatttgttttccagtttcagaacctgttcacattatctttggtgagctgtattgtagctctctgtagtagataggtataatactcattaatttattcatatgttaccatagggcgaactgagcccaagtgaataagtgagttatttaaagtaggggttggcaaactatgagctgtgggctaaatttgtcccacctcttgttctttatggcctagaagttaagaaaggtttttatatgttttaatgtttgggagaagaaagcatattttatgacacatgaatgttatatgaaattyaaattttagtgttcataattaaagtttattagaagacactgatgcatattcctttatgtattgtctatggctgccttcccaccactatggcagaattgagtcgttgcaacacagattggagttggcattttcattgcttcacactgctgcttggcatactacacatctcagtaatgcagttataattcaacagtgtttcaagtgccatatgtattgctgtgctataacactgtattttttttttattactagggcatacctatgtgtcaaaacaagaaaaggagaaaatctcatggttttaaagcacagtggactggggattattttatccaattagatggtaaagcattaggtttattatgcccttctaaagaaatagaatatatattgccattaccaggctaagcacttacagtgttccaaattcataggaacataattctcataaaaattcaaaaatttgaaatgtaatatgttacaacagcagaatttttcatgcactcactttttctctcactcactctcacactgaaaaggaggctggacttaatataagattttgaatgacccatttgttagcaaagcaaggagagctatttactaatggtaagttagtaaattttcattgtagcagctaaagaatattttcagaaaaaaattacatttttaaaaatatcattagccatttggtgaccatagttgctttaagaattgaggacattaggctcgttgcagtggctcacacctgtaaccccagcattttgggagtctgaagcaagaggatcacatgagcccaggcgttcaagaccagcctgcgcaacatagtgagaccctatcttttcaaaaataaaaataaaaagagtattgaggattttaggccaggtgtggtggctcatgcctgtaatctcagcactttgagaggtgaaggtgggagaatccacttgagccctggagtttaaattcagcctggacaaatggcaagaccctatctctaccaaaaaaaccccccaaaaaaacaaaaacaaaaacaaaccagaattgaggacattagccaggcatggtggtgtgcacttgtagtcttagcttcttgggaggctgagatgggaggatccgtttgatcccaggagtttgagttcagcctggggagcatagcaagaccccatctctaaaataaaaacaaaaaagtgaattgaggacattgggtgtaacatcggtagtcagttaaagaagatagtggttttacttggctctgatgaaccaacagatgttactgacactgatcagttattcaaagagccaatgctgagtttgaagtgactgaaaaattagctttcatgaaaagtcgatgaaacatctgcagacgtgaatattttcaaaaaatttgagaaaacactaattcagcataatctgaagtagaatctgttaagatgtgttgctactgatagtagtaaaaatatatgtggaggccgggcacagtggctcaagcctgtaatcccagcactttgggaggctgaggtgggcagatcacttgaggtcaggagttcgagaccagcctggccaacatggtgaaaccccatctctacttaaaaaaaaaaaaaaaaattagcagcgtgtggtggcatatgcctgtaattccagctactttaggaggctgaggcaggagaactgctcgaacctgggaggtggaggatacagtgagctgagatgatgccattgcactccagcctgggtgacacagcaagactctgtctcaaaaaaaaaaaaagaaatatatatatatatataaaatatattaaaatacatatttatatcataaactttgtagatttctccacttaacctttttgctccatatatattttaaatatacattatacatatatatggatcagaaaaaagggttaattggagaaatctacaaagtttgtgaaactataaggttgtaaagcctatggctattcattgtattatttattagcagctattttgtagacaacatttgaatctatgatttattatttgaatatcatttattattgaaccagtattatcaacagtgaacttcatttgctgtatgaagagatagttctgtaagtttttatcagaaatttaagctgtatatttgacttgcctgaccacccatcagtttgattactgcagttgtttgagcttatggtcaagattcaaatttttctaaacaaggagaagctccttcaactactgttattgcatatgaaatggctttgaaaattagcttttactgaagactttatattgtttcttttctttcttcttcttcgtcttcttttttttttttttagaaacaggatcttgctatgttctccaggttggtcttgaactcctggactcatgtgatcctcctgcctcaagctcccaaagtgttgggattataggtgtgagccatcatgtccctggctaatacattatttcttaatgatactgatattgttgttgtttgtttctttctttctctctctctctctctctccttgcttccttccttccttccttccttcctttccttccttccttccttccttccttccttccttccttccttccttccttcctttctttctttcttctttgtctcttttctcttttctcaacagggtttcactctgtcacgcaggctggagtgcggtggtgctgtcttggctcactgcaacttccacctccctggttcaagcaattctcctacctcagcctcccaagtagctgggactacagcctcatgccaccatgcccagctaagctttttgtatttttagtagagacaggatttcaccatgttgaccagcctggtctcaaactcctaatgtcaagctatccactcactttggcttcccatagtgctgggattacaggtgtgagccactgtggcagcctttatatggtttcttaattttgaggcataccagtgcttatatgtaaaacttayactatggtaaagttatttgacagcagctaatgtagtttgaatcacaagtaatgtcaagctgctttatatacaatgtcccattctgtcaaaagttaaaacaagaagtgatacttctatttccacacacatttgtagcagatgtttgtgggctcaaactatagttttagcaatattgatgccagagcagagataacttctttatttcaaaatccatctaacactgcaatcacggagcttctaccttatgttacattagaagtgattaatctgcaatctacatgctaaaggggaaatatcaagaaaaagctctgatagaattctataaatgctttctaagtgataaatatgcttaatttaaatcatatgctattggatttatatcagtatttgggagtatctatttgtatatagagacattcaaagttgaaatatgtgaaattattatagatcaatgttaacagatgaatatttgcgatcaattttgattgataacagtaactttggccaggcacagtggctcacacctgtaatctcagcactttgggaggccgaggcaggtggatcatgaggtcaggagttcaagaccagtctggccaatatggttaatccccatctctactaaaaatacaaaaaattagctgggcgtggtggcgtgcgcctgtagtctcagcttctcgggaggctaagacaggagaaacgcttgaacccgggaggcggaggttgcggtgagcccagattgcaccactgcactccagcctgggtgacagaatgagactctgtctcaaaaaaaaaaaaaaaaaaaaagtaactttaaacaccaattaaatgaaatgttatttcccctaaaagaattacattcttctcattactaaacctgataaacaaaaaattttattgttattaatattcctaaatttgtcagtaaaagttttttgttttataagtacctagataatgtccttggtttttttctcattacccatagagcccaaactatttactacctggccttttacaaagaaagctttctgaccctcatcttcttctaaaagaataatagatgtctaattagaaaccagttatgcattgggttgagtatcctttattagcattttaaagttcttgcatttcgaaaatactaaaaatactcaaatttagaaaagttagttgtcttcataatgtaatttaaatgtttgaagtgttacaaaagagattcacctgcaattaaatatcagcagagtgtgtcctgtacccttatcctgcaacacttttctcctatagtaactgaatgactttggaattcagggctttgtatttttacctttttttaaagcttatttttgctttcttttcttttctgttttttttttgtttgtttgtttttttttttttttttttttttttttttttttttttgagatggagtcttgctctgtcgaccaggctggggtgcagtggcgtgatcttggctcgctgcaacccctacctcccgggttcaagcgattcttccacctcagcctcctgagtagttacaggtgggaccaccatgcctggctaattttttgtattttagtagagatggggtttcaccatgttccctgggctagtttcaaactcctgagctcaggcaatcagcccacctcagcctcccaaagtgctaggattataggcatgagccactgcccccagcctgtttttgctttcaaatggactgttgatggttttctcagagtgctttacttttgaagtccagtttgtactggaaagaatttatattccaggctgggcacagtggctcatgcctataatctcagcactttgggaggccaaggcagatggctcacttgagtccaggagttcaaaaccagccggagcaacttggcaaaacctcgtctcttaacaaaaatattttaaaatgagctggttatagtgctgcatgcctatggtcccagctacttgtggcactgaggtaggaggttggcttgagcctgggaggcggaagttgcagtgaacccaaatcgtgccactgcactccagcctccattacagagggagagcctgtctcaaaaaaaggaaacgaatttatattccacattttactgagtctagtgtgagtttttgtttaaaaaaaaacaacccaggaataatttcttcaaattcataagcatggcaggcagttttattttaaattctgtgggaaatatgaatttaaggatctcatgtaccatgccttgataatcatttctctgtaatgtatattttggcaaatgatattgttatgaaacatacttttgcattaatattaactttatgcataataaagatgcatcttcagttttttgtttgtcctatgagagtttacagctggggacatcttttacaaaagtatatttataacctgttcagaagatatgaaacacaataatgagataatcacctatgtatttttcagttagcagttacaaaaggattattgacacttatagttgttaatatctcagtaaaaacatactcttgtgcttattttaaaattgaacgctagtctatatttttaaagtttccttttatggaatattttgtcttttggcactttgcatctggattatagttcccccatttaagaaagaaacctgtttctattcaataggattaaaaacacactttcagttttagagcagatttatcatctacccttcaggctattctttaatatggagctcttaaaaatgagtatattaagatattccccagatgttttaaacttcagcaaacttgtggttttctttatttgtagtatttggaagatgaaagaaagtatctccagtatctaaacacttttcatattggttttaatgttgttttttttttttttttttttttttttgctagaaaggcatgcacaagataaagcttctacactgataaattttcaaagtccttgcttttaaaatatcaagctgggtgcagtggctaacgcctgtaatcccagcactttgggaggctgaggcgggtggatcacctgaagtcaggagttcgagaccagcctggccaacatagtgaaaacccgtctctactaaaaatataaaaaattagctgggtgtggtggctggtgcctgtaatctcagctattagggaggctgaggcaggagaatcgcttgaacccgggaggtggaggttgcagtgagctgagatcgcaccattgcactccagcctgggcaacaagagtgaaactcttgtctcaaaaaaaaaaaaaggtattgtcaaaatgagagttgtattagcagtaatgtaaaagtaatattgtatgtctgtatacttttgaatttacattgttatgtgattcatatttgttttgtatagctgtaacatttggttaattgtttagtgggttattgaatagattattttcttcattacttagtacagtggggattgagaatgctttgtatcaagtgtcttacaagtattgggaagttcgaattaaaaatattaaagatgtcagtcatttacttctttttttttttaaggtggtagcccaattgaaaattttctgcaaaatcagtaactaagttatttttccacaattataaacttagttgatggcatttattgagtgcttactacgttcaaggtaaatgaaatgaaagagtggaatagtgcattatacacgcacacactcaagggaagcaagtataaacaccttatttcatctcacttgtttagaaatttgattttgttttttcttgctgggtaacatatctgtgttaatcgaaaatttatgacttagagtggaatttctctaaaaagcagtaggtgacagggatacaagataaataatttcatcagagaatagaaattcttttttacaatggataaaattgtgcttgtaacagggatacaagcacaaaccaaatcaatgtttaattattttaaaaatattcaagggaaatctagttttgttaaaatttgtataggttggtagtgtgcatgttcttaaaaatccaagaacaatagcagcagcaattcttatttaatctttctttagtgtgtccattcaaccattcattcatcaatttttttttctgtgtacccattattcatcaggcactatgcttaaatatcgtggaacacaaaaagaaatagtctttaatgctgtgttttacaaatgaggaaacctaatctcggagaacttaaattacagttgtcctttggtattcatgggggattggttccgggaacttcctcagataccaaaatccaaggattctcaagtccctgatataaaattctgtggtatttgtatataacatatgcatatcctcccatgtactttaatttctagattacttataatacctaatataatgtaaatgctgtgtaagtagttgttatactctcttgtttagggaataatgtcaaggaaaaacactctttacatgttcagtacatatttttccaaatattttcaatctgtggttggttgratccatggatgtggaacatacggatatggagggccagccgtacttgccccatgtcatataattagatgaatatagaattaaagccaggtccgtctgacagagcgtttgcttctaaccattgaggaatgttgcctaccctgatgactctactataggaaatcatatattgatatcaaattgatcttatatgtctgtagtgaggaacttggccatgttggacctatccccttccctccttgctcctctcctttcttcctcccttacccccacagcttcacccctcccttagctcttttttctgacaggtggctgtttccatccctgtttgctggcaccttctccacttaaattttggtatatcccttggttccactctctgtgttcttctcttgtgtatgagtgtggattttgtgtttgcttatcctgtgtggagtttctgagcttgaatctgttaagagtatgtcattaatcaaatttggaaatttttaagccatttttttttctttctttcctttccttttccttttttagaagcaggktcttgctttgtggttcaggctgcagtgcagtggcacaatctcagttcactacagcatcaaactcttggactgaagtgatcgtcctgcctcaacctcctgagtagctgggactacaggcatgcatcactatgcctggctatttttatttttttgtagaagtagggtctcactatgttgcccaggctggtttcaaactcgtgggttcaagcagtcctcctgctttggcctcccaaaatgctgagattatagttgtgagccaccatgcctggtcaagccattattttttcaatttttttttttctgcaccgcacttcttttcttctgttactcatgcacaaatttagatcttttagtattgtcctataggtctgagtcttttttcattttttaaaaaaatcctttttctgtcctgcagattggaaaatttttattgatttatttttaagtatactgattaacagtcttcttcattttactattaagcccatctagttagttttaaatttctagttattgaatttttaaattctaatatttttattttatcttctttatcttctgtttctttgctgagtcttttcactttttctagctgtctgaagagtcctagtagtttgtggttccctggagctctccgccttggtaatccagccagagaactggggctttattttctcagctctgcacatacttcctgtgactgtaaccatgtctgggtctaagtagtaggcagatactcttctcttgcttttttctttcttgtgttttagtcaaattattttacctcttattataactttgtttattattatttaccaacactttatatgcaaattgtagattattcagattgtatcttctaccagagtgttcactcttttctgtatgaggctgatacggagtgaggggagagcttattaccttaataaaaattaagggttaagctaggtcaaagttgatttttcagtgttgacagttcagttgagcctgtttgcttctgttcctagagcctgaacctctaggacttttaattgataccagtggtctcygctctgaaacagtccaccagaatgagggtaccaaactgacctcagaggtttccaggttaatgcagaggtttctagcttaatttctttctgccttcaaaatttggcaattatgtcaaaggggaaaatgatcttttgttttaggttttcagtttccaatgttactacttcagccttatgtaattgctaaaatccctactgttttccccctattgcccccttccttatcattatcttctgctaagcacaaagtgtgaattttcaggttccacatgtaaccagtataagtatatccttccccccaaaccccagtggaaatgtgccacggatccttatttttattctccactccttctagggctttcatttcttgcctattatgtttttagttgctcttttcttgttctgtctttgtaagcacagctagagtcagagaactttctgcttttggaactattttggttaacctctttaacttagcattcagtttcagaattcagcaaatgtgttttggggcaaactagctgtgtgttttaggtttgggaaatgtcaaattttgtttctctgtcttcatgcttctggctgcaaatgttggcaggtggaacaaaaagctgccagttctggcctgcccctgtgaacaggtctcacctctccggaaatttatccactttgtccttgttgcttcagagctctttggtaccattaacaatgtgacttatgatttatatggccttcctaggtgtcatcagtaggaatgttggctgtgatgcagtatatgctacccagaatcggaagttccatatattatgttttgataagagattttaggtgtttgagtatttctgatgagtgacattttttgaagtttgctagagagaaataattagctagttattgcttaactactctctctccatatctattacatatgtttctggaatatttctatggtcagagaaactcaggcccattataaaccatggactctggtagaaatagmagctgaaagcaaaccagtaagggaggtggagtgtataatttgtgttttggaagtacctgccggtggacttgggggtgatgctctaggtttaccatgagattactcatctaattttgagaaccactgtcctgcagtatttttcttttgcttacatatgactttttctttttatgatttaaaactaaatgtcaaccagttactatttaatgaaaatcataaattggtttagtgaaattttgttgtgttcttacaatgggtagaaacctaatgcacttatcatgcatctaaatttaggaataattcattttattttaatcatctatacttatatacaaaatgcttttcagcagtatatttgattatcttaggtacaatgatcttcatgttcagagttataaatgggaataattaaacctttaaacatattagagttgaataagggcttatctaagcaatacatgcttaaaattgctttcttatcaaaaaaataaaattggaggttcaagaagtgtctttaaattacaatccttatgaactaatagcttaaccttagttttgaataactgttactttttccgtcttttaaaaagatgcttaaaaataaacgcatgtcgaaaatgttattttggcttttagcaaactgacatttgagttttttaaaacctcactaaacatttgtggtaaaagatttcaaagctttgaattttacaatttgcctgtcgattccccccctgtgttattctattaacatttgatcttaataagtataacctgtttagaatgacttatgtttttaattatttgtttagatgagaagtttaaggaataacttcatcagaaattctacttggcagttatgaatgctttcttaaggaagttaaatttttggaatttcactgtaaagattttaatcacatgtcctattcttcatacatcaatctataaatgttcaaaaattgttaatgttgtttttatgctgtgctgatgttaacacaacgtgaggtcttctttcttctcctgataatatgctgagcgcacacacactctcatatgctcactcgctctctctctctctccttccctcccacccctgagtttgaaataagttagtggctttagtttctttgaaaatggaaagcaattgcccttaggtagaactggaaattgtaaagtgttggttttgtggacattttcctgttcataattcttgttatatcttatttataagtacttttattcatataggaataaatgattctatgttgaagggtataatcatgaagtcttttttattttttcgtgttagataaggagaaaaatgacacattaaaaattacagtgctatttgtgttttaaaatttcttctgtcgcttttgtattccttattgttctcttcactttttctrttgtttttctagcttttcaggatacattttctaaatgcatcctaaatataacttacaatagttgccttttatttaaaagtaatacatttagtttccaaccacaaagtgtttaattctacatatttctatttttattttacatgatcttaatatatccttgattactgtgttgatcttctagtttttaggctgccacttataccatcaaaagccatttaaactggacttagaggataatgaatctaaattttcttatcttcctcaaaacaacagatacaattaaagtcacaaataagctgtaccttcagaattgctaggagacagaacatagtaagaattcaaatctcttataagcagagttataaacatcatattccaatattgattctgctgctttgtctgtacatttggagagcagaggtagcagggaggtttaagagactgaaaaaagggagagggktgtatgaagtgtagatcagtaacaaacaccatcactcttgaaaagaaaaagtccaacagaggtcctagacctgtgttttagacaggtgggaggacagtaaattaatttttaaagacaaaataattatattgaatgaatttattgatcattttgttgaacagttagtataaggacatcccgtattatatttcagctttcataaactataagtgtttatgtcttatattttgtgttctttcaactttatcttaatttgcttctgttatttttaatgccatttttgtacatttgtttaatattactatattcatctttgttgtaattttttcctgtaataatgtaacataaataattataatattacaaagtttattaaatttcttccaatgataattaatatagtaggcttgtggtggaaaaatggatcaggtactgtccttccaattctgtcaggcttttgattgaggtgtttatatggccaccccgttcagacaaagaatgtcaaccaaaaggagaaagtaagaaggaatctataaattactaaaattcccatactttatttcctatggaaaaagtcatgtaaggaaaatatatagaagtttcccgtaaaatgtaataatatcataaactctttcatccttaaacacctgttagtcttgccacagcacaatcagttccctaaagataaatatttcttggtttgttagttggctacttaggagttccttttccttcttatgagttttcttctctcctgtatttcttttctaacaccatccaactggttatccaaactagcaacctcagaattttcatccctcttccacatcttacatttctttatcacatcctgtgtcttcaacttcggaatgattccttactttggtctcgtctctctatcctgtctttcgtatgagctattctaaaggcaggtggtctgcttctctttactctgtccagtgttatcatcatttttaaaaagtctgcttttcacactgttgctaaatagagtttaataatttctagtagccttcagaataatgtctacacttattagcctgatagttaccttttctttgtcagtttttactactttgattttgacctgcattttagtctgtgtttaactggtttttctgaatacgtcatgtttattgttttagcctcaaccctgaattttttttttctcccttaagtgtcaaatttcaattcagatgttaaactttccctgcctttttcattcagaatcacttctttctttgctcttgttttttattcagctttgttctatatatggttctttaaaaataattgtatggaaaattgctatgttcttttattataaaatgaagttgatttttcattacaaaacagtttatatgcttattgcacaatctaaacagatgtataaaagagccataattgttcctaatttggcgataactactgttaataccttggttgtattcttccaggttcttttcagtagacatgtatattgggtaattttgtttacacaaaaagattacattgtgcatcagttttcataaattagcacttctcatttgaaataacatggaaaatacctatcaatagatgtaaatctattttaaatctgtaacatttaaaaatgtttaacacttaagtagaagcaacacatacacatagtaaaactacatcaaggtggaaaattaaacgcttatttgaagacttctaattttgggaaattgactaattctgctattcttcaggatttctcaggccaaaattcagaacaagrctaaatttgcccatttccacctactattatttattctttctttatattatgctagagcttgtaggctctgtactaacacaagaaaggggaagaaaaaaattgtccttattcacaaatgataattatgtttaatttattaaaaacacataaatcattggagttaattaaatattagaaacttggctggaaaaaattgatataaagaatgtttctaaatatcagccacaaataaagattaaacaatatcataatagtattaaaacataggaagtatgaagtagtgatcagaataaaagatgtggaggctttgtggcaaacattatgaaactttgagagatactgtaatcatggattagatgatttaatattggaaatatatcacttttcccagcatagatatagataagtagtgcaatcactgttaaaatcctaacaagttgggctgggcatggtggctcacacctgtaataccagcactttgggagtccgaggcaggcagatcacgaggtcaagagatggagaccatcctggccaacatggtgaaaccccatctctactaaaaatagaaaaattagctgggcatggtgggatgcgcctgtagtcccagctacttgggaggctgaggcaggagaatcacttgaaccagggagtcagaggmtgcagtgagccgagatcgcgccagtgcactccagcctggcaacagagcgagattctgtctcaaaaaaagaatcctaacaagttggtttttggagtttgacaactagttgtaaatttatatggagtgcaaaaaaccaagaacggccaaagcactcatgaagaacaacagggtaaggacacttgtagatagagtgtgtgtgtgtgtatgtatatatatgtgtgtatatatattatatatgagagatagttataagatactggggtttctaagtcagtccagtgtgttttttcttaacctgggtagtggttacacagacattcactttttttttttttttagaacagaaagtttctaagaatttatagcaccaagacattcattttttaaaaattgcacatttattttacttatcctagagaaatttataaaaaacaaaagtaaactataaacaccagttaaaaaaatccttttatattaactccatagagatgcaaatactgttaacagttaatgttttcaggggcctggctccatggcttgcacctgtaatcctagcactttgggaggctgaggtgggaggatcgcctgagctcaggagttcgagatctgctgggcaacatggtgaagcctgtctctaaaaaaaaaaaaaatacaaaaaaaattagccaagtgtggtggtgcatgcctgtattcccagctatttaggagactgaggcgggaggatcccttgagcccaggaggtggaggctgcattgagctatgtttgcaccactkcactccagcctggatgaaaaaggaagattctgtctccaaaaaaaaaaaaaaaaaaaaaaaaaaagttaatgtttttagcttaccattataagtctaaataatgaatttgtgcttatttttaattaacaaacktatacaatgtctgtaaactctatactggaagatgaagaatgtagtgcacttacactgttttgcctttttattcttccttatatttgctttagtttgattttttattgattgactttatgacttcaacaatatatttaaaacctttttaaaaacttgatttttaacatttgagatatttatggagtcttctccatgaaagggagaattttgcatgcaatagtgtatgatgggcacttttaacttttttatggctttctttttcaaagtcatacaccactttacttttcttttaacctmattccatctttcttctgttttttttgggggggagaggttggaacatctccttagtaattttttccacataggaaaaaggattattaaatattactttgccttattaacctgataatttgagtacatattgaaaatttctagtttcaaaaatttcctcccttctcagcatagaatacattactccattatatttttagcatccggtattctttgagaagttaagtattagtctgatttttattccttttaaggtaattattatttttcacattatatgctttaaaggttttatcttaatatgagagattaaacaagatgtgtccaagtatggggtcctagtccctaatcccttgtaaaactgcttgatgtttggaaaaatctgaccatatttatgtttcaccttttttttttccaacatttctctcttactcttcataatctctattttccctttctgtatttcctgttaaacagatctcagaccacctaataaattctctacaccttttaatttttatttcatatttttaatttcttatattttctatctacttttttggtctttttaaaaatttcaacttttctatttttatcttagtttttacccatgcatattttgattgctcaggtaatccatccaactattgatttttcaaaaatttttcaataattgttagtgtacagaaactgtgtcattctctagctgcatcttttcatataattagataggtctgtttgtggcatctttctttccttgctttacaggcagtactgttatacttttgtttatttttatacataaaacatattttttgacgtttagtaagatgtggaagaggaaatgaacatatacttcatctcttttgaagtgtaaggtcttataattttcatacttcttgaactgattccaagggtaacattaagtgaaattttgtttagtttctatagaaaactctgttagttgtctggaatgaggagaaatacatgctgatttctgtatgtttgtagtaacaagtgattctgagactgggattctgattttgacttaaccagtttgccacgtgacctccatttggcaatctattaattattacttttactttctgtttagtttaatggccaattatggacagtctgttttaaattcttaaattcttatagttgtacacttatggaaaacatttcttaaatgtggaaatttagtatttttgttataagatatttcaattcatttattcaacatacttaaacaataaaaacattttactatttgtgttttaatactcttctgctcagaaaagtttactttgttgcaactcacagaaggtaacttacttttttctactgtgatttccttataggtttgatgaacttgtgaaaaaattcaaagtcgaatatcatgctggtggctctacccagaattcaattaaagtggctcaggttggttaattattttaaaagttaaaaggattcaaaatgattctagacccatgtctattttgcataattgtttccttttatattgtgttgctgtagaatagttttgttcatttgaattgggattttagtagtcattgcacatctaatcaaaagttattttaattggtatttctttggttattggtaagcttgaacttttaatgtttattgttcatttgtgtttcttcttaaattgtttcctttcactatcattttataatttttcatgttacagatttgtagaaacttcatattttatagatagtattcctttttattttataagttgaaagtatttattttttgttatgtgtacattaactcttacagtgtcttttactgtgccttagttcttaatgtaactttcaaagtttttaacgtaattaaactttatggcttcttcatttcctgcatgtcccccttacgaaggacgtttctgccacaagatagtagaaattgctctgtattatatatagatatctatatacataaatgtacattcatatattcatacctaaatatctatgtatagacatatatgttggtagatatgtatatgcatctatatatctataccggtgtatatcttttataaatctatatatctgtctctattcccatatcttccaatgagtaattgaataaacccattaggcatatactctttgagttaccagcttaacctaatcttgattgagagagttagtgatctgtttaatcttccagctttgaaagatatgaacaagttttacatacctctggttcttacctctgcagtttgaagttaactcaaaattctgctcattgcaatcatgtgtcagttctgcctacactagatttctttttcttttttattgattaatgctttccccttgaattctgattaacttcaagaactggggaagtggaaaattgacaaataaaatccagaatgatttcttttcaagtaactcttagttgattgagacatatagtatgattattccacatacttccaagctcagatttaatcatagttttcaaatattttgtaaaaatgaatctttaaggcggtcattaatatgaagtggcctgagtctttgtattggtcaattgatttgtattgtttttggtaaaacatcctggtggtcactttatgaacttccagagtaatagaaaaaggatgatttacggccaggcacggtggctcacgcctgtaatcccagcactttgggaagccgaggtggacggatcacttgaggtcaggagatccagatcagcctggccaacatggtgaaaccccgtctctcctaaaaaaatacaaaaattagccaggtgtggtggcatatgtctctaatcccagctacttgggaggctgaggccagagaatcggttgaacctgggcggtataggttgcagtgagctgagatcatgccactgcactccagcctgggcaacagagtgagactccatctcaaaaaaaaaaaagagagaaaaaaaggatgatttactwaagccttaatttatcaaggcacgttttgcattttgcagttttcagtcttttctcctgctagaactgggggtgatatggttaggctttgtgtccccacccaaatctaatcttgaattgtaatctgtataatccccacatgccaaggaagagaccaggtggaggtaattgagtcatgggtgcagtttccttcatgctattctcctgatagtgagtgagttctcacaagatctgatggctttataaggggctcttacccctttgctcagcatttcccattcttgctgccttgtaaagaagatgcctttcttctcctttgccttctgccatgattataagttttcagaggcctttccagacatgctgaactgtgagtcaactaaaacttttttctttataaattacccagtctcaggcagttctttacagtagtgtgaaaatgaactaataccgggaggctattagctgttcactaataaattgtctcctttcttggggatcttcatcagtttctgccttctaaaagtttattaattatataattaagttctccctcagctttctccctgatattagtctcataataaaacagtcattgcctayttttattcttttgcacttttttttttacaatatttcacattcattctaacaacgtattctagtagtggtttatttgttcctgtctttagcaaggtaataaaaggaatttgaagctttgggtaacttattctgtcagatcttactagtaatcatactttcatgtatcaagtgatatggcaaattatgtcaacaagaaaatgtccccaaagctcttaggtattttgatatgtcaaatcatgtttttgaagattttaatgaaaccataggcaacaaaaacaagtatggttgatatcttgtccaaacacaattctagatttatttgatacacagcacaaatgtaaattttggtaaatttcatttggtctgaacttcttcctaatgaaagtgaaaagttcttatctgctcaatatcctgcacagcatgtatataacactgctaaaaaggggtataacttgcttaagtttgataattgatgctttcttaatgaacacttttggttactttgtcagtttttaaaaaatttgtagaagcacttaatgtgagttttgacttgaaagaaatggaaaaacgttggcattgtgactcatgcctgtaatcccagcattttsagaggctaagttaggagaatcgcttgagtccagtagtttgagaycagcctggacaacatagtgagaccctgtctctaggaaaaaaaaaaaaaaaaagaaatggaagaaaatgacttccttggatatgtgcctaaaagatggctattattgttgctggacatagatgccctgcagtacaatattaacaaaatatgggaccaaaggaatgcccatctctgatttggcagtacattgagaatgagaatggaaaaagaagattatagtaaaacaaatatttttatgctgtttctggtttttttgtttgtttgtttgtttcaagacggagtctcactctgttgccaggctggagtgcagtggcgcgatctctgctcactgcaacctctgcctcccgggttcaagtgattcttttgcctcagcctcccaagtagctgggactataggtgtatgccacaaagcccagctaatttttgtatttttagtagagatggggtttcaccatgttggccaggatggtcttgatctcttgaccttgtgatccacccgcctcggcttcccaaagtgctgggattacaggcatgagccaccgtgcctggcctgtttctgtttttgaagaggccacaagtgggctagaaaaaacacataccaaaaaaatactcaaataattttatttgttcattatttattaatttttttgagacagaatctcttgctctgttgcctagactggaatgtagtggtgtgatcatagctcactccagccttgaactgctgcgctcacagggtcctccttcctccatctccacctccatctcctaggactacaggcacaccctaccatacctggctaatttatttgttgtagagacagggtctctgtgtgttgctcagattggtcttgaacttttggcctcaagtgattctcctgtgttggcctcccaaagtgcgaggattacaggtgcgaaccattttacctggctcaaatggctcatttttatatattaagagtgcttcagaactcaagtaaaaaagtcacagaaaagagcaatgaggttaaataaaactttttttcagtttctttactaaaactgtaacttacttggaatccagttttgacatcagaaattcaaattcaggtgttttaaaaccatttctgcaagaaagaaatttaagttaggatgatagccaatgtctttcagagtgttttaaagtgatggacattttgaacattgataagcctatataatgaatctgtaaacacaagggatatgattcataaagagctggaatgccaaaacctgcatttagctaaaagatagatggatatttttatagaactataaactaattcctatatctaaacacctattattgatagtaattaaaatcctaagtattctatgtttacatgcttttgttgagaggatatttagcttaatgtcattgcactggactgacatcaagaatgtgggcttgatgcatcagaggtataagtcacagtgaattttacctttgactgtattacgttttaccacacatacaagaaggattgacctaatggctctagtcaagtatagaaaggaaacataaaagtaaaaatattttattatttcttaggcaaaaagaagcatgcctttattctttttaattaaatattggtaaaatgtttaatccaactgtggttacgttattttttwaaaaagtgtgatagaaataaacaacagaataatatatgattttgaataagttcaatattagtttgctagggcagtcttarcaatttcagagactaggtggcttaaacaacaaagatttattttctcacagtgttggagtcccagatcaaagtgttgacaccttgattccttcagaggcctcgcttcttagcctgcagatggctaccctctttctgcctctttgcgtggtggtttctgtgtacatatgtacctctggagtgtctctgtgtgtcctaatgtcttcttataaggacaccagtcagattggattaaggcctacyttactgccctcattaatttaattaccttgttaaagaccctatcttcaaatgtagtcacattgtgagatactggggtttagggcttcaacatatgcatagtggcaggagggtctgtggaggggtgtttataattcagcygataacaactatgtgtttttaaatttttgtgtctaagtaataaaacatgaataagttaatttttggtagtgttcttttttgataccttcttccttttctttcctgtatatgttttagttacttttattatttaccatttgaattacaatgaacattctaaactcataacaacctaatttgaataataccaatgtagtttcaataatatacaaacactctgctcctttacatctccatcctcttcttatatattattaygctcattgattacgtctttatatattgcatgcccattaacatagatttgtaactattcttttattcatttgtcttttaaatcatataaaaataaaaggaattacaaaccaaaagttcagtgatagtggcatttatatttactatgtagctacttttaccagagttctttacttcttcatatggcttctggttactatcaaatgtcctttcatttcagcctgaaggactctctttagcattttgtgtagggcaggtctattgttaacaaactgtcttagcttgtgtttatctgggaatgtcttaaatagcccctttattataggatagttttgttggatatagaattcttggttaacggtgcttttcttttagtatgttaaatatgtcaactcactgctttttggcctacatggtttctgatgagaattagttcttattcttactgagaatcctgacttgtgaccagttgcttttctctcactgatttcaaaattctttccttgtctttgtctttcagcagtttgactataatgtgtcttggtgtgaatctttttgtgtttatcatgtttagagcttattaaattcatgcttcaagttcatgcttggatgtgtagattcattcattttatgaaagtcaggaagttttggaccattatatcttcaaaaatttttttcttttattttctctttgttttccttctggcattctcataattaatatgttggtctgyggtgattgtttagtgataaggattctgattaaataagatagaaaaaaacaccatggtgagtaagcaaagcagaaatagaaccccactgttttaactagtaacctcagcttgctttttttaccggagatttttctctcatcctgagaaaacttcaatttttacttctctaaatgttagagattttgagtagtgtttcacatgctttcttcacttcttactgtcttcttcaatttgggagtaattgtaggttgtcagagagagtgtcgaatatgcatcactttaaatacagttatcagtaaatggactctttcattcatgcttcccagagatgacagttttccttggtgcctagatacctttttgttccttggagattcatagtattatgtgactcattgaatttttcagaagcctgatggtgagcttcgtgaggtatttctatttaagttgtaagttcgcttgtttttaagcttcctgcaatttaacttacctatagtatttttaaatttattttaaaaatgccatcttggggtatattctaggcatctcaaaaattttaaataccatcttatcctttgttaactggaatataagcaggtaatcatttgaatcattttttttcctgtaattattataacattgaggctatatggatttttttttctttttttaatttgaggcagagtcttgctctgtcacccaggctggagtgcagtggtgcgatcacagctcactgcatccttgacctcctgggctcaaggaattctcctgcctcagcctcctgagtagttgggactataggtgcacaccaccacacccaccttatttttaacttttttgtagagattgggttttgccatattaaccgggctggtcttgaactcctgggctcaaatgatcctcaagacattagcttggtctcttctcaaattagcagatccttatttctgtcttataatttctaatctgcttttataattattgacttacattcaatcttccagtttttcatgtctcttccaattagataagcctccatatttgtatttaacttccagtaaaattttaaccatgttgtttcatttttaattaaaatttaagaggactgcctaaatgccagtgtgtttatgttgtatacatctcggggcatgcttttaagtgttttcttgatgtaaaacatcacataataaactagtgttcataattgtattttaaagctttccaaaattctatgtaaaatgagtttctaaaaacactaaacaaaagaagttttaggaattatgtttgaatgaaatagaaacattgaactcaaaattgtaaagctgatatttcaagaactaccaattagtgtaacattactaattgagttacagtatttagaagttaaaactgatgtaaatcaaaggactcatgttgtttatctattttgaatccttttttgaaaaaagttaatctttaaagtttttctgtattaaaaaaatctgattatctcttgtgacctattttacctagaaaagctagttagaggttaaaaggttttttatgagacatacttctgtkcatcggaacagtccagatgtaaatttaaaaagaagaaatgacaatgaagtgatcaaagagaattctgtgttcaaatgctttcacctggagcagttgtagaaatgtcagtagcacaactgtatttataattatagcaggatgtggcagatggtgatgcaacaccgtctcgtcaattctttgtgtcattgaagaaagtagtaagtattaattctgccaattttatgattaatgaataattttaagtaacacaggccctacgaataaggttgactgttcaaattgtgatacctcattatagtttttaaagtttaaatatgaattaatactcctctttgcctttctgttctctttccttttcaaattaggttgttaagttttcatagctaaaataagatgaaggaagcagtggcttgctgtcctcaattatatttttgatgtgtttgtgaaattattataacttagatcagattctttaaagaaaaatcagtatttcattttttcctttcctcccttttctccctctctcctttccttgtctctctcctttcctttctctctcttcttccctttacccctcctctccccttcccttctttctcctcctcctcccttcctcacatctctttcccttctcctcctacccttcctcttccctcccctcttcttcctttcttcctactttgttttatgcatwatgttaagaaattgttttactgctattagtgataacatgcttttagttctgtcttagcagttatggttgtgctctccaggataaatctacacatatcacagttatccacttcataaaagaatgacatatctctactcttgtgggccttaatgtcatgcagtgtttctgggtatgacattaaacatgggtacaatttgaaattgtatttttctgtctaaaagcaaaacaaagcttcatcaagaaatactacaagcagtgggacctaatttcatcaaggggataaaactctattcctttttattctattwtggaattggaattcagaaacatttttttttggtcctatggatggtatattcacttatttgaaatgaaaattgaactcagacttttctgaaagagtctcatttgttaattggttgacaaggatggtctttgccatttaaatgatacagtggtactgtcagctgtcattgttcttgaaagcaaagaaaatatttaattgtattgattttctgacttacgttcgaattaatacacatttccttcttctttaagcaactttattggaatatagttcacgtacaattcacctgtttaaaatgtataatcttgtggcttttagtgtgttcacagatctagctagctgtgcaaccatcaccacagtcagtttcacaatattttcttttcttttcttttttttttttttgagayggagtctcgcactgtcgtccaggctggagtgcagtggcgcgatcttggctcactgtaatctccacctcccggggtcacaccattctcctgcctcagcctcccgagtagctgggactacaggcacccgccactgcacccggctaattttttgcatttttagtagagacgaggtttcaccgtgttagccaggatggtctctatctcctgaccttgtgatccgcccgccttggcctcccaaagtgctgggattacaggtgtgagccaccgctcccggccccacaatattttcattatcaaatgaagaaactctataaccattagtagtcattccccatttctctctcaccccctcatcttctgtccattcaaccccttggccccagacagtcacttatccagttttgtttctataggtttgcctattctagacaattatttttatttttggagatggcatcttgctctgtcttcgaggctggagtgcagtggcacaatcatggctcactgcagcttccaactcctaggcacaagtgatcctcccacctctgcctcccgagtagctgggtctataggtatgtgccaccatgctcagctaatttttaacttttaaattttctgtggaaatggaatcttgctttgttgcacaggctgatgttgaattcctgacctcaagcaaccctcctgcctctgcctcccaaagtgctgggattacagttgtgagccactgtgcacagcctttmaccaattgtcaaaaacttattcatgtmtgtgattgtagattctttgaccaacatctctccatccttctacccctctaattacccaagcctctgataaacaccattttactttctccttctatgagatcagctttgttatagttcacatatgagttgagattatgtagcatttgtctttttgtacctggattatttctgttaacaagttattctccaggttcctccatgttatcacaaatgagaagattttgttccttttttttgtggatgaatagtattccattgtgtatatatatcscattttatttattcattcattcattgcctgataaactcttaggttgattacatatcttggctgttgtgaataatgaagcartaaatatggacgtgcagatatatcttaatcatttccactgaatatgtacccagaagtgggattgctggatcacatgttgtaccgttaatttcttaaggaacctccatacctgttttccataatggctgtgctagtttacattcccatcagcagtgtacagggttcccttaatatttcgggtactatagccttttgtaatatattttgaagtcagatagcatgatgtgtctttgtcatttttgctcaagattgcttttgctatttgggatcttttgtggttctatatgaattttagaattttttttctatttctatgaagattatcattgtcatttgagagggtttactttgaatctgtagatcactttggatagtatgggcattttaatgatattctttmattacatgaatgcaggctgtcttttatttgtgtcttctttaatttctttcatcagcgttttatacttttcatcttagagatcttttatctccttggttgaatttatcactaggtattttagctatttttatagctattttaagaggaattgtttacttgatttttgtttttttcagatagtttgtggttgatatatagaaatgcttttgtatgtttattttgtgtcctacaactttactgaatgtgattattagttctgacagtattttggtacattctttagggttttctgtgtatgagatcttgttgtcttcaaacaagaacaatttaatttctacctttccaatttgtatgccttttatttctttctcttgcctaattgttctggctgggtcttctagactatgatgaatagaaatggtgaaagtatacatccttgtcttgttccagatttcagaggaaaagctttcaatttttccccattcagaataatagctttgkatttttcatatatggcctttattgtgctgagctgcattccttctatacccaatttgttgataatttctaacatgaaagaatgttgaattttgtcaaatgcattttctgcatctattgaaatatggttttttcctgcatttaatgtgatatatcacagttattgatttgtgtatgttgaaccattcatatatccatgggatgaatccacttgatcctggtgaattatcttgttaatgtgctggcttttttttttcttttttaagacagagtctctctctgtcacccaggctgaggtgcagaggtgctctacctcctggattcaagtgattcttccgcctcagcctccctagtagctgggattacaggcaccaaccaccatgcctggctaatttttgtatttttagtagaraggggtttcaccatgttggccagggtggtcttgaactcctgacttcaagttatttacttggcctcccaaaattaatgtgctattgaatttggtttgctggtattttgttcaggatttttcttctatgttcatcggagacattggcctatagttttcttatttttgttgtgtccttgttaggttttggtatcagggtaatgctgattttgtagaatgagtttagaagaattctttcctctttattttttaaaaataatttgagaagaattcgtattagtttcgctttgaatatttggtagggtgtgttggcttacgccagtaccccagcactttgggaggctgaggcagaacttcaagaggccaggaatttgaggtcaacctggacaacatagtgagaccttgtttctacaaaaaaaaaaaaaaaaattagcttggtgtggtggtacacacctgtagtctgagctacttgggaggcctcttgggaggctgaggcaggaggattgcttgagcttaggaggtggaggctgcagtgaactatgatcatgccactgtactccagcctgggcaacagagcaagaccctgtctctttaaaaaaacagaacaaaaattttggtaaaatacagcagtgaagccatcaggtcctaggcattttttcttttttctttgatgggagactttttatcactgatttaatctctttacttattggtctgttctaattttctatatcttcgtaattaaattttggtagattatatatattcagaaacttatttcttctaggttttctagtttgttggtgtataattgttaatgagagtctcttataattctttatatttctctgggatcaattgtagtgtctccttttttgtttctcactttattatttgtgtcttctcctttttttcttagtctagctaaaggtttgttgcttttggctatcttttcaaaaacctaattctttgttgtatttatcttttgtatgttttttaggtctctatttcatttatttcttctctttattatttatttttttctgctaatttggagtttggcttgttcttgtttttctagtcccttgaggcgcaacattaggtttatatctttcctctttggggatttatgtgttaattactataaacatcacttttagacctgcttttgctgtatctgataggttatgctttttttccattggcattgtttcaaaaaatctttttgtttctctttaattttttcattgaccatgttgtttaatttccatgtatttgtagagtttttgattttcctcttattattgacttctagtttatgccattgtgatcggaaaatataatctatgattttgaactgaaacttgttaagacttatgttgtggcttaatatgtactctatcctgaagcatgtttcatgttcaattgagaagaatgtgtaatcttcagccgctggatagaatgttctgtaaatgtctgttaggcctatttggtcaagagtgcagtttaaacctaatgtttcttttttggttttctgtctggataatgtttctgttgcttaagtggggtgctgaagtttcctactaggtagaggatcagaaaaaataaatattacatactcagcttagtatctgggtgatgaaataatctgtacaacaaacccccatgacacaacctgtacatgtaacaaacctgcacatgtaccgctgaacctaaaataaaagttaaaaaaaaaagttgtctactatgattgttttgtactctatctttccctttagatttattgatatttgcttatatcaggttattttaatctagtaacaacttaactttgattgctaaaaatgtttaataaacactgtgtactttaactcctctttttctctcacattttgaatttttttctgagatacagtctcactctgtcacccaggctggagtgcagtggtatgatctcagctcactgcaacctccacctcccgggttcaagygattctcatgcctcagccacccaagtagctgggattacaggtgtgcaccaccttgctcaggcaatttttgtatttttagtagagacggggtttcaccatgttgcccaggctggtcttgaactcctgacctcaagtgatctgcctgcctcggcctcccgaagtgctgggattataagcatgagccaacttgtccagccacatattttgaatttttgatgttacaacttacaacttttaaaactgcatatcccactatcaattgttgtagttataattatttttaatagttttatctttaatcttcatattaaagatataagaggtttacatactatgcttacaataggccgaatagccacttcccactcattttttccaccatagaaaacttgcatccaggggacttctgcatatgtgggcttaggggaagggtgttgcagtcaaagcaccatttcccttactgtctgatatggtttggctctgtgtccccacccaaacctcatctctagttgtaatccccataatccccacatgttgagggagggatctggtgggaggtgattggatcatgggggtggtttcccccatgctgttctcatgatagtgagtaagttcttacaaatctgatggttttataagtgtttggcagttcctccttcactctctgtctttttctcctgccaccatgtgaagaaggtctttacttcccctttgcgttccagcgtgattgtaagttttccaaggcctccccagtcatacagaactgtgagtcagttaaacctcttttctttataaattactcagtcttggatatttctttatagcagcgtgaaaatggactaatacactgttctcagatttttctcagctctgtggtacaatgagacaccatcctgagttccaagagatccagggtagtcgtcttgccactgagaagatactaattgtgacaagttaatgggtgcagcacaccagcatggcacatgtatacatatgtaactaacctgcacattgtgtacatgtaccctagaacttaaagtataataataataaaataaaataaaaataaaataaaatctaatcttctgtgcaggcaaaaaaaaaaaaaaaaaaaaagaaattctatagggtgtggagaaccagacaacaattcctacccttccattttgcaagcatcactctgccatattttttaaagaataatgtttttagagtatttgtgttctttggtacttttgctgctgagattcttgggataacaaagtaaaaaaccaaatagtctagattgtaacataccacagtgatttggggcaagaaggatgtgcagtagaattaagccaagctgggcaagtatgaacttgggactgtcaccaaactctgtctcattcttttctccttatttaattctttccatatcaagcatttacaacccactatgtagaggtccatacaccttggcttatagacttcacttggtagttactgttgcccacctatctattaaccagaattttcatttaaaaatctctacataaaaattagcagttatgcagtggagttttcaaataaggaagaagattggttggatggatggatgttaggtgaccactgggaaactatggttttagaacgagtagctggtaggttgcaggtggcatgtattttaatacatgtagcagaaaactgaaaatttatgagcattttagaaattagagctctgtcaaaataagagaaaaacttagatttaattttataaaagcagtactaatgactttatgaagatggcatatgatttatgtatgtatgaacaattatatgtatcattaaatagatcagataaattttttgttcttttaagaataataggccagatgtgatggctcacgcttataatcccagcactttgagaagccaaggccagaggatcagttgagctcaggagttcaagaccagcctgggcaacatgacaaaaccctgtctctacaaataataaaaaaaaaaaaattagccaggcacggtggtacatgcctgtcatcccagctagtcaggaagctgaggtgcaagaattgcttgagcctgggaggttgaagctgtagtgagccatgattctgccactgcattccagcctaggcaacagagctagaccctgtctcaaaaccaaataataattttttaaatatttattatctaatgtgggtttttgctttatgttacagttgtcacctactccaatatgaaaaatgagaagaaagccaggtgtggtggtgcatacctgtagtccctgctactcaggaggttgagatgggaagatcacttgaggccaggagtttgaggttgcagtatgctatgattgctcctgtgaatagccattttactctatcctgggaaacacagtggcatcctgtctcttaaaaaaaatttttttttaaagcatgttcacaagttctttaatacttctccattgaaaaggtagaacctaatttcccttctcttgaatatggcccagacttagcgacttgtttctaataagtagaatgtatgtaatgatggtgtgctatttctgaggctagatcattaaaggcatcattacttccatattattttttcttgggacacccataatggggaattcaactgctatgttcttgaggatacgcagtcagcctttgaagacacccacatgggcaggaacataagccttccagcggcaaccagcaccaatatgttggccttgtgagtgcagccagctccagtcaaatcaccagattactggagccctgccttacttaaccgactacaacctgatgagacaccccaagagagaactgttccactaagctgctcccaaattcctgacccaccaaaactatgtgagatagtatttcttatttatagccaccatgttttgaagcaacaatgactattaaaataataaaataactttcagacattgtttttaatccctcttttctgtagtccctgtactttcccaccccaatttatatttcctgtttctatttgaacttttttcttttttgttttcatttcttttatacataatcgttttgagctataagaataatttatgccaaaaattatgcagctaatattttacacccgtattgtaaccagtatactggtataaaactagataataaactactatggctgtgttttgcttcttacagatggaaggaaatgcctaaaatttaattttatataccacaatgtgttttgaaagttttgaataattttctggttttgaaaacctgttttgatttttttttctcacaaacacgatattcttaagtaaaatagagtgatttatgattaatagaaataatgaagattatgcaagttattttacttcaattgaaatagcaaggccagaataatttaatcatgttttccagaagaataataaaatagaatcagtggcaatactagtaaacattagtctacatttctatttatttatttatttttttagacggagttttgcctttttacccaggctggagtgcagtggcacgatctcagctcactgcaacttccgcctcctgggttcaagtgattctcctgcttcaggcctcccaagtagctggtattacaggcgcctgccaccacacccagctaattctttgtatttttaatagagacgggatttcatcatgttggcaaggttggtctcaaactcctgacttcaggtgatccacctgccttggcctcccaaagtgcagggattataggcgtgagccactgcacccagccaacatttatatttctttaacttcatatcatttgctgtagttagctggatcatatttcttaaattttactttatttatttatttttgagacaaagtcacgctttgtcacccaggctgaagctcagtgtttgcgatcttggctcactgcaaactctgccttctgggttcaaggaatcctcctgcttcagtctcctgagtagctgggattacaggcttctgccaccatgcccaacaaatttttttttgtattttttgtagagacagaatttcaccctgttgaccaggctggtattaaactcctgacctcaagtgatccacccacctaggcctcccaaagtgctgggattatggccatgggccactgtgcccagacaaattttactttcatagtaacattttgcaaatgtaaaaattttataatttgattagtaatgtcagactctatcaaggtgatgctctcttaaaagttgttgatgataatattagatgagagatgtatgtagttatgaaagaccctgaaatgattgtatttttttatttctgtacaaagtttactcacatttctatgtctagccatagctattctaagccatagcacaaagaactgtattgtgatggtgagactataaaaaggtaaatttagagaaagcttccagatctgctctagaatttattaccatctggtctctttggagactagtataattattcatgggaatgttttcaacacagaaaagcatggtttgtgtattggcagaaagtaaaaagtaccagtggtttaaaccatatgtagcttttttagagttaggcaagggaaatgaactgaagacctaattgagagtcatcagtagtgatgcaatttgtgtcaattttgtcagaatctgttcataatgaacaaaatattgcacaacaagaaaaactgaaggtattagaaatataactccatttgaagagtattactttatcttaatttaaccaatgaaatgtaagatggtgtcagctaagtatttgtgtaaatctctgaaataacataaggaatatatgtcaaattttgatgacttttaaaaatgaaaacactcatgttaaaataattttaagcttgaacactggaagaatgtcttattaaggttatttttcttaaattgaatatgaatgtattattttagatcattttagatgtggcatggacttactactgttcctcttaagaagcagaaatattttacagtctttcttaagcttaaattgattttatagaaaaaggaaaaaaaaactaaatatcttttcactttccattctaacagttacttggagtctataaaaaatgagatgacaaatcaaaaaattgaaatcrtctattttttcagctattttaaaagaaaaatgcctagtgggctgggaatacacaagaaatttaaatttgtgattgagaataagaaatgcatttgtggttttaaaaaagaaataccagcatgtcacattaaaaatatggcatctacagtattgtacaaaggaaaatgtattacattaggagggggtatgttgtactttatttagagaactagtgcagggatacgaatgagaagtataacgccatagaaggcatgagcattagtaatccagtcagagaggaagaattttgctgcctcccatgtaacataaaacagatgttccattctattagaaccttactaaaatgagagtttagatcattggtcaataggagaaacatgaacaatggcaatttaataattttgagggtttatcttatttgtgagttaatatccatggtggggagtatgaagggatgcctgccaaatgttattttatttttgatatcttgattgagagagctgaaaggcaacagtaagctatactaatttttaatttattgttttgcaaatttaatctatttttttctcaaaaactgttgtaagaaaaaaagatttcaaaattataagtcctgatttaatgcttgaataggtattgaagcatatctgaaagtataattaattaacctcaaatgaatactgtaaacattaagtagttggcaactgaaagtagacgtatgcagaaagggacaccagggatggtaccacagggtcctgggtatatttttgtttttttaagggaagatttacttttttctagaaaagaaattcttttcaaataaatttatttttcaaaaaatactttttttcaaaagtattttttccattttaaaattaagttataatttatatacaaaaaagtgatctttgtagtgtatgtttctgcaagttatgacacatgcacagtctagcaaccagtatcagaaataagatagagaatagtttcatcacctcaaaactttccctgtgtcccctttgtagtcttcctttcccctacttcagcccttggcaatccctgctctgtttttgttgacagagacagttctcctcacttgtttgtgaagactgtaaggttctgactgccctttttcctgggacatttctcagggttatatatgcagctgataaacttgagacatgagataacatctgttcccagacaaaaagcaagcttatttactgcttgctataaaattggtggattccctgagttcagtgcttctcatttgctgatgcaaactcactacaagcatagcatccatctgagcatccccaaaggacttgggatgaagggaactgatgcaaatgtgctgatgttcttctgttttgtcataagtaatgaagtgttttttctttgactgaggagtcttgtgtcttctgcctgcatccatgaattagttaagaggcttttgtgttagcttttattaaatagggtaaaatcaaatcccagtctccataattttctgtttgtatagttttgccttttccggtgacttgtattgagggttcctgcttctggccaacaacctatgagtgattttttaggtctgatcataaggcatttacagaggttttcctggcaggcttcatagggggagggctggtctccagagcagacttggtgcaaagcttttatagtctctgaggggaattgcagtcaaggacccagccatcctcttatacatatctgcgttcctagcctaggtgccttcattcagaggcctctttatgtggggcttttggggaggctttccttaagtgtctctgtcaagactttattggggaaaagaggggaagacacttaccaactctttctctactatgacttgtacttttctgtttctaacccttccctctctagccttcactcgactcctgggtctgtaaaactgccagaatcttttgttgggggttccctttggcaatgatgcaaccctcacatttgtgctggtctacctgccctgtgaccaatgtgccatgccacaggggaaaatggaatggggggtagctggcactttctccaatttagcctcttatactgtcacagtgattacagacctattctttattttattttattttatttatttatttttttggcttgttgccattggctgtgccaaaacgtggcagcccagctttctccagctctcctgaggtactgatacacacaaatggaatcatgttgtgcatagcctttgaatctgactttcttcagttgacgtaagttcatcttagattcatccatttgctttgtcaatagtttttaaattttaatggctgagtagttttctatcatcgtgatgtactgcaccttgtgtctctatccactctagagggatatttgaattgtttctggtgattatgaataaagctgctaaaaatatttatacgtttttgtgttaacataaattttcattttactagatgtattgccaaactcctttccaaagtggctgtgccatttcacattcccactagtaatatatgagaggtctagtggtttcacatcctttcagcacttgatattgtcagcttttattactacatcaattgtaagggggagaggagcatctcattgtttgtttctacttccctaattatgtgaagcacatttttatatgcttatttgctatctgtatatgttctttgaagaagtatctcttcaaactctttgccttttttttaaaaaaaattgtgtttatttttgttacagagttttgagaattctttatctgttctgcagacaagacttatcagatgtgtgatttgcaaatattttctcctagtgagtggcttgtgttttcattttcctaacaatgtctttcagtgagcagaagttcttacaaatttatgtacttttaaaatggattatgcttttgtgtcatataagaactctttgcctaatccagggtgagaaagatttactcctatattttctactagaaatttcatagttttactttttacatgtagatctgtgatccattttgagttaagttttgtgtatattgggtgaggtctgtaacagagtttttgattattgttttttgctattgttttttgctttggcatatggatatccaattgatccattactcttccctgaagtctatttaaatctctttaattgccattgtacttttttgaaaatcaattatgtggttgtatatctatgttccatattctgtttcattgatctatatgtctcttctttctccaatatcatacttctctgattactgtagcttaatgtgtttgttttttttgctgtctaatcatggaagttgaatttattgcattttacaggtcaatattttttgtagttgtagacgtctgtaattttgcactgttaattttaatgtaatggacatattagaaattaggttttcwatatgcaggggaaatgctgttaatttacaattgaagagagttatgaaataataataaatagaaaaagtaaatagagaaaggaaagtacagtcatcccttagtgcccataagggattggttctaggaccctctgtggataccaaatccatggatactcaagtcccttaaatggcataatatttgcacataacctatgcatatcctcccatatactttaaataatccccagattgcttataatacctaatacactataaatgctaagtaaatacttgttatactgtgttatttagggaataatgacaagaaaaaagtctgtacctgttcagtacagactcaacaactatccatttcccccacttccaagtatttttgatctgctgttggttggttggtctgcagatgcagatcccatggatatggtgggcctatatatatgtcttatttattgtcactaccttttgcttccaagtattttttatttttaatgagagttattttgttgtggtgggtggtttaacatacataagttttcccagcagcagaaccctgaagcaaggattttagaacaaagtctactttggagacgtatgtaacaggcaagaattgatgcaaggaaagcaaggcagctaatgaagacttactaactaaactaacacaataggttgctggagctttatcttgtgggataattctgggaaagtcagtgtcaaatttagtttcgggactaactcacctgaagtgtgagagagtgagtatatttcctgttactggttgtggactgccatacagaagacattgcacctgcctggtgctgtggtgggcagagtagcattcagccattcagaggaaagccctgagggatacagaggaagatactggctattggaagtaatttggaatggtgggaaagggttaggtccaaaggatactgtacagacactgacattatctgactcatgccttgtgaattttaagtgcctttcctgggttatcaaagtgaatagctttaatcaaatcatctctataaagacatttctaagtaaattttctatacttacactcctctactttttattactacagctggcttcattagctttttgtatattaatctgtgttgtcctactattagctagaagagcttactaactgtgagcttgaagatattgtatattccctcttcggatgatttttttttttttttttttgagtcagagtcttgctcttgtagcccaggctggagtgcagtgatgcaatctcggctcaccgcagcctccgcctcccgggttcaagtgattgtcatgcctcagcctcccgagtaactgggattacaggcacctgccaccacgctgggctacaaatgtatttaagaatcttaaatgagctgtgattgcaccactacactccagtctgggtgacagagcgagaccctggcttcaagcagtcctcctgcctcagcttcctaaagtgctgggattacaggcatgagccactacccctggcctaaattccttttctagcctctatacagaatttctaggataacaacaacaacaacaacaacaaaaacttaaatgataaaaatgaatatataaaatagcaagtaagccatgtaaaatattttcaatattcttagccattagagaagtgcaaattaaaactataagatactgctgcatacatatgyggatagcgaaagtaaaaactggtgagaatacagartgaatggatttctcatctgttgctgataggaaaatgacacagccactctggaaaacagtttggcatttttaataaaattaaagataaatattccatatgactcagcaatcatattcctgagtatttaacatagaaaaatggaaatttatgtatatgtaaaaacttgctacacaaatatttacatcagcttaatttgtaattgcctcaaactggaaagaatccagataactttcaacaggtgaatagataaacaaactgtgatatatctatcgaatggaataccaagctttgtaaaagaataaattactggtacagtcaacagtttccgtagatcttaagttcatcacacgaagtaaaaaaaaagctaaactcaaagtgttacatactgtatgattccaattatatagtattacttaaatgaaaaaaaattagtgttggaaaattaacctgtcattccaggagttagagataatgtgggagaaggggataggtatgactataagggagttgcaggagagggcttctttgtggtgatggaatagttctgtgtcttaattgtgctggtgagtacatgaatctttacagctgataagattttatagaatagtacacacacactaagaacaatgcatgtaatgtctactttggggagctttttttaaaaaartttcttttaagagacagtgtcttgttccatttcccaggctggagtgcagtggcacaatcatagctcactgtagcctcaaacacctgggctcaagggattctcctgcttccagcctcccaggtagctaggactataggtgcatgccaccatggctsgctaatttttttatttttattttttgtagagatgggggtctcaccaygttgcccaggctggtctcagtctcctggcttcaagcagtccttctgccttggccttctaaagtgctgggattacaggggtgagccactgccctggcctaaattccttttttagcctcttcacagaatttctaggataaccaatataagtaaagtagatgttatttttaaaatgatccactttatacactaaattaaaagacagtcttgatttcttcaaaattctttgctgtgaagtgaaacgtttggtaatcatatatcttgttgacataaacatacagattcctctgcatgtaacattcttttccttcactttaccaatttgtgcccatttcacgtatctcagcctatatccctttttcatgatcatcttacctctgacataactctttcacccaccaaatctgtgtttggtgtcatttctatgatggtcccatacaaagctggactcattttacagatgcaaaaagtgatgaaataatgaacaagttaatggcccaactgaaactgtggtgttggacataaactttagaataaatcctaaatcttaagtgtgcaaataaattattcaaaacatgagattacctaacctattctagtgatatttaacagagatatgtttgtaactggtggaagaagaatcactccctaggtacaagatcaattactgttcattttattcacctgaagataaatcactttcacagattttgcagactacttcttttcctgaaaaaatgatttattaaagtggaggtttctttactatatcaacactggcttactcttttctttataatacttctatactgaaagaagccagaggccaaaagtagtcttgtttgtgctgctctttatttcattgttatttttaaaccagatgatgaaattcccttccattttgaagggccatttttcatgtacataggagggaatttaaactgtttgagttaatattaacatattctattactataaattggttttagtttgattttaaaatagcatattaatttacatttaattttagtattcaactctgatcagaaaaatagtattttggatgtaggggtaaggaaaaggtgtgaaattccagttaaaaatctaaagtactgtgtttattgtttcattgtgtgtctgcatttagtattgtttgtatgagaaaaagtcagttgtttccttatattcccatataatttttgagtagtatgacaatcttcatttatatacctgatgacttttaatttttaaaatgttgtctaaaccaggtttcaggtgatatatcttgcttcctaatttgacaactctgaatattactattgaaacttgtaagcaagtagaaattaaaatgaagccatacatagcatttgctttgattaaaaagaatagaaacctagactgttttggaaaattcagtgtatatttcagtgtatatatattatgtgtttatatattgacagatctgggcatcagaatagagtcaagaaataacataaatagaaattcagtaagaacacatatgaaactggaaaccagtggaggaaaactgaggaattgctgtttgtgagagacttatttttcactcagtatacttttttttactgttttaattgtctatatagcatgctgcatattaccaattttaaatacttaattttgaaagattaaaatggctggcaaatttattgcccatttgcaaagtacatttatatcaggcatagtacaatatgtagaatgttattggaacattggaacattgtgtctgaaatacttttttaaaaacctcataaaatatgaaaatacttcttaatgatttcaatattaactctattcattagacatctatcattatcctttatgtcagaaacttagagtgaaatcttattagcttgattgaagaacacttgttctcatttcattgtgctatagttaacattcaaagttaaagttatttttcttctccttgatagtatactataataagtatattcaaagtgatgctctagatttgtttccttcacatttagacttgcatttttacaatgtttatactaaggtttcttacacttgccatagtatatctgtgcggtggcttactcctgttaatcccagcaattagggaggcccaggcaggtggattatgaggtcaggagtttgagaccagcctggccaacatggtgaaaccctgtctctactaaaaatacaaaaaaaaaaaattagctgggtgtgttggcgggtgcctgtaatcctagctactcgggaggctgaggcaggagaatcacttgaacctgggaaggtggaggttgcagtgagccgagatcctgccactgcactgcagcctggacaacaagagcgagactccgtctcaaaaaaaaaaaaaaaaaaggatttttgcaatcattaacttacttcttgctgtctgtttttattgtctttggctgtccttcttaacttcttcaaagatttctagtatatttacactccttaatcctaaatccagtgtatgttggctctcatggtagttttccatttcatgtacttgcttgtataatataaatccctgttcttggtgttttgtgtatttatttatttggctgccattgtattgaaaattgtcttgacaattcatttatgaacatcattagtacagcaatatgtaattcaaaaccagcatgctcaaatttgtactattctggttagttattgctatgtgtgtattttcaaatttttaaagacttagagaatagtaaaacatatacttagcacaaatgatatcacttcttggtacctttctgtgagtccttcttcccataaggaaattaaattgttctttgttttcatgctaagtagcatgaaaaaaaagctttattgagataaatcaaatttagagcatttttatcacctcaaaaagagcccatatacattagctctcacccactcaattatccctccttgactattttgggtccattgcaattccaagtgaattttagagtcagtttgtcaatttacacaatgagtatagcttggattctgatagggattgygttgaatctctacatccrtaatgggtaatattgccaatcttaataaaattttccatgaatgtgggatgtttttccatttatttggatcatctttaatttgttgcaacaatgttttgtagttttcagagtataaattttacactgtaaagaaaacttattcccaaatattattttctttttgatgctattgtaagtggaattcttttcttaattttatgttcagattattcattgcagatggcttagagatacaattgtgtgtggtttttgttgttttgtttttgagacaggctcatgctctgttgcccaggctgaagtgcagtggcacaaacatggctcactgcagccacaatctcctaggcccacctgattctcctccctcagcctcccaagtagctgagaccactagacatgcaccaccatgcctggctaatttttaattttttttgtagagacagagtcttgccatgttgcccaggctggtctcgaactcttgggctcaagcaatcctctggccttagcctcccaaagttttgggattataggcatgagccgctgtgcctagctcagtttgtgtgtgtgtgtgtgtgtgtgtgtgtgtgtgtgtgttttaatattgatcttgtatcctacagcctttctgaacttacttagctctaatattttttagtgggttctttatgattttctataaacaaaaccatgtcatctgtgamtatagttgtgtttccttctttctttctaatttggaagcctttaactattttcccccttccttaattgctgtgactagtagttgtaatgtaacagtgaacagaagtggcaagaagagatgtccctagtcttgtttctcatatagggggaaaatatctaatcattcaccaytaagtttgatgtttctctgcagttttcttagatgccctttatcagattgaggaagttactttctatttctgtttttttttagcgtttttatcttgaaacagtacagttgacccttgcacaacatggcgattgtgggtgctgacccactgcatagtctaaaatccatgtataacttttgattctcccaaaacttgtcaattaatagcctactgttaaccagaagccttaccagtaacataaagtcaattaccacatattttatatatgtatcatataaagaatatattattaagaaaatcatgagagaaaatgtatgtactatttattaagtggaaatgtttcgtgagaaaagtcatcattgtcttcatgttgggttggctgaggaggcagaggaggaactggttttgctgtcttaagggtggcagaggtggaagaaaatactggtgtaagtggatttgtgaagttcaaaccagtgttgttcyggagtcaattgtagtggattttgccaaatgctttttgtttgtttgttttttgagacggagtttcgctcttgttgcccaggttagcgtgcaatggcatgatcttggctcactgcaacttctgcctcccaggttcaagcaattctcctgcctcagcctcctgagtagctgggatttcaggtgcccagcaccacgcctaacttatttttgtatttttagtagagatggggtttcaccatgttggccaggctggtctctaattcctgacctcttgtgatccacccgccttggcctcccaaaatgcgagattacaggcgtgagcaaccatgcctggctgccagatgctttttctatgtgtgttgagatgatcatgtaattttgttttctattctattgatatgatgcattgaattaattgatttttggatcttaaaccaaccttgcattcctgagacaaactccacttggttatgttatatataatttttaaatgttgctggatttgttttgctagtattttgttgaggatttttgcatcattctcatatgagtatcagtctgtagttttattttcttgtgactttgtctgattttagagtatcatagtaatactggcctcataacatgaattgggagatgtcttccctcttctaatttttagaagagtttgtggagaattggtattaatttttttaaaagaagcagcaattgcttatttttctaatcaggtgtctatgctgctgaatcttaaggcctcaacaaatgttgcaccttattatttcattgaacaataagaccttctattctgattattcccggtaaataggaataatcactggtttctccagtggtttccacttgccaaaaactcatgacagatgacttaacaaggtggcacctgctttcaggggattgtatcagatgcatactcatttccagtgcagcagctgttggcaatctaggacttctctatcatggttggccaagtagtcctgctttggctgccagagcttcattctgctgaatattacattcctgaagtctcatggatattctttttgtcatttaaaaatatttccataaagtgttctgaacaggctggtctcttcaggttttacatctgttgtgcagtcttaacacagtccaaaaagcagatttctgcaagtttattgtcagtcccaagaaattccttcaactgtttaatctgatcagattctggtatttgtgcacccatattcttttggtacatttattagtcatcttctctgatgcatgagtttcctttctgttcttgtaaagtagtgttccaacctttgtttgaatgtcttcagtgagacgtgatttcttacctaagcacaggctctcacatctgacgtcagtacaaggctggaggcctacactgccagtcgagtctgaggatggaggatcaggatcagggcaagcattgcagccgctttatctaattcttctttaaacgttcattagaattcaatagtgaagccattcagggctaggcttttctttgtgggtagtttcttgattactaatttaatctcttgttatataggtctgttcaagttacctattttttcttgaaatttttttagtcatttgtgcctttctaagtatttgtccatttcatctaataaataatctaatttgtttaatggctattctttctgacattaatatagccactttgtctttcttgtgggtgttgtttgcatcacgtatcttttttttttttcccagacagggtcttgctttgttgcccaggctggagtgcactggcaagcagaggttgccactcactggaacctctgattcccaggtttaagtgatcctcccacctcagtctcctgagtagctgggattacaggtgcataccatcatgcttggctaatttttaaattttttgcagagacgaggtctcactgtattgtccaggctggtcttgaactcctggctcaaagtgaaacccctgccttggcatctcaaagtgctgggtttacagatgtgagccaccacatccagcctgcatgatatatttttccacccgtactttcaatctgttagtaactttctatctacagtgtgtctcctgttgacccacataactgtcttttatgtatagttattagaactattgataagaaaatgtgaaagtatagtcccattatcttatttgagtggaatcagtagactatttcataaaatgtattctagtttatagtttagaatagtttgtttttcatggcttttgagaaaaacatttgaatgagcttacattttgttgcatttaaaatttctgggtttttgttgttgttgttgttgttgttttgagatgcagtctctctctgttgcccaggctgaagtgcagtggtgtgatcttggctcactgcaacctctacctcccaggttcaaatgattcttgtgcctcagccccctgagtaactgggactgcaggtacatgccacgacctggctaattttgtatttttagtagagatggggtttcgccctgttgggcaagctggtctcaaactcctgacctcaggtgatctacctgactcagcctcccaaagtgctggaagtacaagtatgagccactgcgcctggccaaaatttctgttttttaatgaatccaaagttcatgtttttttttcttcccaatgccatggtacatatcatcaccaaaaaaagtagtgattttgcttcagtgaacactgaattttaatattattgatagaatggctatatcgatcagggttttacacttatagtacagtatacttgcaatgtaggtaggcctcatcctttgtaattaattaattagcttgtaattatgtaagctaatctaaattttcatattttcagttttaacatttgggcttttgagttacatttcttatattttgatttttttctataaattttaaaaccagaaagacaacactagaatcaattaaatgcaagattgaaagggtttcataatgtaaaagagcaatcttgtttttgaaatgttcagtttacagtaaggatcgagtagctctgcagctaccgatttgggaaatacctgaggttttttttccccttgcacttacaggctgttttagccctgaaggtggctagtaaggacacagactttagagtgccacgacagttccataacaggaatgaattgaagaagagaagcagtggagtcaggagcctcacaaattaaagacaactggtgaagagaaaaaccatttattttcgatacttaagatggctgagcctgtaattccagcagtgctttgggaggctgaggcaggtggatcacgaggtcaggagattgagaccatcctggctaacacggtgaaaccctgtctctactaaaaatacaaaaaattagccgggcatggtgggcacctgtagtcccagctactcaggaggctgaggcaggagaatggtgtgaacccgggaggtggagcttgcaatgagcagagatcgcaccactgcactccagcctgggcgacagagcgacactctgtctcaaaaaaaaaaaaaaaaaaaaaaaaaaaaaaaaaaaagatggccgaataggaagagctccagtctgcagctcccagcaagaccaacacagaaggygggtgatttctgcatttccaactaaggtacccagttcatctcattgggactaattaggcagtggttgcagcccacagagggtgagcagaagcagggtggggtatcacctcacctgggaggtgcaaggagctgggggacctccttcccccagccaagggaagccatgagggactgtgctatctggcccagataccatgattttcctatggtttttgcaatcygcagatcaggagattccgtcgtgtgcctacaccaccagggccttgggtttcaaacacaaaactgggcggctgtttaggcagacacttagctagttgcaggagttttttttcgtaccccagtggcacccggaaccccagcgagacagaactgttaactcccctggaaagggggctgaagccagggagccacgtggtcttgcttagagggtcccactcccacggagcccagtaagctaagaaccactggcttaacattctcactgccagcacaacagtctgaaattgaccttggaccattgggcttggtagggggaggggcatctgcaattactgaggcttgagtaggtggtttttccctgacagtactaaggtggcggggaggtttgaaccaggtggaattcaccacagtgcagcaaagcagctgtggccagactycctgtctagattcctcctcactggacagggtatttgtgaaagaaaggtagcagacctagtcaggggcttatggataaaactcccatctccctgggacagagcacctgagggaaggggcggctgtgggcgcagcttcagaggacataaactttcctgcctggtggctctgaagagaacagctgatactgacaaggaggattctcccagaacagtgcttgagctctgcttagggacagactgcctcctcaagtgagttgaggagactccgtgccttctcactgggagagaactgccaacaggggccaacagacacctcaaacaggagagctctggctggcatcaggctggtgcccctctgggacgaagcttctagaggaaggaccaggcaacaatctttgctgttctgcagcctccattggtgatactcaggcaaacagggtctggagtggacttaaagcaaactgcagcagacctgcagaagaggtgcctgactgttaggagaaaaactagcaaacagaaagcaacaaactcaacatcaacaaaaaggacccccacacaaaaaccccatccaaaggtcatcagcctcaaagatcaaaggtagataaatccatgatgatgaggaaaaaccagcgcaaaaacggtgaaaattccaaaaaccagaatgcctctttgcctccaaataattgcagctcctctccagcaagggcacaaaactggacggagcaaccccaagacacctaatagtcagattctcctctgagctgaaggaccatgttctaacccagtgcaaggaagctaagaaccttgataaaaggttataggaactgctaactagaataaccagtttagagaggaacataaatgacctgatggggctgaaaaacacagcacgagcacttcatgaagcatacacaagtatcaatagccaaatcgatcaagcagaagaaaggctatcacagattgaatatcaacttattgaaataaagtgtgaagacaagattagagaaaaaaaaaataaaatggaatgaacaaaacctccaagacatatgagactatgtgaaaagaccaaacctatgattgattggtgtacctgaaagtgacagggagaatggaaccaagttggaaaacacacttcaggatattatccaggagaacttccccaacctagcaagacaggccaacactcaaatttgggaaatatggagaacactgcaaagatactccttgagaagagcaaccccaagacacctaatcatcagattctccaaggttgaaatgaaggaaaaaatgttaagggcagccatagagaaaggtcaggttacctacaaaaggaagcccatcagaccaatagcagatctctctgcagaaaccctacaagccagaagagagtgggggccattattcaacattcttaaagaaaagaattttcaacccagaatttcatatccagccaaactaagcttcataagctaaggagaaataaaatccttttcagagaaggaaatgctgagggattttgtcaccaccaggcctgccttacaagagctcctgaaggaagcactaaatgtggaaaggaaaaagtggtactagccactgcacaaacacaccaaaatataaagaccaatgacactatgaagaaactgcttcaattagtgtgtaaaataacctgctaacatcatgatgacaggatcaaattcatgtataataatattaaccttagctgtacatggcctaaatgccccaattaaaagacacggactggcaaattggatgaagagtcaagatccatcggtgtgctgtattcaggagacccatctcacttgcaaagacacacataggctcaaaataaagggatggaggaatgtttaccaagcaaatggaaagcaaaaaaaaaagcaggggttgcacttctagtctctgataaaasaggctttaaactaacaaagatcaaaaaagacaaagaagggcattacataatggtaaagggatcaatgcaacaagaagagctatcgtaaatatatatgcacccactacaggagcacccagattcataaaacaagttctcagagacctacaaagatacttagacttccacacaataatagtgggagacttyaacaccccactgtcaatatgagatcaatgagacagaaaattaacaaggttattcaggacttgaactaagctctggaccaagcggacctaatagacatggggttgctacagaactgtctaccccaaatcaacagaatatacattcttctcagcagcacatggcacttattctcaaatcaaccacataattcaaagtaaaacactcctcagcaaatgcaaaagaatggaaatcataacaaacagtctctcagaccacagtgcaatcaaattagaactgaggattaagaaactcactcaaaaccacccaactacatggaaattcaacaacctgctcctgaatgaatattgggtaaataatgaaattaaggcagaaataaagaagttatttgaaaccaatgagaacaaagagaaaacgtaccaaaatctaggacacaccaaaagcagtgttaagagggatatttatagcactaagtgcccacttcagacagctggaaagatctgaaatcaacaccccaacatcacaattaaaagaactagagaagcaacagcaaacaaattcaaaagctagcagaagacaagaaataactaagatcacagcagaactgaaggaggtacagacatgaaaaacccttgaaaaaaatcagtgaatccaggaggtggttttttgaaaagattaaccaaatagatagactactagctagactattaaagaagaaaagagagaagaatcaaatggacacaataaaaaattataaagtggatatcaccactattctcagagaaatacaaactaccaacagagaatactataaacacctctatgcaaataaaccagaaaatctagaagaaatggatacattcctggatacattcctggacacatacaccctcccaagactaatccagggagaagttgaatccctgaatagaccaataacaagttctgaaattgaggcagtaattaatagtctaccaaccaaaaaaagcccaggaccatacagattcacatccgaattctaccagaggttcaaagaggagctggtaccattccttctgaaactattccaaacaattgaaaaagagggagtcctccctaactcattttatgaagccagcatcatcctgattccaaaacttgacagagacacaacaaaaaaagaaaatttcaggccaatatccctgatgaacatccatgtgaaaatcctcaataaaatgctggcaaacgaatccagcgacatgtcaaaaagcttatccaccacaatcaagtcggcttgacatgtaaggctggttcaacatacgcaaatcaataaacgtaatctatcacataaacagaaccaatgacaaaaaccatatgattatctcaatagatgcagagaagtcctttgataaaattaaacatccttcatgctaaaaactctcaaaaaactaggtattgatggaacatatctcaaaatataagggctatttatgacaaatccatagccaatatcatactgaacaggcaaaagctggaagcattccctttgaaaaccagcacagacaaggatgccctctctcaccactcctattcaacatagttttggaagttctgactagagcaatctggcaagagaaagaaataaagcgtatttaaataggaatagaggaagtcagattgtctctgtttgcagatgacatgattgtatatttagaaaaccccatcgtctcagcccaaaacctccttaagctgataagcagcttcagcagtctcaggatacaaaatcaatatgcagaaatcacaagcatttctatacatcaataatagacaagcagagagccaaatcatgagtgaactcccattcacaattgctacaagagaataaaatacctaggaatacaacttataagggatgtgaaggacctcttcaaggagaaccagaaaccactgcccaagaaaataagagaggatgcaaacaaatggaaaaaaaattcagtgttcatggataggaagaatcaatattgtgaaaatggccatattgcccaaaataatgtatagatccaatgctattcccatcaagcttccattgactttcttcgcagagttaaaaaaaaaaaagaaacaaaccttaaatttcatatggaaccaaaaaggagcctgtgtagctaagacaatcctaagcaaaaataacaaagctggaggcatcatgctacctgacttcaaactgtactacaaggcaacaataaccaaacagcatggtactggtaccaaaacagatatatagaccaatgaaacagaacagaggcctcagaaataataccacacatctacaaccatctgatctttgacaaatctgacaaaaacaagcaatggggaaaggattccctgtttaataaatggtgttgggaaaactggctagccatatgcagaaaattgaacctggatcactgccttacacattatacaaaaagtaaccaagatggattaaggacttaaatgtaaaacckaaaaccataaaaaccctagaagaaaacctaggcaataccattcaggacataggcatgggcaaagacttcatgactaaaacacccaatgcaattgcagcaaaagccaaaattgacaaatgggatctaattaaactaaagagcttctacacagmgaaagaaactatcatcagagtgaacaggcagcatacagaatgggagaaaatttttgcaatctatccatctgacaaaggtctaatatccagaatctacaggaacttaaacaaatttgcaagaaaataacaaccctatcaaaaattgggcaaaggatatgaatggacacttctcaaaagaagacgtgcaaccaacaaacatgaaaaattgctcatcatcattggtcattagagaaatgcaaatcaaaaccacaatgagataccatctcatgccagttagaatggcgatcattaaaaagtcaggaaacaacagttgctgttgaggttgtggagcaataggaatgcttttacactgttggtsggagtgtaaattagttcaaccgctgtagaagacagtgtagcaattcctcaaggatctagaaccagacataccatttgaccgagcaatcccattactgggtatgtacccaagggattataaatcattctcctataaagacacatgcacacatgtgtttattgtagcgctatttacaatagcaaaggcttagaaccaacctgatgcccgtcaatgatagatagagaaaatgttgcacagagacaccatggaatactatgcagccataaaaaaggatgagttcatgtcctttgcagggacatgatgaagctggaaaccatcatttttagcaaagtaacacagaaacagaaaaccaaacaccacatgttctcattaataagtgggagttgaacaatgagaacacatggacacagggaatggagcataacatacctgggccagctggtgggtaggggtcaaggggagggagaggattaggacaaatacctattgcatgcagagcttaaaacttagatgatgggttgataggtgcaccaaaccaccatggcacatgtataccaacgtaacaaacctgcacgttctgcacatatatcccagaacttaaagttaaaaaaaaaaaaaaaaagccaggcgcagtggctcacgcctgtaatcccagcactttgggaggctgaggcaggtggatcacaaggtcaggagatcgagaccatcctggctaaaatggtgaaaccctgtttctactaaaaatacaaaaaattagccaggcgtggtggcgggcatctgtagtcccagctacttgggaggctgaggcaggagaatggcatgaacacaggaggtggagcttgcagtgagctgagattgcgccactgcactccagctctggcgacagagcgagactctgtttcaaagaaaaaaaaacttcagtttacttgattttgcttatagagttctttgagaatttaaatcatcctttctgaattacagaaagtcatagattagaagtgtagctttaaaatgctctagatcactctgaattaagaaaaagggtttcctttgtccagaataagcatcaatttaaaacagcatttaaaaacaagtattcaacaaattggtatacgaattataacacaagcaactaaatcactgactttgattagtctctctactgattactactgttgaacagaagttgtgtgtaagaataggagaaggtgaactcattgtcttgagcatgtggaattagttcttgtctgaggccagatagcaatttttatcttattttcagtatagcagatcctatgctgccctgataagaatcacctgcacagcctcattgactctcacggaagtattccagtaactctttgaattttttcctagaaaaattggcayctgttacccctacacaattccttcataaacagtagaaatttcccccatgaaacctttcctttaaccttaacattcttcgataattatttatgaagtccttaaataattattamaacaagtattggttttgaatacgtaccagctttggaatactgcttaaggaaaccatgataaactccaactcctttatgattatttagaggaatatatctatttgttatagtcttaaggaaaaccttgtcaacatattagatgatagaaacagtcataaccagcgaccaccaggtttggtgggaactcatgatgtgaagggtctactccatgttctgccaaccaagtaactaagtcattttgggcaaatgattcagctgacttgatctgttacatgattcctaaggtctgttatagctccaatatttcatggcatcactccactttaatgtattatctatcttaaaaaagttaaacagaaagatcaattagcacttatattaaatttgagttgctgaatattttattttttctcacttccactcactgcttccactatttgggtaatgattgttggagctgtatgcatttataatgcattaagtacagtgtggtatatcagtaaaacttcattacaaatattcattccatacatttgtctgtactggggtcagtttttttccccttcttcttctttttaaagacagggtcttgctctgtctcctcctgtcttggtctcccaatgtgctagaactacgggcatgagacactgcacctgctcttttctagttttatttgtctatctgaagagtttattatttggctaagctcacatggcaaggtaggtatcatgaagtgttaaaacccagcttttctgctaatgttcttgtgagataaaccaactattagtaaagatacttgcttcctaatcaagattacttggaattgttaagagagtatgtatgtatgtataagttaactttttaaaaacttctctgctgcctggaggaataatgaaatgacccaaagggatagaagcaaaatatttcagatagtacataacgtatatacttagccttgtgcaatcaagaattaatgatataatgtgtatggagtaatatttaactttatttcgttataagcccttttgggatagtggttgttccacataacttttatcttctttaatgcttagtatctgctagaaatgtagtctgtgggatcataagagttggggaagatttacagatagcattttcagagactgaacagaaaagcatattgtcatttggaaaaattttaaaagtgtctaacttttattcaggaccatttgcttttattttcctgttgttatttatttctattatcttgtttacagttgaaatttggacaattggtctgtatcttttctaattttcattatatataaagacttaggtttcctctttccttatgtgtttgttggtaaacattaggtgctatttttaagttttcaattctcaggcatagtgctacttatccatgttatttatataagcaaatgagcatatttgccaatcaatccacggtaagaaacacaatttaagttcctaccaaggatacctctgtgtgtgtgtatgtgtgtgtatgtatctgaaatatttcactaaataattcatttttttttttttttttttttttttttgagacggagtctcgctctgtcgcccaggccggactgcggactgcagtggcgcaatctcggctcactgcaagctccccttcccgggttcacgccattctcctgcctcagcctcccgagtagctgggactacaggcgcccgccaccgcgcccggctaattttttgtatttttagtagagacggggtttcaccttgttagccaggatggtctcgatctcctgacctcatgatccacccgcctcggcctcccaaagtgctgggattacaggcgtgagccaccgcgcccggccaataattcatattgttaatacctcaaccatatcttgatattctgttagctttttaaatgatggttgtgaccaactacagttcacatttttcactagtggatcacactctgcagcattaaaatcaccgtgaaatagattaattagaataaatgaagtgttcttttttcattctgtttgtacagtagatattattggattattttataaaatacccattttataaattggatggtatgttataaatggatagtaggatttttcctttcttcattttgtaccaagagaataaaaaacactcctgttcagtacatctctagcaagcctatttcaacatccaatgtctcaaataattaatttttctatactttagtcacccttacacctaaacgttacagtgcttcagtataacttctatgtaaacattattaatcccatttacagatgggaaccagagtgttgggagacaggtcatggatttctcatgttcctgcacagtctaagtgttctaaggagaggcatttacagkgccaattgtataaggagaaatttcaggacagtaaaactactgacatgtccctccctggagacgtccaaggataataaaaataaaagaccttctcttccccttcccagaggagatttgcttatatttgagtgtaatgagcaatctttctgggcagagcagggtggcaaaccaatagaagatcagagttccttcatttgggggttactctcctgtgatgctctctactgtatgcactagtaacatccatcccttactgcattgcctcatggagattggagctcagggaactggtctaaatatattgttctaggtgctgcttttgctacgagtaataaattgtctttgtttctgatccwcagttcttgtgtccttatgtcattgtgtgtgtgtgcatatgtgtatgcaggagaacgaatgcggcagattgaagagcagttgaatatcagacctttgtagtgtggtggtggtgattatggtgttgagacagaattttgctgtgttacccagtctggtgtgcagtggcgcaaggctcatttcagccttcgaactttcaaactccatgggctcaggtgaccctcccagctggtactgaaggcacaccccaccatacccagtgattttttttttttttttttttttaagagacagggttttgtcatgttgccgaggctggtctcaaactcttgggctcaagcaatccacccacctcagcctcccaaagtgctggggttacgggcataagccaccatgcctagccctttgtgatttttttaacttaactctggctcacacaatttaactgtaggtctgtttgtaaacctgaagcgctttctatgctttcttccttacatagaccgataaaataagtagaaaatatggtgctaatgactagtatttggtataagtagataaatgttttgtatcacatttgcatgcttataatctgtgatcaatgagcagtctgaatatttttccctccatcctcataagttaaactaaaaaaaagttatagattgaggctgggatatctggtggcgaaattatatttatttgaacagagtttgtgtatatacatayatatttcagaatatattgaaaaataaaagtgtaatgaccttgataaaaatgaaatattcacttaaaaactccatttaataatgcccacaggaaagaaatgcttctagaattttttaactaatcatttttctcagtacttttgattgtcatgcaaactaaagaaatggacttaatgaacaatttagttacaataataaagtttcaaaaattctaaatttacctcataattgcaacagatgcaaaattatttcatatctttatactcgttatgaaattacctcatatccaaaaatatttatgtcaagtgacaggctttttgcagcatttttgatattattacccttgtaatatataattaactttgtaagttaaccttgtggaacttttaagggaaatgcattaacttagcattaatatagacttctaaaattyactgtgatgtagaacatttgatttaatgttgtctgtgtctaatacaaaataactgtggtccacttacttatttcaaattttattctcaaaggtacctactagattatgtgtgaagaagtttgtgaccaaagtaatataactgattctgttttgaaaatctagaataaagtttatgcaaaagcatatggattatttctttatgaatgcagttttatactaaaaactcctccatacccacgtaagtagatatattctcatagtgatgtagaaaactgacaaaacttttcatcctcagagctaggaattcttgtgtttggccacaagggaaagacaaaggtattagaattttaaataagctatcatcaacaaatactacatctctccagctccattcataaatatagcaacattttggaagtgcagatgaatcgaacatagttaagtgagaaaaatttttagtaacatacataatttgtaaatattgaatcgttttttaaatgatactctgagtcataattatttcaaattgtacataatgctagaagaaactaggataatagcagaataagttacagtgactaaaatcataggtttttttaagagattggggagtctctgtggtgcccagtctggagtgcattggtgcaatcatagctcactgtaaccttgactcctggcttcaagcaatcctcctgtctctgccttccttttgtagtttcaggtcttaacatttaagtctttcatccattttgagttgatttttatacatggtataagatgaggatctagtttgattcttctccatatggatatctttggtctatatatttatttatatgacagtaccatgctgttttggttactgtagcttggtaatataatttgaatttgtgtagtgtgatgccrcagctttctctttttgctcaggattattttagctatttggggtcttctgtggttccatatgaattttaggatttgttttttctatttctgtgaagaatgcctttggtattttcatagagattgcatttaatctgtagctcactttggttagtaaagatattttaacaaggccgagcatggtggctcatgcctgtaatctagctctttgggaggctgaagtgggargattgcttgaggccagggattcaagaccagcctaggcaacatggcgtgaccgtcyctacaaaaaaatatttttttaattagctaggcatggtagcatacacttgtagtcctgtctacttgggaggctgaagcaggaggatcctttgggcccaggtggtcaaggctgcagtgagctataatcatgccactgcactctagcctgagcaacagagagagatcttatctctgtgtaaaagaaaaagaagtgtaattaaaggaaaaaaacattttaacaacagtctttcaattccaaaacatgggatgtctttttttccttttctcttcagtttctttcatcagtgttttataattttccttgtatagatctttcatctgcttggttaaatttatttcctggttattttatttttttgtagctattgtaaatggtttgctttcttgatttctttttcaggttggttgctcttagtgtatagaaattctactgacttttgtatgtcgattttgtatctgacaacttaataaattcacttaccagttctaatataatatggtctaattaatatattagactagaagtataagatctctcctggagaatgttccatgtaccgatgagaagaatgtgtattctgtggcagttggatgaaatgttctgtaaaggtctgttaggtttatttggtctagagtatagtttagcttcactgtttgaagttaaacactgatgttcttacatttcttataagaacattttatgtttcttatgtataagaacactgatgtttttatatttctagtctaataatgtattattaaactaaaaatataagatttgtcctggagaatgttccatgtcctgatgaaaagaatgtgtattctgtagcagttggatgaaatgttctgtaaatgtcttaggtttatttggtctagagtatagttttttacttcagtgtttgttgattttctgttgggatgatctgtccattgccgaaagtaggaaattgaaatcccctactattattgtatttatctcttgctcttgctcttatgtattcacacttgctctctctcatgctctctctctctctctttccctttgtatctaataatatttgctttatatatttgggtacaccaatgttgggtgcatatatatttactattgttatatccttttgctgaattgacccctttatcattatattatgatctcctttgtccctttttacagtttttgacttaaagtctattttgcctaatgtaattataggtattcctgcccttttctggtttttatttgaatagaatatctttctgcatcccttcactttcrgcatctatgtgtctttataggtgaaatgagtttcttgtaggcagcatgtatctgggtcttgtttttaaaatccattcacccaccctgtgtctttatttgggttttatttgagatggagcctcactctgtcccccatgctggagtgcagtggtgtgatctcggctcactgcaacctccaactccctggttcaagcgattcttctgcctcagcctcccaagtagctgggactacaggcgtgcaccaccatgcctggctaatttttgtatttttagtagagacggtttcactatgttggccaggctggtctcaaactccggacctcatgatccacccgcctcggcctcccaaagtgttgggattacaggcgtgagccactgcgcccggcctatcctgtgtcttaattggagcatttagttcatttatattcagtattattgatagataaggttttactactcttattttgttacttgttttctagttgtttttaacttttcttctgcttcttttcttactgtctttctttgtggttaggtgattttctcttaagagtacattttaatttattgctttttatccatttttgctctgtggttaccaagaggcttataaataaacatcctgtagttatagcaagtatttaaaactgataatcaacttaactttgattggaaaaaaaacacacaaaagtgaacattaacttccttctcccccttcattttgaatttctgatrtcacagttcacatttttatattgcctatcttgtaacaaattgttgtagttattatttttaatagttttgtcttttagtcgtcttactacagatattagtgttttaaacactgcaaatacaatattaatataacactcattttagtgtttcttccagtttgaagaagtttttaaagcatttcttattggacaagtctgattatggtaaattccctcagcttttgtttgtctaagaaagtctttatttctccttcagttttgaaggataattgtgctgagcacagtaatcttggttgacagtttcttctccaccagcattccaaatatattcttccacattttcctggcttataaggtttctgctgataagtctgctaccaggcatattggatcttccttgcatgttatttacttctttcctttcagtgatttcagaagtttttctttgtgcctttgacctttgtgagtttgattataatgtgtcctagagtagtcttctttgtgtttaatctaattagtgatctttgaccttagtctacctgaatatttatatcttttttcaggtatggaaagttttctgttatcatttccttgtataagttttctacccctttgtctttctcagtccttctttgacttcagtaacctgaatatttgcccttttgatgttgtcccatagattttgtaagcttgcttgcttccttttctttttttttctcttctcaccatatttttaatcatttttctttgaactcactgattcttttatttggttaattctgcttctgttgctctctattgagattttcgcttcattaattttttttttttagttgcaggatttctggttttttaaaaaagttatttgagtctcttatatttctttcataattttctgaattgattcttcatgttttctttaagttctttgagctgtcttcaaacaggtattttgaatttttggagagatcacatatctcggtcactttcaggttagtctgtggtaccttattttgttcttttggtgtgatgtatttccctaaatgttctcaatgctttagaagtgtgatgatgtctgagcattgagggatttgtaatttattttagtcttcccagcctggctttgtttgtgcctgtccttcttcaagaggccttccagggattctaaagctgacttactattgcattctctgagcctctgaccaattacagccatctcagcactagagtatgctttaagcccaggttttctgagtcctgcaagggcaccaaggttgacacagctttctggcccagatggacctcgggaagacccaagggaggtasttgggctgcctgggaatgctgtccagacacctgaagccagaagactctcctagtggtcctgataggtatgcctcccaacaaatctctgcacagatgggataggtccctgactacaaagagagtggctggagttgagactgtgcgtctttggaatctactgtggaaaggaggctgattggctcacctcattggctcagattrgcatgcatcacccaacaggtcccagtatctgggcagtttcttgactgcagcaagagggcttggagccaagactgggccccttcagtatctactatggatatgcctgtcacatggatccagttgggcgtgtgtctcccagcaagtccctccatagatggaatgattccctgactacagcaggagaggctggaggtgtgactgtgcccccttgggatttgctgtgggacagaggattgagagcctggtcttggctcagaggggtgtgcatcgccctgaatgttcctgcacatacaggatatttccccaactgcagtgagacgagccaaagctgaaactgcaccaccctgggatctgctgttggatggaggttgatgtgcttgtcatgttggctcagatgggcgtatgtctcccagcaggtctctgcatagacaggagggttccctaacagcaggaggagggtctggatctgagactggaccctctcaggatctgctgtgggatggtggctggagaacctggtctgagcatgcatctcaccagtagaccctgtagacaagatagtttcctggttgcagcaggaaaggctggagctgagactgggctccctcaggatctcctgtgttgcagaatctggagagcctgtcttgtttgcccggacagatacccctcttccagcagatctctgcacagaattattttcagaccacagcaagaagggtcagagctgagaatggaccacctgaggatctgctgtgggatggaggttggcgtgcctgtctcattagctcaaatgggcacccatctcccagcaggttcctgtttctgcacagataggatgcatcccctactgcagcaggaggagctgaggctgagtctggggcctcccttgggatctgtggcatggagtctggagccccttgtctcattgactcagagacacacccacaggagataacttttcaacttctagtaagcaatcatttgaatcattaagtatttttggtgtattatacataaccacacttaattacaattcatacctgtaccttcttattgctacccatatttgaggaataggtctttcccttctttccttctatatttaaaaccttttatctatattttcttctcatgccttgagtctaatctcaaaccttgttctcttcttgatctttgctaactttgttgtaaatgtgctcctatcccactattgaaacaaacaggcaaactctccaacattcgccttatctatcctcatttcagctgaatttcttgacagtgtagttcacacttctttatctctgatgcattcagctgctctcaccacgtttttaaaatccagtgggcacgagtcacccatgaccttttagttgccaaatccagtgaacacttttcagttcttgtctgacttatctctggcatttatcagtgttgaccttaccataactctgaaacttttcctgtcttgcttagcttatgtgataccttttccctcaggtttttcttcttttctggctcctcttcttccttttccacagctggcaattcctactcttacagctcttctaatgttttcctttcctttcctttatctttaggcaaaggctatggtgtgtgtgtgtgtgtgtgtgtgtgtgtgtgtgtgtgtgtgtgtgtgtgtgttctagcaacctctttcaaatgaattccaatggattctaacactaagctggagtgtcaggtactacttgtgatttcttctcttttatcttcctgggagttttacagaatctacagtagtgatcactacttcccacagtcttttcctgacactttctttctccctttctccagtttattcacttctcttttagattacaggacaattttcctctgttctccgtacatccagcctggctgtcctccagtctgtgttccatagagctactgaaaaccctactaagaaacaaattttgtaataccatttccttacaatgcttcagtaattaatgttaacatttaggttaaaaacagccttatcattaagaaaacttttaaactgatttaaaatttatataatgtgaaatcattttaaagtatacaattcagtggcatttactgcattcacaatgctgcacaaccacaaccataatttctaaataattctaagttttcatcaccccaaagggaaactccatacccatcaagcagtcatttgtcattctcccctccagctagccccgttcatccattaatcagctttctgtgtccgtgggtttacctattctggaggtttcatatacatgaaatcatcactatatgtgaccttttctgtctggtcttttacttagaataatgtcgtggaggtgcatcccattttgttgcatatattagcacttcatttttttgattgaataatgttccattgtatagctataccacatttgttattcattcatcaattgatggacattcgagttgtttctgccttttgaatgcctgattttgattcatttttgtagagtccttaggttttcctaagtataagatcatttcgtctgggaacaaggctaatttaatttcctctttttcaatttggatgccctttatttctttgtcttacctaaatgctttggctgattcattttgggcaaatacctgggaagagtgtttaattgctgggtcatatggtaattctatatttaactttttaaggaaatgccaaactgtctactacaacatctacaataagataaattttcaccagcaacttatgagggttccagtttgtgtacatcctcactaactcttgttattttattttccagttttaaatactattaatatctaactcagtgggtataaagttatatctcattgtatttatgatttgccttttcctaatgactaatgatattgtaaatgttttcatgtgcctgttgcccatgcatacatctttttgggagaaatgtatattcaacttactttcccgttttttatttgagttttatttttaaccaagaaataccttttaagtgatcagacctggaaccttgccaggtttaatgattatcaaagcagagccatattttgacttttgatgttatctattattatagtcttgttattcataattacttgaatattatcagcatctctagatcctttgtagttaaaacatagtaaagtattttaagtctttatactaaaatagtacgtcttgaaagttttaatatagaacactctgcttagcatttctttataacctaaaatgcaattaataaaagggtgtcatttcctctgccaattaagtagccttcattggttgatattgaacaaattgctgatacttatttctgtgatgtttactttttaaaaaaaatattttttgctttctttttaacacttccaaacaattgctaggttaatttgtcagttgcaaatctgaaataaaattgtttttagcagtctttcaaataaaattttcgttgagactaaagagatcctggattacaatcaacatttgtagatatgtcatacatagagaaccaaaaaaaaattataaatctgatataaatatcagtgtgccatacaggcatggtggctcatgcctgtaatctcagcattttgggaggctgaggcaggtggatcacttgagtctaggagttcgagattagcctgggcaacatggtgaaaccccatctctataaaaaatacaaaaattagccaagcatggtggtacacacctgtagtcccagctgtttgggaggctgaggtgggcggattgtttgagcttggtaggcagaggttacagtgagccaagattgtgcctctgcactccagcctaggtaacagagcgagaccctgtctcagaaagcaaaacaaaaacgcccaaatatcaatgtgctatgaaaccacacattgtatgtgttcattcccacaaattggagcattttaagaagcgctctaaattagtttatgtcttgcttttcttcttatgttctgtagattctttagtactccataagaaaaatttgctatagaaagcataaaaactgcaaatgcattatatcctccatgaaaccagctttaatttagttgctaaaccctgatcattgttgcactatacactcagaaaatgtatagcagtgactattttgtaaatatgaagagttcatattcagcacattcagcaatggtttatatctaaaatgatttttgaagaatgctttaaaaaacttctttgcctagagtctttaaagctggcactttaaaactatgtttcatggattgtcagttggaatggacttcaggaggtccataagtccatgaaattacagttttttaacatgaatttttctgaggatacatratttttatcatactctcaaaagaatctaaaactcaaaaatggttaagagacacttaaataaaatgttgataaaggccatggtcattgattctcattcttcagaagctttgcatgtgtgagtttacctactcactaaaatgtacttgtaaatccaaaaccagtactcggtgcttttgcagtcatttgtaaacatatttggagaagcaaaaattttgagttaccttatgtgttcattcctctctgaggtcaaagaaggtgatggtttgccttgtttcagctgtcatactgtaaacaagtgtccttttcaatgcgtatttagtgccatattaatcacattttttgttgttgatttttctgtttaaaatggttcccaagcatagtgcagatatgctgtctagtgtttctaagcataagaaggctgtgatacacctgagagaataaaaatctgtaatagacaaacttggttcaggcatgagttacactgctgttgactgtgagtttattgttaataaatcaaatatgaagtatcaatatctgtataaatagttaaatataattatatatagatgtaaatataaattgttaaaatacggaatctttaaacagaaacatacattttagaaattatgtattggcattggttgaccaagatgatgtttggagaggttttcaggaaactaaccctgtctttttcccaggaacaataattctgcaggaggcagaacctgttgtctaggttggagtacagtggcatgaacatggctcactgcagttttgacctcctgtgcttcttctgccccagcttcccaagtagttcaggctacaggcacatgtcaccatgcctggtaatttttgtattttttgtagagacagggtttttcttgcccagactggtcttgaatttctgggctcaaacaatcctcccatcttggccccacaaagtactgagattagagatgtgagcctccatgcccagctatagttaaccttttgcagtgtttttttttttaacttaatgtttctaaatttcttctagggtaaacatttactacgtagaggctgtgtgtcatttacctcttcatggtatcacacatcagatacttctaacataatcatgataaatgttagtggtttcatggtcttatttacactccagctctaccagaattcactaatctacttcaagtttctgtctgaaatattctttttttttttttgatacagagtctcactttgttgcccaggctggagtgccgtggccccatttcagatcactgcaaactctgcctcctgtgttcaagtgattctcctgcctcagcttcccaagtagctgggacttacaggcacacgccaccacacccaactaattatatttttagtaaacatggagtttcaccatgttggccaggctggtctcaaactcctgacctcaagtgatctgcctgccttagcctcccaaagtgctaggattaacagacacgagccaccgcatcctgcctctgtctgaaatattcttattgttcatcatacagtatattgggctacagtactgtatttttctccagggtgttggtaaccatttatgctgagtttagccattttacttaagagtctactaattcactgtagataaagagttactactttggcatggtggagcatgcctgtaatcccagctctttgtgggaggccaaggcaggtggatcgctcgagtctaggagctcaagaccagccaagacaacatggcaaattttatttctacaaaaattacaaatattagccaggtgtggtggtgcatgcctgtagtcccagctactgaggaagctgaggtgggaggattatttgagaccgggaggtagaggctgcaatgagccatgattgtgccgctgtgctccagcctcagagacagagcagtaccacaaaaagagttagaagagttctttatctaacaaatatgagttgtatatttgcatagttgattgcattcatgaagtctaagtatttttttattcattaaatctaaaggaagttggggctctctgctttcgataagatgaagtaacaagtactgtacttatccttcacctaaaataatgattaaagaaaatttgtgtgtttatttcttaagacacagaacaagcatttgataaaatccaacatccattcctcataaaatcactcctgaaactggtgatagagaggaacttcctcaacctgataattagcatctataaggaaccaatggtaatattatatttactggtgaatgtctgaatgctttctcactaagatcaggaataagacaaggatgtctactttcactacttctgttcgatactgtactgcaggttctagccagtgcaattagttaagaaaaagaagtgcttctagattaaaaaacagaagtaaatcaatcattatacttcagtgatatgatcatctatgtatattattctatagaatctacaaaaaggtactagaatgaataattgagtttagcatgcttgcagaatataagatcagtatttaaaactcatgtagttttctgtactaggaacaaaaatttgaaattaaaatttaatagaagaaatattttctatcacataaataataggctatacttggggacaaatctgacaaaagatctggaagacctttactctgaaaactgtaaaaacattactgaatgaaaataagtgtgcagattctttacatatgatactaatagaatgatctgtttaaaattgattaattgtgcatcagctatatacataagccaaaacttaaacaattgtacaccttaaatatgtacagttaattttgttaattcaaatccctatactactgttaaaacaaattagaaaaacaaactaaaggaatttatgttcatatgacagtgaatgagttgtctgaactcacctcaatttttaatcctaagatgaatccatctctaaaaagtactgaacatctctgaaaagttatgaatatggtgtatgttttctcccataacctcatatatagcaattattgttattaggaaatcagaactagcttaaataatcataacattgaccatctgctttccttgttaaatacatttgactactaacttaatgttttcagttagccctctaaaatttgagaaagcaacatcttttttacctttttgccagatttctacaggctttctgatatatagttggccctctagatcattgctggcagtttgaaatatgtgtgattatgatagagtatttaaaatattttattataaatatttgatcaattttttattatataaattttcttcttttaaaaaaatacaatttagagatggggatcatactatgttgcccaggtcttgaactcctgggctcaagtgatccttctgccttggcctccaaaagtgctgggattatagatgtgagccactgcacccaggctagggtaaacttttgataaatatttttgattatgtagaataattttatggtgagttcaaagtagggttttgcaatttttattgtggagatgtatttatactgttagtttcaggatatctgtactgatcatctcctgtgtttttaatcatgatgtttccttttcaaacaacacattatgatgaaagatcaattttcaatgaaatcatttataagtatatactagctattgcaactttggggtttggaaaggaaaaattaaagtgtgttatgtttacatgttggaaacatgttagaaaaatcagtctaggattggaaggagatgggaagatttaggagtaactgctaatgggtacaaggtttcttcttagggtgagaaaatgttctacaatgatttgtggtaatggttacagaagtatgattatacctaaaatcattgaatcatatgctttaactggataaataaaaggcatttatattggaaaggaaatagtaaaactgtatctgtttgtagataacatgatcttatataccaaacaaaaatcttaagcagtcccctacagatctattagaagtaataaatggcttttcacactacccacatagacgtccatacggcgttctttctggattcccatcgtagcttaaagcgaaacttttcaccatgtctggagcccttgatgtcctgcaaatgaaggaggaggatgtccttaagttccttgcagcaggaacctgcttaggtggtaccaatcttgacttccagatggaacagtacatctctataaggaaaagtgatggcatccacatcgtaaatctgaagaggacctgggagaagcttctgctggcagcttgtgccattgttgccattgaaaaccctgctgatgtcagtgttatatcctccaggaatattggccaaagggctgtgctgaagtttgctgctgccactggagccactccaattgttggccacttcactcctggaaccttcactaaccacatccaggcagccttccaagagccacggcttcttgtggttactgaccccagggctgaccaccagcctctcacagaggcatcttacgttaacctatctaccgttgctttgtgtaacacagattctcctctgcactttgtggacattgccattctatgcaacaataagggagctcactcaatgggtttgatgtggtggatgccagcccgggaaggtttgcgcgcgtgtggcaccatttcccatgaacacccatgggaattcatgcctgatctctacagagatcctaaagagactgaaaaagcagagcagcctgctgctgaaaaggctgtgaccaaggaggaatttcagggtgaatggactgctccagctcctgagttaactgctactcagcctgaggttgcagactggtctgaaggtgtgcaggtgccctctgcgcctattcatcagttccctactgaagactggagtgctgagcctgccacggaaggctggtccacagctcccaatgctcaggccattgaatgggtaggagcaaacacygaaaggtcttaagctgttattgcacacgctcttaagcaacatggaaataaggttgacggaaaataaatgtcagtttaaaaaaaaaaaagtaatgcattcagcaaggttgacagataaaatatcaagatagaaaaatatattggatttttgagcaatattaatgggcaaattgaaaatgaagttatgaaacaatttcatttaaatatcttaaaaagaaataatgtacttaagtataaatataacaacagaagtgtggaacttatactctaaaaactacataacattgaaagacattaaaggaaactaaatggaaagacattaaatgttgatattttgaaaagatttaatatttttaggatggcagttctcccccaaattgatctaaaataaatttcctactaaaatcacagctaaattctttgcacaatttgacaagctgctcttaaaattaatatggaaattcaagggacccagtatagccaaaacaatcttgaaaaagaccaaaattgtgtttctcacttcccaattaaaaaacgtatgatgaagccataccaatatgtagttctggcataatgatagacatatctattaatggtatagaattgagaacagaaataagtcttcacatttatggtaacctgtctttctataagtgtgccatggcataaagaatagtcttttcaatgaagggtactagaacacctgcccatccatatgggaaaaaaaaaaagctggacccctatctcatatgcaaaaattaactcaaaatgaattaaagacttaaatgtaagaactaaaactgcaaccgttagaagacatagggatacatgtttatgactgggcatgggatatgagctggcaaatgattcttagataggtcaccaaaagcatgagcaataagagaaaagaataaataaattagatttcatcaagttttgaaagttttgtgctttaaaggacaccatcaagaaagtgaaaagacaacccacagaatgggagaaaattgcactcacatatctattttatcttgaatatataaagaattatttagactcaataatgatgaaaagacaaataactcactttaaaaaatgggcagaatatctgagtaggcagtttcccaaaagaagatatacaaatgactaaggagcacataaaaagatgctcaacataattagctatcaggtatattaaagtcaaaactacaatgagataccatttcactcctgctaggatgatgggtataatcagaaggacagagttttggcaaggatttggagaaccctaaggcattgctggtgggaatgttaaatagtgcagccwttttggaaaagagtcttgcaattccttaaatattttaacatagagttaccatatccagcaattctgctcctaggtatatacacaagacaaatgaaaatgtttgcacaaatgtttatagcagcattatgtataatagcctaaacatggaaacaacccaagtgtgttactgataaatgaataaacaaaatttggaatatccatgcaatagaatattatttgacaaaaaagaaatgaagtactgatacatgctacaacatgggcaaattttgaaaatatcgtgctaaatgaaggaagccagtcataaaagtacacatgttttatgattccatgtctgagaagtggcctgaacatgcatatttttagagacagaaaataaattagtgtttgcctgggacttgtgaagatgaggttttcggaagtgatgactcaagagtgaactggtttttttggggggtgttgaaaaatgttctaaaattgatgtggtgatgcctatacaactccaaatatactaaacaccattgaactgtacacttcaaagggatgaattgcatagtatgtgaattatatcttaaggagctgataaagaatatatatttattggtctgttttaccctttgaatggattttacccatatgtgatgtttttaccatgatacattaatcatttgccagagtttttgttccttaaattatgcatatcttacaaatgtaaaatgtcttatttgtcaatatcactactaaacaagaaaatagtctttaagcattgggaacctcactggtggatatgagttttacacgatcataattttcagagacccagggagaattatctcccattttttgattagttttctgtacactgttgcctaattatctttctgaaatacagattgatcaggtaactctctgatcccagcctgcttgtcattgtcatgcatggttagtccttcataaaatatgctattatggaccccatcttttactaaattcagagaaagcatgcccatgtctctctgtgttttttgtgtgtatgagtttctctatgtataattcactttagtttatttttcttcttttcgcctggtaaaatcttcaaacttcaagaaacagcatatctgttatttactctttgaccttttcattataccccatattccttggtgctttccaagttttttgttcgtacctttattataacactcctcgtatgttgttttcatgcttactcctccagtagagctatgaacttctcatgactttatttgtgcttctattccctcacagagtactttagatataataagagtctcttggattaatgagttcctaattttattgtgggtgctcagtaacatttttattttgatgatgttataattgaggtatgaatcagactccccttacactttctgcatataaatcttttttgtaaaagaattctatacattttaattatcctataaaaacttaattaccaatattgtttgtagatgtctgttgccagatttttaaaaaatgatgcattaccatccccataaatgataattgccttttgctttttttaatataaaaatgacaactttgcctgtcaaattataaaaaatgttttctcattattttcatttgccattctttggttactgtgctagagaatatatatgtctattgtttgttagtgtttatatcattgccctttaaaaaaattgtagttgtgcaagaatggatgtaggcaggctaaaatatggactctccagagatgtggatatgcctgggaaattgtcatttgatttacctgtcttcacaatcagcattttggaccgtgatacagttgttactacctatttacacttggctgataggcaggctcaaagctgtagcctcttattagagtcagtcaaggggggccagaatggcaagagccatttttttttttaaactgctggtcctacctcagcagcaccaggagagtggcaaagggggcttcttcaaagattttatggtatcttcactttatgtcaaagtctaagctatcagtatttttctttgtagtagttggtgtatgtgccaaagttagaaaatctttctctgtcttggttattaaaataagtggctgaattttctaatacctttatgggttctgttttgttttggtttgttttttcatttgtgtggggtttttgttgttgctgctgttgttgtttttacacttttggttaaagtgtgacaggaaaaacttttctttttttccctgaaaatggttctgtttttatgccagcttaatgtactaattccctcatttccgtctaaaaaaaaaatcacctttattttaatactatattgccataggtacttggatccgtgtttgaactctgtatttttctgttgatctgtatattagtaccaaattgtttctaaagcaattaacaaataatacattttaatacctggtagtaaactgctcccttaatcccatcattattactcatctatttcagaaggtactttcttattattcttccacatgaatttaaaaatcatattgatattttcaaaatatcacattggaatttgtaggttctttaggaagaaataacattttagggtacatttttgttttcttatcatatatcaagtttttcattttaattatttatttcatagctttttattatcgaaagtttcaaacatacacagagaaagaatagtaggtataatgagctccacgtttctattctctatctagcttcagtaattatttacatttgccaaacctgatttaagtacctctcctatgaagcaagtcccagatgtcttatcatttcatcctcaaatgctctagattgcctgagaatggtctcaaaaaacccaccatcatattattcacaatggtaatttcttactgctatttaatatccaatttagatttgcatttcataattgtttcaaaaatagccttttacagtaagtttatttgaatcagcatctaaagaattcaaacactatatttgtaccttgtgtcttttattattactgcttttctctctctcgtcttttttttttttttttaatactgtcattgacctttttttaaaagagaaactgtrttatttttccaggagaatatctcactttctgaatttggttagttgcttcatatttagtatttgctgagaatttgagctagagatttggttaaactcaggttttatttctttaggcaagaatcttcttaaagtgatgctccatcatttccattttatctcatctgtgagccatcatatctggtggttccacttttaatgatgctgagattaatcaatatgttcaggtgtaggttttttgtttgtctggttttctttctgctattgtatatagaacattttccttactgtttttctagtaggttattattggtatctgagaagatttttaaagcatgtgttttagtaactggacatctgaccaaactctcattactgtgtcaacttaaaaatcatgagatctgtaaatctggaaaagagaactttatttctgagaagggttacaacctgtaggctgggaagcacagcctctggattagatcaaaagtagccatttcaaagacgatgggtgagagaggagttttacactaaatgggttagctgaacatacatatttaacaggttataggaggagctatgagtattcatgaaaggggttacatgtatgtatgataagcaaacataacatgttacatatgtcccatgttcgctttggaatggagacttaacattaaaaatgtggtaaaatcagactctatacatcaaaggtgaaacttaggactcaaaggtgctttgtgcacattctctgtaaactgaccagtccatggtcaattgtcgtttatcaggaaggattgctttgtaagttggtcagcagtcatgtcaaaaccatgaaaagggaggggaatctggccacaacatcaggcagttggtcagtggaagaattttccattctttcttttccagggctggtgtttgtttaactcttaggaaaaatagtctaatgacaggtagtgaggaagagtgtatactgagacgtgaccaacctcctatctcatcaaggccgggaaacttcgtttttaaagtttttctggggcctccttagcccacagacatctgttcagtaggttggggcacttaggattttactttatctcacaaatatctaataaaatttttgggtgatcctcttcagtgactagtatagaattgtcacacttgagctttggagatgaggtgtctcaaattaaaccctaggatggttatttagtctttctgtgcctcagtttttttttttttwaatctatgaaatggagatcatgtgtctacctcataggtttataatgaagattgaatcacttcccataataatcagaaactacatatttgggctgggagcagaggctcacacctgtaatcccagccccttgagcccaggagtttgaggttatagtgagttatgagcatgccaaagcactcagagtgagattctgtttcaaaaaaagaaagcagatgtttgttttttaatttttccatatcttttgcagattgtgatattgtgctttccctttttttcatattttaggcctttaattttaggatgtaattatatagrccataacagttaaaaaatagcagtgataacatgcatcctacaataacatgaatagctaatatttattttagtataattttcttcttgtataattatgttgttttagtagtatgttttgaatatcaccagaataaatttttggtatctattaaaataatactataatttctttacattgatcttttaagatacagtttatccaatacttatgatgccaggttccagaatgcattagaagagtgtttgtggcatagggaatgttggaacagaagcaacactttacaatgttaaatagttttattgagaaggtgagatttgggtaaagactttcaagatgagtgaggatccatatgggtttctgggggaaatccagttcagtggaggggttggcatttgctaaaggagggcatgtttggtgtgtttcaaaatccagtagggagccgggtgtggtggtgtgcttctggagtcctagctgctcaggaggctaaggtgggaggattgcttgagcccaggagttcagatctagcctggacaacatagcaagatcccatctctaaaataaaataaaaatttaaaaaattgtttaaaatcctgtagagagttcagagtggttggagcagagtaatggagaatagtagacaatggagttagagaggcaatgagaggtaaagggaagtggcttgaacctgtagggcctcatagactattgtaaagatttttgctttttagtgagtgttgttggaagcattacagggttttgaacaaaggaatgacatactttggcttgcatttaaaaaggacagctctatgtgcgtggagtcaaggatggaagcagagaggttaggaaatcatcgcaacagtctaggcaagcagttatggtaacttggatgggtggtagcgtggagttaatgaaaagtggttgaaatctggaaatagtttgagaacaggcttttcaaatggactggatgtggtgtgtgaataacactcttctcactggtcttgttgcctctccaatccagttatacacagtagcaaaaatgatcttactttacatttgataatttcaccttcttgattaaaatccttcagtgacatactattacactgaataaaatttatccttcttaatataaccaacaaggcccacataatctagaactgcatatttttctaaccgttttcatctccctgagctccagccatacaggtgttaaattgttttaatatgccaaagtttttcctgcctcagatgctttgcattgctcctccctctggaaacttcccctaaccgtaaggtcactctttacccaatcagctcatttgcatgtttcacgtctcagtttaaatgtccttttgtctatttaaaatatattttagctgagtgcctttaatcccagctacttgggaggctgaggcaggaggataacttgaggccaggagatagagaccagcctgggcaacatagagagacctggtctctgaaaaattgaagaattagctgggtttgatggcttgcacatgtagttctagctacacaggaggctgaggcagggaggatcacttgagcccaagagttcaaggttacagtgagctatgattgtaccactgcactccagtctgagtgacagagtgagactccatctctaaaaaaataaataattggttccttctttgcctgcctcccactctttgtctttctcaaacatttttttcttcatagcatttcttasaattatgcattttatttctgtgtaatgtttttgtttgctatgctttgcattttatattgtgtggaatctccatgaaaataaggaccagcctgacttgttcaagtttgtggtcaagtaacaggatggtacctggcccttagaactatctttataaatatcattagattggattgactgactcaattaatgaacaaatgaacaaacaaaataaatcattatatgctgaagtagcagtcctggacattgtatctaatttagattttaatttaaccttgttattttgatactcgcttcccttaatcagtcattgcatgttccttattgtaaggtggttgtttttctttatcatgagaagaatagttcttctccgggcgcagtggctcacatctgtaatcccagcactttggggaggctgagacgggcggatcacaaggtcaggagattgagaccatcctggttaacatggtaaaaccccatctctactaaaaatgcaaaaaattagctgggtgtggtggcatgcacctgtagtcccagctacttgggaggctgaggcaggacaatcgcttgaacctgggaggcagaggttgcagtgaatcgagatcgtgccactgcactccagcctgggcgacagagtgagaccctgtctcaaaaaaaaacacatttttttatttagctattagcttctaggcaaaatcttaaatttcagaaaataattatactcatatagtcatactacctgtcagggaaatgtgtcaaaggaaatatgaaacaatagctttaaagttgtcccgcaccctcaccctgtttttcttttgaaggtattatactaaaggaagaaagggaaaaagagaaatctatggtgtgagttcaagtttactactgtaagtgtttaagaaagggctctgttaccatgacaacaaatgcatgaatttcawgtggaaaattttcagtgtatgggactgataaaattgtaacattctgattttctctggtatagaattgttctttgtcaagttaaaaaaaatctgttaatatatgttaaaattaaatttttaaatgttttatgatattgttttctaattgtttattataacttaaaatcatagccaaaagagtgtactttcgtagatctgtcaagcagaaagttaagtatttgatttgacattaaaaattacttttctaatctgtattagatttttgctaaatggtaaataaaatggtaaatagtttcatgtattgggagttcttgacaatagaaaatgacctgccactttatagattcctttgccttaaatgcttactaactcaggtagaggaaagctgttaagctttaagtgctttgtcatatttgcaggcttttatagtggaagagaacagcagtcagcaatgatgatggaaaactgtggcaggtagacttaaaacaccataaagcacagacgattgtgtgtaatgccttgaattgaatcctttttgaatgaaatgatcagccatatgtgccacccttatggaccctgtaagaagagtagaagaaatgtgccctaatgctaactgtgcatgaaattgcagtgttaggagatattgaccagatgtttcaatctcagcaaatggcttgttatgtgactgagtgaaaatatctttgctgctttgatcacatacaccttgaaggaaggggtaatttaatagaggctgtcatagttcatcattgtcaataaactttgacttgacctttgccttacgtttttgatgttgctgctgttaagtgttgttgggcagatgtttactgccttgagggattttgctttttataaagtgtatactagaaaaagtaaaggagaaggattttctcaattcttttcttattctttggttattagttggcatgcttctctgtggattttgtagaatttctgggcagatgcatttgagtgacattcttatgtctaaagatcactgtggtgtttctctaaaggtttcttcctttcctcaccttcctttttcttttctcgagacatggtctcactctgtcactcaggctggagtgcaagtgatgtaatcttggctcactgcagcctctacctcccaggctcaggcgatcctctcacctcagcctcctgagtagctagaactacaggtgcacaccaccatgcctggctaatttttgtattttttctagagatggggttttaccacattgcctaggctggtctcgaacttctgagctcaagccatctgccggcctcagcctcccaaaatgctgggattgcaggtgtgagccaccgcacctggccctttctcaccgttttgtcctggttttaatttaccacaataaacttccttggtggtttttctttcttattttatatacagcctattcttttgttctgatgaaagtcacattgaattaaaacttgacacctattgtaacaccataccaggtgctgtgttatttttttatccctagttttggagacctttggagataaatccatgctattttgtaatccatttttgttaatcttaagaaattgagtgaaagtttcagtaacacaatttttttaaaattataagatacagtattttaaaattttggtaaatagctttggattaaatgagtttcttgtttaatttgatgaatttgactcagttctrtaacctttttgctctttttcttgaaaagaaaaaggcttcctcactggctatatctgggttctgcctacactcttccctcacttccccttggtgtaggtggcctagaccgtgttagtcacctaatgaaatctgtgaatcctctcttgaaaaacacagcaaagtttccttacaatttcaggatgtttattggattttccccccctcctctcacacataccctgcaatgataggggcccctggacttcaagcagactaacaaagcttagaaaataagattcatactccttcttagtattctagatatataacaatttgacttagaagtaacaataacaatagtattagtgatactgctacaataattacaacagtaataataataataataattaaaatttactttctgccaaccttatgccagattctatgctgaacctttaacctgtattactggttatattgttaatgatacctctagatagagtatatgcagcatacttttattctgtactttaggaaatactatatctttagaatacagatttgagtaagagattataagcattttgattctaagactttttggaatactgaacttttagttttctgattccagtagtcagtctgtctgtctctgtctctgtctctgtctctctctctctctctctttctcggcctctctgccattcatcttcttctgaaaattagctatcccacgtaagcctcatatatcccctaattcctatttgtagttgtgagggaggaaaaatattttccttctaagttctctgctgtaagattcttgtaacaaaagacagattaacaaaagttaagtacactaatttatattctaagttttatgtaacatagagggaaatgaagacttgaagaaacaattaaacctggtgtttttacattaggttttatgaagagtggaagggaaaggcaataggacaaaaaggggtatgaactaagagtagtaaactgaggggaccttagcaagacctgtttgtttagattcatctcatgtccttacatcttctgagataaggatgttctttttttctgcatatagtaaacatcctctcacatggatggtcttatgatttgcttcagaggaaatcagaaagtccttcctgcacctgctgttctcaaattccttcagcttaaaattttcagtatgtcaagtgccatattttgggggtagtgtgtcctgatctccatcatagttaagtgtcagcttggacacagtttctcatatttatcttaggaaatcttctttggccactctgcaaagactaaggtgctacttgcatgttctgcaacaactcctattatatatatatcatctcttaaaataaatagtaacatatcttgtatgtaagctttatgtacccttaaattgtaagttttaagaagatacaatcctggctttcctgttcacttatttgacaattatttaattgcatagaatgtagcaggcactcttctagatttggaaacacaccctacaactcttttaaaaaagccaagaaaacagtcttgaacagcaaattaccattaagtggaattaattctatgataggaatgatacagtttgttgcggcaacataaaatgcaggcatataggctgggcacggttgctcacacctgtaatcccagcactttgggaggccgaggtggatggatcacttgaggtcaggagttcaagaccagcctggccaacatggtggaaccccacctctattaaaaatgcaaatattagctgggcatggtggcatgcacctgtaatcccagctactcaggaggctggggtaggagaattgctcgaacctggaaggcagaggtttgcggtgagtcaagatcgcaccactgctctccagcctgggtgacagagcaagactccgtctcaaaaaaataaaaaataaataacaatgggtatatagaacagaatttaggacaacattgtctcagtaagtgaaacctgaaacctaagtaggaagctagaaagaacaaacagaaacagaatgaagtattcagtgtactggaacattgcattcaagagtgttaatgcttaggattaacttggagaggaagttaatggttcaatcataaagttgtttatgttgaacttgcttaagatacttgggtaacgattgaaggacattttaggaagagcactcaaaatgcagtggattggagaaaaacagaactaaaggcagggagatgatctaagaagcttttgcaaatggttgcatggttgggaggatggagtgacagagagaatgggaaatgacatccaatgggtagaggtttctttttgagataatgaaaatgtgatggttgcacagctatgtgaataaacaggaaacaactgaattgtatattttaaagtggcaaattgtatggttatatgaatatatctcaataaatttttttaaaagagacttttatagtagtctaattgagagtagatggtggcctgtactaaagtggtgttaatagaggcaggagtaaaagtgtgtcaatttaataggcaaaatagggttgagtaggtatttggatattcagagcagtcatttgaaaacaagtataagctaaaaatgagggggtctcagcatatagatgataattgaaaccatgagagtagattagatcatatccagagaaagtatatacggtaagaattgtaggtaacctgggaatccaggcctgagaaatgctaaggaatggggagaaggaaagaagcctacaaaagagatagagaagacttctttatccattattaattacaataatgtccaacaaataataggtgatcaacaaatattggtggaatgaattgaatgaatatacactaaaaattctgcattttatcacagtctcagggcactgttgtcatcgtcagctgtactctgtaataggcactgccttgaacactttgcttacattatcctattcaatcatcacaataattccacaagaaacatagtctctgaaatagtagcttgtttaccatcacatggctggatgaacttatatatctgagtctaaagtttattttttctactaggcctaatattccccgaatctgttctgagaatgttaacagatatttactaacaaaaataacaatagaactatttcagggaaagaacaggattattagaaattgatttttattaataggatgcttgctggcaggggcaatggagcagttttttaaggaaagaagcataacatactagttattcagttagaatagattcttaatatttatgaaaatcttgtgttttgccctgtctcacttggtggtattgtaatcatctgagaatctatcctataagttatgtgatatatgctattttccttatcartctatttcagttttgatttcctcatcatcctttgcagtctgcttgttgctgtttctcagttttgacatttaatttcttttagttgtgctttacagtttttctgagatgcctcattgagttttctgtataaaatttcatatctttggcttatcttgcaactcttttagtacctaggtgtcattcttcatcattctattatgaattgaattaaagcatatggcattatttcagaagtgactgcctcttgggcatcattgtcagttatattgtcctaaatattgcatttaggtaataaaaaggaaatcttccttgaaggtaaagttaatattaatagaaatctttccatatgtygttaaagactcttgttatgaagtttaatatgccatttatttaggccttatttaaattcagttgtaaattttttccttctggctccttaccttagtgaactgtcatctcttatcatcatactctttgctcgaaaaccttcatgtgttgctttctaccctcaggatgttgcctaaatttcttgaagtggtatttactgatctggcctacatctacctttcccattagtctcttccttcccacatagttgctttgtcggtatactcctaatagtcttttatttctgtttttcattgtttttgttaatattatattcttgtttcccaatctgtgcactaagtccccttggggtgctgtagcaaacccacagagagtcttcagggtatttcaaaatttcaaggtaaacacagtgacgtctatcagacacagcatgaaccactagctccagatatttcagtttttttttttttgagatggagacttgctgtgtcacccaggctgtagcgcagtggcgggatcttggctcactgcagcctccacctcctgagttcaagcgattctcctgcctcagcctcctgagtagctgggattacaggcatgtgccaccacgcctgggtaattattgcatttttagtagagacggtgtttcaccatgttggtcaggctgttcttgaactcctgacctcgtgatccgcctgcctcagccttccaaagtgctgggattacaggcgtgagccactgcgcctggcctggtatttcagttttaacattagattactacattccttttggtggcattatactgtgcgaaactgaatctttgacggtttctgtgataaaaagcaaatcagtgtgaaacaaatgagggtgatggttaccagtctgattccaagatttgagaattttgcagtgcctaacaggtagaaaatcattaggaaataaacacttttggctgaaacgaattatttaataaatggaatttctttcatcctaggggcaccatgataaaatttctaacataggaaaggaggcatgtgctatatgctgtatgactcttttttctttctagtttgtaaccattttggaagatcatacccatccttcaaagaccaattgatactgctacctgtctttggaggcctttcctgatcccctccactgcagttgatctctctcatgggtattttccagtaatatgctgcttttttactattgctgtttaagttaaactaattgaagtatttatttgaagttaccaatagtggccgtggttttcctattcctccagttaggtataattacttaaagtataacaagagccctttccttctttgtataaaggtgatacaaatataataatagaaaccctatactgtactaaactgcgtaggttgttagtcaatttctttttatttcttttttttcttttttctttttttttgagaggagttccactcttattgcccaggctggaatgcaatggcgcaatctcggcccactgcaacctccacctcctgggttcaagcgattctccttacctcagcctcctgagtagctgggattacaggcatgcgccactatgcctggttaattttttgtatttttagagatggagtttttccatgttggtttggctggtcttgaactcccaacctcaggtgatctgcctgcctcggcttcccaaagtgtcgggattacaggcgtgagccactgcacacggccttgtttgtcaatttctaattcttacaacatccttaaaagatcataggttatgttatccacattttatatttgaagaaattgacgtttagcagtgttagtttttctcacacccacatacctcctgacctttagctattctagttccttttcctttaatattgattatagaatcaactttttgatatcctcaaaaatccattgagagtttggttgggattgcattgaacttatgaatcaatttggggagaattaatgtcttaagaatattgagttttcaaatccatgtacataatatagctcttcgtttatataagttgtttttttttcctcagcagtcttttgtagtgttctacatatatgtcttgcacatatttggttaaatgtgttcctacatgtttcaattttggtggtattgtaaatattgttttcttaattttaattttcaactcttctttgaaaatttatagaaatacattagatttttatatattgatcttaaagtctgagaccttgattgacttacttttaattctagagcatttatgtggattccttatgattttacatatattccttaaacatgcacaggttggtatctagccatagcctcaagggttactctgtagatttcaactcattcttctctgaaaatctttttcacaatttctagtctcctggctctccttgaacacatctctttctcctcattttagtgaaaatgccaggctctatttgccttctttctccctctccatggtgtggaacttgcctcctggcagagtacctgcatgatgtcagggcacaccttgtttctttcctatcagagatcacagtcctaccatgcctgttattcaatgtctgaaaattctgtaggtgtttccttttggttttctggtttacagcacaacagtaattctagagcctgctactcactcatggccagagcagaagttaaagtttttaaggtatactgtacatatgtgaaccaagggaaggtaggcagtttattttagctaaaagaaggagcataatcaaaggttataaacaaggttgaatctccatcctggagaatcaaaatctagtagttgtgactttgtattaggaacatcatcatttttatctttttattccctggcagacatgcattaaatgtttgttgattgagtatcaaaatgataggaaatagattagttggatgttggtgaaacattgtgttttagatgcttacagatgtactaaaattttaacagaaatctttgcaaattacttgttaaattttcctaaactgatttttaaaaatctatttcattctcaattataacatctttactgagattattaagtgctttgaagcagttaacgtggcttttttttttaatggctgtaaaaaaactgaatttttaggcttgttaaactctggttttagaatgacttttgagtggaaatcactgatcaaaagcaaagttctcacattttgtcaatatctgaatgtcagaaatagaatgtcaggcagtttcccatgttgaaatattcgatagtaaaaggatagcaaagttgctgaatatttctactgtttatcaatttttgccttgcaggttcaaataatatttatttgtagtggaaatatttcaattcatttaaatcctgattatggagtagttagtaaatcaggtttaagcctgacagtgagttgatatagctcttayttcagactgtagtttgaacatgtagactctctgattataactaggctaaattatataataatgactttattttcactgaacaaagtttgctattattttgatgacaaattatttaagtaatcatagtaaaagttgctattggctctgggttttatttattttgctatatatagtagacatggttgatcatttaatcatgccttatagataaataaaagtaagttatagaataacacagaaattttctgctaaatttatactttcactaaatttaataacaatagaaattctctgttaaatttayactttcactaattgtagaataaagtattttaagttaggcatttatactgagacattttatgatattaactgcttcatgttatttactcattttgataaatggagtgataatatccaaaatggaataaattaagtttaaattattgttattctttaaaggaatgatttagctacagtatgtttgtcccaccttttaattttgaacattttctaacttacagaatagtaaaatgaacttttctatacctttcacattgatccaccaattgttaacatttcaacacatttgtgttctctctttaaataaatgtatgtgtgtgtattttcctcagaaccattctgaagtatttattccttattcaagaaattaagcattgatactgttttctgatgtgtgatcaagattccagatgtcrcagttattctggtagtgtccttgatagctgtttaattttattctcagtccaggatccaataagaatcacacattacatgtattagtactatttctttaatatactttcctcccacctttttggttaaggcattttcttcaagagtccaacccagttgattgtaatatgtgccaccttgtggacttaatctcatgattttaggcaataatagtacgtaagtgacactgtgtatttcccattgcatcacatcgtaaggtttatggctttattgataatgctaattgataatggttaagatagcatccctcagattttttgcttagaaccttcttccctttccccattccatgtttgtgttttccttatcctgttcagcaaacctagttcccaacagcatcaactttatattcatttgctctatcctacaatacgcacaaaatagtttcaccaataacataaccaacaataaacctactaaataaagtttgatttatttgttgtttttgttccttataattattccattaagactgtattgtcataagagcatactgaaaaattatttgcattattttttctatgtgcttatgttacaatttgataccttctttgatttttcattcttgttatactcaacttcataatttgtttttcttctaatggaatttgaaattaaaattaaattttattatttgaaaatgcaaaattttaacatgtttcagaagtcaaatttgtatggaatgctatattcagagaactcttctattcctattcctctactcctttcccactcactctcatagaaaagcatttttcatttctagtttattctttctgtgtttctttttataaaattagcaaacacaaaattatatatacattctaatatatgtatatagtatagtatctatactaaaagaatatatatggttgagtgaggtggcttgcacctatagtcccaactactcagaagactgagctgggaggatctgttgaattcaggagttcgaggcaagaatatacacacacacacacacacacacacacacacacacacacacacattctcttttatgtaataaaaaccataacattaactctaccatcttaaccatttttaaatgtaccaattagtatacgcatgttgttacatagtcaacctctagaaatttttcatcttgcaacactgaaactctgtacccattaaactcttaattctctgacttccctccctgacgtccttggcaaccaacattctacttatgtttctatgattttgactacttcagatacttcctatgaatggaatcatacaatatgtgtcttttttgtgacagaccttatataacttagcaagttcttgatgttcatctatgttgtagcatgtgacaggatttccttcttttgtttctttatcctttaattgttgatagatgtctgggttgcttgtacttcttggctatcatgaatattgctgcrgtgaacatggacatgcaaatatatctttgagatcctgctttgaattcttttgactgtatacccagaagtgaggttgcttgattatatgttaatttaatttttaatatttctttcaggaacttccataccattttagtagtggctgtaccatgttacatttccaccaacactgcacaagggttcattcacttctccacattttgccagcattttttgttttctgtgttttcggtagtaaccatcctgatcagtgtgaagtgatatctcattgtggttttgatttccctgatgattactgatgttgaacatcttttcttgtgcttattggccatttatatatcatttttggagaaatgtctattcaagtcctttgcccattttaagatcatgttatttgtatttttattgttcatttagaagtttgttatatattctggatattaacctttcattggatatatggtttggaaataagttgccttttcactctgttgattgcctcctttgccatgcagaagttaagcttgatataatcacatttatctatttttgcttttgttgcctgtgcttttgttccatatttatgaaatcattgctaaatccaatgtcctgaagctgtcccccatatttgaaaataatatatawtattaagttttattttttaaacaaagctttttacctttgagacttgatttttttttgaagttaacaaaatatcctggaaattactttgtatagaaggagtgttccacagagcttttcctttttttgtgttgttttgctgggatttttgaatggctgtgtggtattccattgtgtggatatatcataatttaatcgactgatcttctacaggtggacttctagtttatttccaacattttgccattacaaataacatctcaatacttatatatgtgttgttttatattgtggatgagtctgtagaagtgggattgctggtcattaagctgttactatgtctcattcttacagttctgtctttgttactttttcctctcctcatccttttacctctcaaatatgcatgtatttcttttctattccaaatatttgagaacagattttatcaaaatctattttgatatcttttgactttgtatgtagattatttgtaggttattttgctacctgtaagtctttgaaactaaacaggtgttacctatagaatcactatagaatattagaaccctcagggatttgagctaattataaaaggtaaaaagttcaaatctgtgaaacatatgcatcttacaagaaatccattaaagcttataataattacttcaatgaaaaaatgagatatttgtaactagaactgtaacactatttctgaatttttaaaagaatttttttagatatgagcatgttttagcttaatttatatatgaattactacaataagtatgacaatcatagtaacagccacagctaatatatgttgttgactatgtgctgggtaccatgctcagcaatgcaagtacattaatttacatcatttcaattagtcctcaacgaccttatgagatgtatttgtaattatatctccactttaaacatgagtgaaatgagaaatgttaagagatatgctctaacatgctctaactcatgcagctagtaagtggcagaagcaagatttgaacccagagagtcttcaatcaagatggattctgctctttttatgacaatgctagacttcttatattgggacccactattattttcctatatcaggccagcatttgtcttaaggtctgtatgattttagctgctgagtccttaacaactttatgtactttatttctctccccaaagcagtataagatattacatggttgttatattaagtttttttaatcgtaagtgatagcacagaattgaaatcccattcataacagctacagtttctcacaaagcattcttgtcacatcactatctgtggcagaatattaaactatgtgtaccatttttttgccccattaaattatttatgttcctgttttacagtggatgattcaacagccacacaaagcagcaacattttttggatgcattgggatagataaatttggggagatcctgaagagaaaagctgctgaagcccatgtggatgctcattactacgagcagaatgagcagccaacaggaacttgtgctgcatgcatcactggtgacaacaggtcagtgtaattccaagggaaccactatactaattggctattttaacactggtaaaatatgaattccaatgtgaatttggaattttgactttataattccttttaatgtttgataaatgcttattccttatatcagttttcctgtattgtttttaaatttacttttgttaaacatgcagttgaattcatgaggcataatggaataaaagtttgaggttatttagtccagtcwctactttttataattagaatcagaaaaggctgatagcttgctcaatgccttgtagcttgctcaacaccttgtagctaatttgttgcaaaacttgaattagaaacaatgttcttttcaccatatcctgaggttggaatacgagagagagagacagagagacagagagagagtgtgtgtgtgtattttatgtatataaaatacaacattacattcaggctcgtaagacttagtcatctaaatggtcatctaaaccatttctggcaaatagtaattcattcatattgaataaactcagtcgtgggtagtataccactaacaaaacaaccaagtatatttctatacacccttacttattagaaaagtattcttaatatgaacttgaaatatctctctcaggcccctccatatattggttggttgttcttttgtacccacatggagatactccttcagtgtattcatgcactgctaacgttattaccatatcagcacaggcttttttcccctttgcaagggaaaaacaaaataactgccctagctattatattgttgggataatcaaagatgacctctttttaaatagtgattcactagaaattttgcattacttatagttggaaatatgtagtctgtcctcctccattccctatctcctttcttttcccatcttctcttcctttctttttttcccttttcatcctcctttattttcttccccctctccaccacgaccttgctccatttcttctatttacccactttattgctcactacttgaccttcagcagaggtatattaaggaatggactattctagagactggggatcaataagcacagtatttactaaataaccaaaatacaatattcaaaaattattagggtatgaaaggcattttcagatctttcctttaattttgttttttatatacaggagaactttatggttttaagattacagtaaacattgaaatatgggattcagggattttaaaaaaaaacaactaaaaatgttgaaatatgtttgtttagacctttgcccttagttttcccaagaccagccttaatctgtaggtgcaaagttttcccattagtgagaagtaggtcagattttcttctgatatcacttaggctacagtaaaattactaaattgttttagtatgctaaattgctgtcctaaagaacagttatggttgggtgcagtggctcacgcctgtaatcccagcactttgggaggccgagtcaggtggatcacctgaggtcaggagttcgagaccagcctggccaacatggtgaaactccgtctctactaaaaatgtaaaaattagccaggtgtgcacctgtaatcccagctactcgggagacgaaagtaggagaattgcttgaacctaggaggtggaggttgcagtgagccgagattgtgctaytgcgctccagcctgggcaacagagcaagattctgtctcaaaaccaaagagagagagagaacagttatgataatattagatcttctggatgtcaaaaacttaacttttatactaattttatggttatagtgatattgttgagatgatatgggactcaaaaattggggagaaatcttcagtatctaaatcattatctaaattctggaagctaatacagttggatcaattgttttggataggtccagtaacctttgctgccactatcaaaaactcagaaattggccrggtgtggtggtcacaccttgtaatcctaacactttaggagaccgaagtaggctgatcactcgagctcaggagtttaaggccagcctggccaacatggcgaaactccatctctacaaaaaatacaaaaattagctggggatggtggcatgtacctgtggtccccgctgcttgggaggctgaggtggaaggattgcttgagcccaggaggttgaggctgcagtggactggggtcgtgctgcccactgcacttcagtctgggcaaaagagtgagcccctgtctaaaaaacaaaaaacaaaacaaaaaatttcagaaattgaagtgtttgggtaatgcagtatctttcttgatccaggttcttcctcttcaaagtcagaatcaaatacgttgggataataagaatactcatatttttctggtcgggcatggcagctcatgcctgtaatcccagcactttgggaggccgaggcgggtggatcatttgaggccaggagtttgagaccagcctggccaacatggtgaaactccacctctactaaaaatacaaaaaaattagccgagcatcatggcgggcacttgtaatcccagctacttgggagactgaggcaaggaaattgcttgaacccggaggcggaggttgcagtgagccaagacggagccattgctcttctctagcctgggcaacaagaacgaaacttcatctggaaaaaaaaaaaaaagaatacttttatttttcttttggagaaactgtagtttcccatcaaaaagtagttttattatcagaatagagtttagtatctggtaccagaaatgtttgcttttatttggtagccattttgtcaaaattttcctaaagtcataattactaaaatatttttataaattaggtctaaattttcttaagtttgtaatatagttattttgtatatgaatatgttgatgcatattactctttctttccttcatttacttgaacataaacagatgtatcctttagtagtaaattggcagatggatgagtggaaatacgttttggaagagaattgaggtttttttttttaacagtgtaatcgaacatattaccaaagtctgaaatgataagattttttttgtaagctataactgttacaatttaattagaaaaagagaaaaattggcaagtaattttttaaattctggagcagtatgaggaaggaaagtatttttatttataatgtaaataattattgtatttatttttaattaaacaagccaagtgacacttgtagcaggattttatttatttatttatttattttttagagatgtggttttgccttgttgcctaggctggagtgcagtggcatgatcatagctcattgcagcctcaaactcctgggctcaagcaatcctcccacctcagcttcctgagtccctaggactataagtgtgcaccactacccccagctaatttttaaaattattttgtagagatgggatctggctgtgttgcccaggctgacctcaaactcctggcatcaagcaatcctcccaccttggcctctgaaagagctgggatttcagctttgagctactgcacccaacctgcagcaagattttaaatgcagtatcctgcttagatattccatttctaaaattggaccagtcaggggacttttcaactatagaaaacaattctaattgatttcagcccttagaatgtaatggtttacaaattaattcctcttagcgaatatggtctacatttataagtgtcttttacgaaattaattccatatttggcttttaaaggcttcgattaaatagacaattatagtatgttgatatttatttttataaagatatttttctacttaaaaaatgtttttagttgcatagatttctttttatataatgagttagccttatttcttaactgcattttgaactattaagrtgtaaaaagtaggtcctattttactatcaaaaggcaacttaaatgccaatttctttctcaaaataccaggtgttgtttagaacaaaaattatcatagatgcctcagaaagttctcaaaacaaaattattatttatatttatttaaaaatcaataacattagttttgaagaattaattaaaatgtaaattttaaactttgcaaaaaatattggtaattatctattgaaayatatgctaagtttgactataatattacttgcttattctttggttgttttargtccctcatagctaatcttgctgctgccaattgttataaaaaggaaaaacatcttgatctggagaaaaactggatgttggtagaaaaagcaagagtttgttatatagcagtaagtacttacctaattcaaatctctagtacatatttacatgatggattatagttgttgtctgatatatattttaaaataattatcttttatttaccctgcaaattatttatctctctcaaagcatatgttagattcactattgtgaaaatagaacagaaatcattatctttctatgggyaacataatttgtattatttatcttcaggtctacctatttttggatacattatgcataggtgcttgccaaccaagcgcagaattctatattaaatcagtttccaaatatattttaaaataattctacaaacttacatcttacatttgtaggcaacttgcattgtgcagaaaaatattagtagtataaatattcactgcaaatagtttgagctgaattgcttaaaaaacttaattgctatttattccatagtaattaccatgacacctcttaatttaatatttcagaaacattgatcgtgacaaatctcttaaatctgggaacaagggcagggtgtaatttgaattattaagtcttctgacacaaaaataattggttaagaatttatttctaaaataggatggtactaaaaattctgaattaatcaccccatgattaccttgtttttatttaatatgtgttaaatgtggctttacacaaataagtagatacctatgaaaaaagcatctcgtatgcatgtaatatatggttttggtataacagctgctgccatttcattacctgagctctgtgaaatagctggtaagatgtgtaaaaaattgattacccyactaggaggaacatgtttattgaaaatataattatttctttcagtctaatgttaatgtctcctacagcatgtttgtgtgcactgttctaggctttacaacattgttattgattcctctgtataccaaatcctatccctttataactgtcaaataaatgcttacattgagaagattatataatggaaagttatgctatcttttctgccagtatgtgagaaaaacatttcaagaattaaatattttacccctttattatttccatttcattttatttctcaaattggtctcatgttctttccatttttcaaatcttgatactgtatttcttgtagtgtgattctttagaggggatttatgtactatttcaaaccatcttacacttgaaagtctgattttcaaaaagcaccatgtttagaatttggcataatttatatatacttgttgactatgaaataagacagtgtattctgatgaaaaagtatatttaacttgacaattacagtcttctatgtttcaatatatagttgttcaatccygaattgtgagccaacttgcaaacaactcatagttgtaatgattatacagtataacatgtctagccaactttgggtgaatggaacttttatgaaagtgtagattcaacttgcagacaactcatagttttagcatttatgcactrtattgtatctagccatatttgggtgaatggagttttayagtagtattaaatatttatacttacgtgcaattttgtacagcataaagtgatcagcttttggtgaaattaataaggcaaatgatattatttttgagatttgggtggtgtattcagccagaagaaataacaaaatggatttcagttgttatctgtgatacaagtgttagcttgtagcttctgtttcagcagtttcataaaaagaatgatctcttacattgccaggtaaatctgtactcttctcctagcttggcttattccaaaatagttctgaaaatagtagactcatattggatacctgggacgctgtatattcttagtgaacattcaacaaatatttacttggtgaataactaagagcataattcgtatttattgaaatctgtaaacttccttttgaaatacaatgttatttccacaaagacactgcaggttttgcaaatctgtaattccctttgatttcagarcattccgaaatgatgtgtagtctagtctagttttttcttagcatatggtcaaaccataaattaagtgggctgccccatactttctggttctatgaggtcaacagtctcattacattatcatcataaactaatgaggtttaagaaattaaagttctgggggctctttaattctaaaatgtttttgatctaaggaagcaacgcagtttatctattcaacaaatatccgtaactaaaacatctgtctgcatcacataagctaaaccagatctacatactcagctctgcttcttcacactattctccaaactagcagtgtttcatgaatattaagaaaattccaaaccttcttcttcattttcttcaccatataatttactgagtaagttcacactggaaaccttcctgactgaaaagctaaaattgaatatggatacaccagcatcctcttttggtttaaatacagtgccaagatcttttaaaatttattttttacctttcataataaatgtctcattttatgccacgtaaactcagtttttccatgtttaaaccagcttctcagattctttgttagcaggtaattagggactactggctatggtgactaggtaattatgtttttgaaaacataagtctcaggttctcttcaccttagaatcagattgggatatatctgttttttctcacttaagaaataatatttcctggcatagtggtttatgcctgtagtcccagtgctttgggaggccaaagccagtggattgcttttggtcaggagatcgagtccagcttgggcaacaagtaggtctctaaggacttgctttatgaatctgggtgctcctgtattgggtgctttatgaatctgggtgctcctgtattgggtgcatatatatttaggatagttagctcttcttgttgcattgatccctttaccattatgtaatggccttctttatctcttttgatctttgttggtttaaagtctgttttatcagagactaggattgcaacccctgctttttttttttgttttccatttgcttggtagatcttcctccatccctttattttgagcctatgtgtgtctctgcatgtgagatgggtctcctgaatacagtacactgatggatcttgactctatccaatttgccagtctgtgtcttttaattggggcgtttagcccatttacatttaaggttaatattgttatgtgtgaagttgatcctgtcattatgatgttagctggttattttgctcgttagttgatgcagtttcttcctagccttgatggtctttacaatgtagcatgtttttgcagtggctggtacccgttgttctttccatgtttagtgcttccttcaggagctcttgtaaggcaggcctggtggtgacaaaatctctcagcatttgcttgtctgtaaaggattttatttctccttcacttatgaagcttagtttggctcgatatgaatttctgggttgaaaattctattctttaagaatgttgaatattggcccccactctcttttggcttgtagagtgtctgcagagagatctgctgttattctgatgggcttccctttgtgagtaacccaacctttctctctggctgcccttaacattttttccttcatttcaactttggtgaatctgacaattatgtgtcttggtgttgctcttctcgaggagtatctttgtggtgttctctgtatttcccaaatttgaatgttggcctgccttgctaggttggggacattctcctgaataatatcctgcagagtgttttccaacttggttccattctccctgtcactttcagatataccaatcagatgtagatttggtcttttcacatagtcccatatttcttggaggctttgtgcgtttctttttactctttttttttctctaaactactcttcttgcttcatttcattcatttgatcttcaatcactgataccctttcttccacttgatcgaatcagctactgaagcttgtgcatgtgtcacgtakttctcgtgccatggttttcagctccatcaggtcatttaaggtcttatccatgctgtttattctagttagcctgtcgtctaatcttttttgaaggtttttagcttctttkagatgggttcgaacatcctcctttagctcggagaagtttgttattacctatcttttgaagccttcttctctcaactcgtcaaagtcattctccatccagctgtgttctattgctggcgaggagctgtgttcctttggaggagaagagacgctctgatttttagaattgtcagcttttctcctctggtttctccccatctttgtggttttatctactttggtctttgatgatggtgacctacagatagggttttggtgtggatgtcctttctgtttgttacttttccttctaatagtcaggatcctcagctgcaggtctgttggagtttgctggaggtccactccagaccctgtttgcctggctatcaccagcagaggctgccaaatattgcagaacagcaaatgttgctgcctgatccgtcctctggaagctttgtctcagaggggcgcccagttgtatgaggtgtctgttggcccctactgggaggtatctcccagttaggttactcagggatcagggacccacttgaggaggcagtctgtccattctcagatctcaaactttgtgctgggagaaccactactctctccaaagctgtcagacagggacatttaaatctatagaagtttctattgccttttattcagctatgccctgcccccagagatggagtctacagaggcaggcaggcctccttgagctgctgtgggctctacctagttcragcttcctggccgctttgtttacctactcaagcctcagcaatggcgggcacccctcccccagcctcactgcttccctgcagttgatctgatagcggactgctgtgctagcagtgagcaaggttccatgggcatgggaccctccgagccakgcgtgggatataatctcctggtgtgccgtttgctaaggccattggaaaagcgcagtattagggtgagagtgtcctgattttccaggtaccgtctgtcatggcttcccttggctaggaaatggaattccccaaccccttgcgcttcccaggtgaagcgatgccccgccctgctttggctcacactctgtgggctgcatccactgtccgacaagccccagtgagatgaacctggtacctcagttggaaatgcagaaatcacccgtsttctgcatcactcacgctgggagctgtagaatggagctgttcctattcctttttttgttttgttttgttttgttttgagatggagtcttgctgtgtcatccaggctggagtgcagtggcacaatctctgcccactgcaacctccgcctcctgggttcacaccattctccttgccttagcctcccaagtagctgggactgcacgtgcctgccaccatgcccggctaattttttgtatttttagtagagacgrggtttcaccatgttagccaggatggtctcgatctcctgacctcatgatccacacgctttggcctcccaaagttctgggattacaggcatgagccaccacacccagcctaattgttttttttttttttaatcagctttgttaatatatgtctcacaacttacaatacatacattttacttctacatatatattataaacatcgtaaccttgctgctatttttgtttaaattgtcaaatatatattttaaaagacttaataagaaaaaattcatatttttactcaggtatttatcatttctagttctctttattccttttggttagaattagatttccatctggtatcattttccttctgcctagagggcattctttaacatctcttgtatttggatctgtcagtaataaattctttcagcttttgtatgtttgaaaacatctttatttcaccttcatttttgaaagacatttgtgccagatatatagttctagtttgacagtttttcagtacatgaaaaatgttaccccattgccatcttacttgcatagttcttgataagaaatctgacattcttttgttcttcaatgtttcacaacccccattccccaaattttgctgcttttaagatttttcatatgagaccaggtgcggtggctcacacctgtaatcccagtgctttgggaggtcaagatgggaggatggcttttgaggcatggagatcaagattagcctaggcaacatagtgagaccccatccttacaaaaaatacacacagagaaaattactcattttgatcagtttagttatgatgggccttagtgtattcttcttcatgtttcttgtgcttgggttttgtttaacttcttagagctatcggtttttagtttttattatgtttggaatatttgcagccattatacatcttcaaattggttttctgacccttttatgccacttgaagttgtctcatagctcactgacactctttttttattttgtytctttctctatgttttattttggatacctcctttgctgtgccttccatttcactaatattttcttctgtaatacctgaactgttattaatctcatcaaataaataaagctaaatatttcttactactgggggaagacttttcttagtactccatggcacagagcactaaggggtccctaatctctggtactgcaactatatcagttcctgttaggaaccaggccacacagcaggaggtgagtagcaggccaccaagcattaccacctgagctccacctcctgtcacatcagcggaggattctttttttttttttttcaaatgtgaaaaatctaattttattcagtttagattaatgtatagctatacactctggactcttaatgaaacctttcccattctttttttttagattttattattatactttaagttttagggtacacgtgcacaacatgcaggtttgttacatatgtatacatgtgccatgttggtgtgctgcacccagcagaggattcttataggggtgcaaatcctattttgaactgcacaagcgagggatctaggttgtatacgtcttatgagaatctaactaatgcctgatgatctgaggtgcaacagtttcatcctgaaaccacgcctcctacccgtccgtggaaaaattgtcttccacaaaactagtccctggtgccaaaaacgttggagactttgatgaaaaaaatgatgagtttttctgctctaggtctttgaaacagccactatttccaaatgtgtatgtgcctcaggtactgttccttctatttttttttcctcttaatacttttggatgtttctttcccaggtactgascttaagaaaagaccctctacagaattccaggtttctctgtaaatctttctgttctctgatattgtggtctttcaactcttaactgctctgaaattcccagactctcagttgtatttcctcaactcactggmatctactacagttctccttataccatattctggaaactcttgcaataaactgctgtagtcatatggctgacctccattgtttcccatctctcagagatacgtattttttattcttgatgtccagtgtattaaaaaccattgtttctagttttgctattgttgtttcatgatagggagtaaatctagtttctgttcctctactgtcttctgctttgcattgtttttgaaaggaagcctgctgccattcctatcattgttccctcttacctaatatgtcttttaacctcctttatctgcttttaagatgtttatcactgattttaaacaattttattatgatgtaccttggcatagttttatattttgtgtggttggggttttttatagtttcattcactttggaaattatttwacaataaattttctctttccacctccatctacctttgggactccgattaaaataataataataakaakaakaataataagaagaagaagaagaagaagaagaagaagccacttgtagttgacccatgtctcagtgattctgttttcaatatttttgtttttctatctgttcttcattttgaataattactctctcccctattttgtcttttcttttttatttttatttttatttttattttttgagatggagtcttgctctgtcacccaggctggagtgcagtggtgcaatcttggctcactgcaacccccgcctcctgggttcaagtgattctcctgcctcagcctcctgagtagctgggactacaggcacacctcaccacacccggctgatttttgtatttttagtagaggtgggttttcaccatattgtttcggctggtcctgaactcctgacctcatgatctgcttgcctcggcctcccaaagtgctgggattacaggcgtgggccactgtgcctggcctctttcttttttttttttttttcagacaagttctcgttccgtcgcccaagctggagtgcagtggcacaatattgggtcaatgcaacccccacctcagcctcccaagtaactggaactgcaggagtgcaccaccatgcctggctagtttttgtattttctctagagacaggttttgctgtgttgctcaggctggtctcaaactcctgaactcaacttatctgcctgtctcgacctcccaaattgctgggattgcaggcatgagccgccatgtccagcattgaataatttctattactctgaagtttactaattatttcatctacaatgtttaatctgccattaatctcatccagttgacattttatctctgacattatagttttcatctcttgaactttgatttggacctcttttactcatgccatatctctacatagtatgcttatgttgtcatgtgctttyggaatgttgttataacaattgttttaatattcatgtctactaattctgtcacttttttttaatctgattaccttggtattggtttttcctgattacctgggtattcattgtttcctcatacatgtgtactgaagactccaaaggaatcccttgcatatctcgagttctcactttccacctctttcttctccaagcagctctgtcctctccagtactctgccccagcatgtggtagccagcttggcctccctgaatggaaactacttgactctatttaggttcttccttcccgctctgcagcctgggaactctattcaaggtgtaagtttgagtaattgtagcgcttaccttattctgccccttctttgattattatccaatgcctgaaaattgtgttttcatgtattttgttcattgttagttgtttaagatgggaatataaatctgctccctggtccttcatagtggctggaagtgcaaatctctaggttgattttggtttttccctttttcaggtaactcgctttttttttcaagaatgcctaatttttttatttgaatttgagtctcagtctgttgcccaggctggagtgcagtgacacaatctcggctcactgcaacctccatctcctgggtttgaacgattctcctgcgtcagtctacccagtagctgggattataggcacctaccaccatgcctggctgagttttgtattttttttttttttttttagttgagatgaggtttcaccattttggctaggctggtcttgaactcctgacctcaagtgatccacccgccttggactcccaatgtgctggtattacaggcatgagccactgcccccagcctgaatttgaatttgataataactatgatttatctctatgcgaattctgtattgagttttcctcgaacaatgtattcattttaaactgtagatttcattcccagttaactttcttgtccccaaatattgtttctcctttacttgacctattggagtgtcagaaaatgatcataaccatcactgataaatgtgttatggggaatattagagtaaaagcagaaattccaagttgtggtgagaaagtacagtagamccttgaacaatgtgagggttctgggcactgaccccttcgaaaatccacatacaatgtttacctcctcaaaaacttaactactaatagtagttaattggaagccttactgataacgtaaatagttgattaacacgtattttgtatatgtattatattctgtattcttacaataaattaagctaaagaaaaaatgctataatatcatatggaatgaaaatatattattattcattaagtggaaatggatcatcataaaggtctttatcttagtcatcttcatgttgagtgggctgaggaggggaagaagaggaggagtggttggccttcatgtctcagaggttggcagaggcagaagaaaatctatgtataggttgacctgcacagttcaaattcatattgttatagtatcagttgtaatcttaaattcatcttcaggttgatttagtgtcaaaattccctcaaatattattctagattctataaaatgttctagataccattttatcgcttaaaaataaatgtgaaagctctcagctaagatatagttgttcatctatgtgtaattactagttttgtaattttttgtaatttcttagtcacctctgcatagtgtttggattacattgtgagtacagtaggattttgtttagaaatctatgcgttatttcaaataacatctctttatgataggaaaaaaggttccaagtttgaaataacactgtgaagaactaatcaccatgcaagtttaggcttattatggggaaatttttaaactttaggtattaaaaagatttttaagaaatagattttaacaaactttcagtaccttgtgacttaccctgcgtaaacaaggtcagccaaatttgtaccctgtttcatggattagaaattaaacactataagtgaaagaataataagtcatatcttgtcaataattttgtgagagtatgagacttgtggtgagttttcctttagcactcatgcctattttcttttttaaattattttttcagttcctatgtcttattacaggtcttctcttttcctctcttcatttatttataactctgtcttgaccacttatatctgttttcggtctagaattttactactttggagaatgtggtttttgtgagggtagagttttcaaatgtcactaatgtttgcttctggaataagggaagtatgattataggtcagtagaagaaacatggtatgaagaaatgtacagccttggtggtaagcaatagaattcatacttacaaagaaacagaagtatatgtatattaaaggcaagtaagaatcactaccaaatgtttacattttacatctcctgctttgtttgccctataggtttttcatacctatgccatgagtaacaatttttcttagtaaaactttcatttataytcagttacaattaaatatctttatcagtaatctaaaagcaataaagcccttaaaatgaggtagtgtgataaattataagaaatctcatctaagaaatcatatgtttgaaattttacstgtcagtaatgtggtttgtgtccattgaattaacaagttagaatgaatttataattaaataaataatttctatttttttaggatttggttatcttttggcagtatttaccaaaagacatggttacactaaaacgtgactagaaatttaaaaagattgctcaaaatttcatgctcagaatttagaacgtgccatctagtattctttgctctgtcatgaaaagatttgagaaagtttcagtgaaagtgaattaagttgttttgtaatggtaacctaatggaaattgaagtaatttttttttaaaaaaggtaagtattatttaggccaggcacagtggctcaagcctgaaattccagcccttcgggaggctgaagtgggtggatcacctaagatcaagagtttgagaccagcctggccaaaatttttggtagagaccagaccatctctactaaaaatacaaaaattagccaatcatggtggtgcattccttagtcccagctgctggggaggctgaggtaggagaatcgctcaaacccaggaggcagaggttgcggtgagccaagatcgcgccactacactccagcctggctgacagagtgagactctgtctgaaaacaaacaaacaaacaaacaaaaacttacttaaagtgatagctttaaaccttattcgaccatggaacaagcctttgtaacataatctatactgttacaataagtacactttggcagagtaagtgaactaatgatttttttttataatttaagctagtctgtgaatgacagttgattaaataatgtcacagctctttatatatagcattaaatagagttcaaagtatttttggaatttattaatttataatattcttctgtgattattaaagaggtgggatagctaaactttttctcaccttttatcattgttccaagtgcagttttgaactcgtatgtgttagaactcccattatattggtcaaatcgatgatcaccatatgactttattcctgcatttttgcctcaaatttttaactatcctattctggactgcttcattaacttcattagggattaactatgaatgtttaagcctttattttacaatgtccttgcaggtgtccttaactgtttcatttataaacacagagaataaaatgaaaaaaaaatctgtagagttgtttgttctatttggagcttttcatgttggtgtaaaattcctgacacttaacacatatgaatctttttcattcatgtttaataattttatttgagagtcacttcaagtaaagcccaaactgtgttaacatttgagttaagcaaagacatctttgcttaacaataaagcaaatatcacaataaagcaagtcacatgaatattttggtttctgaattcatataaaagttatgtttacactatatggtactctcaagtgtgtggtagcattacatctttaaaaataaacatactttaattaaaaatactttgttgctaaaaaatgctagtgatcatctgagcctttagcgagtaataatctttttgctgttggagggtcttgcaccagtgttgatggctgctgactgctcagagtggtggcttctgaaggttggggtagctgtgacgatttcttaaaataagacarcaatkaagtttgccacatcaattgactcttctttcataaaagatttctctgtagcatacaatgttgtttgatagcatttacctacagtagaacttctttgaaattggagtcagccctctctaactctgttgttgctttaacagttatgtttatgcagtattctgaatttttcgttgtcatttcaacagcattcatagcgtgttcaccaggagtagattccatgtcaagaaaccactctctgtgttcatctataagaagcaatttctcatccattcaagttttatcatgtgattgcagcaattcagtcctatcttcaggcttcacttctaatactagttctcttgctatttccatcacatgtgcattgacttcttccactgaagtcttgaagccctcaaagtcatccatgagggttggaatccacttattccaaactcctattaatgttaatattttgaccacctcacatgaatcgtgaatgttcttttttttttaaacagggttttactcctgtcactcaggcagggaagtgcagtaacaatcactgcacattgcagtctcaatctcccaggcaagctcaagcaatcctcccacctcatcatttattttatttttgtagagacgaggtctcaccatattggccaggctggtctcgaactgctgggcttaagtgatcctcccactgcggcctcccaaagcrctgggattgcaggtgtgagccaccatgcccagcccatgaatgttcttaatgacaactggaatgatgaattattttcaggaggttttcaatttactctgcccaaacccatcagatgagtcactatggcagctatagccttatgaaatatattacttaaataagatttgaaagtcaaaattactcattgatccatgggctgcagaatgaatgttgttttagcagccgtgaaaacaacattcatcttcttatacgtctccatcagagcccttgggttaccagatgcattgttaatgagcagtaatattttaaagggaatctttttttctgagcagtagatctcaacagtgggcttaaaatattcagtataccagctgggcacagtggcttatgcctgtaatcccagcactttaggaggccaaggcgggaggatcacctgaggtcaggaattcgagaccagcctggtcgacatggtgaaaccacatctctactaataatacaaaaatgagctgggcatggtggtgcacacctgtaatcccagctactcaggaggctgaagcaggagaattgcttgaaccctggaggcggaggttgcggtgagccaagattgcgccattgcactccagcctgggtgacaagagtgaaactgtccccaaaaaaaaaaaaattcagcataccatactcaaacaggtatgtgttcatccaggctttgttatttcatttatagaacacaggcagagcagatttaacataactcttaagggctctaggatttttagaatggtaaatgagcattgacttcaactgaaagtcaccagctgcattagcccctaaaaaaaaaagagtcgtcctatcctttgaagcttcgaagccaagcatttacttctttttagctgtaaaagtcttcaatagcatcttctgccagtagaagactcttttgtctatgttgaaaacctgttgttcagtgcagccaccttcatcaatgatgttggcaagatctgggtaactcttcagcacctgctattttaccttgcacttttatgatatggagattgcttctttctttcaacctcacaaattagcctctcttagcttcagacttttcttgcacagcatcctcacctctcagctttaacagaattgaaaagagttaaggttgtgctcgggattaagctttgacctaagagaatgctatgctggtttgatgttctatacagaccagtaaaactttctccatgtcagcaataagcttatttcactctcttattcatgcgttcactggagtagcacttttaattttcttcaagaactttttctttgcattgagaacttgcctgtttgttgtgagaggtcaaactttcagcctgtctcacctttcgatatgccttcctcactaaactcaatcatttctagcttttgacttaaagtgagagacatgcaactcctcctttcacttgaacacttagagaccactgtaggattattaattggcctaatgtcactattgttgtgtctcaagaaatagggaggccttaggagaggtagagagatggggtaatggccagctggtagagcagtgaaaacacagcatttatcagttaagttcaccatcttctatgggtgtggtttgtggcatcccaaaacaattacaataataatatcatagatcagtgatcactataaaagatataaaagtttgaaatattgaaagaattaccaaaatatgacagagatccaagcgagcacattctgttggaaaataatgacaccatactcaaggcaggcttgccataaaccttcgatttgtaaaaaaaaataataaaaaggtatctgtgaagtgcaataaaataaggtatgcttataccaaaacagacttaattatgctatttcttaccattagtgttagagttcagtttctaatgtttttcattttccatatgttattgatgttcagtgagttacacaaattatttactgttgttacttccaccttagtagggagaatctttgatttttgctggataaattttcaaacaagagtgtgattataggctggacgtggtggctcacgcctgtaatcccagcattttgggaggccgaggtgggcagatcacttgaggtcaggagttggagaccagcctggccaacatggtgaaaccccctctctactaaaaatacaaaaattagccgggcgtggtggcgcatgcctgtaatcccagcacttgagaagctgaggcaggagaatggcttgaacctgggaggcagaggttgcactcctgcctaggtgacagagtgagactccatctcaaaaaaaaagaaaagaaagaaaagtgtgattacagagatcctatttgtgtttatttttaatttctctagaatttgttttcttcaataaataaaattctaataccagttttttttgagtaacactgtgatttttatacagaaagactttctccaaattggagaatgtactcttttattcctgtaatttttcttaactcttatttttggcagctaccaaaagtaaaactctctaccaagacagagaagaaatctttgggaatattaagtaatgttatttttcattacacggactaacctttttactaagaagaattgggatagtattggttatgggagcttaggagccctaaagataaagattggaagattttgtgttgtggacttgtggcactgtaacaaagtctgggaattttatgtgagattggaaaccacactatgtgctaattgcctcagaatggtaagaaaataagcatatgtatagcatttagttgttaagacagtaggcacttatgcagagccccaaatgaattaacaaatcatctactgaaatattttcacttctgtttactttatgtattttagaccaatcagcagttgcttgagaaaatgaaatgtttactaaatctctttaataaacatgtttaagagaggaaaaacttataaacattcagatggcagtgtacatttttaagtgctagttgtcatatctttgaaattgtatgtaaactggacataaacaatcaagtgtctacagaatggtatctgtcttccaatatatttactgaagatattatagaatctttatagtttaatatgatttaccccacatgttctgttgttgctatcttttcagataaagttgaatttaatctttcttatcagcttttattgaggtatttatgaaccattgagttcacccacttaaaaaatatcattcagtggctgttagtgtatttacagagttctgctaccatcactgtaatctaatgttagaacattcacatcaccacagaaggaaatgttatacccatcagtagtaatgctccataccccctggatttaatcttatatccacatctctcataatagtttcagtggtatctagttattatgactacaaatgatgcaattgttcctgattacacaaataatgtatttatgtctttattgttggcatgtaatggaagacataataagtctgctttgatctcttgctcttacctatttctctattgcaagtgttataaagagtcttttaagcttttgctcatatatataaatatatatatacatacatttatatatacacacacatacatatatacacacacacacacacacacacacacacacacatatatgtaatgctaccgtgtttgagggtcatgagggtcagttttttgaaataccagtttttttctgatttaggtggatgacatggtacgtgaagcttaaaaaaaaatttggtaaattggtatgaaaaaatgagaggacaacgtttttcctttctggtacttagcaggaaggcaagttcttgtatgaacccatatttcctgttacccattttcagaccaataktggtttctcatctatataatagggatcttttgactctaacctcttaaatctatcatgtgttttctttcttcaccttggaaatagcttcttgaagccccagacttctagagcacattcatattaactaacattgtcctggtttactagttagggatattagtaaatcctaaatagttgaagacgttctgaaagatatattgctgctttttaaaaatttatttatcttgttctctatayggatttctggcacaaggttggtttttgtttttgtttttgtttctgtttttttttttgtcaattgtggtaagtccatggatgcttttctctataactttcccattttcccttatcacaccgtcactgcaaacatctaatttctgtccagtctctcaactcttttcagctctgctgtcctaactaatcattttttgtattcatctttcaaagtatttgtttctgtcttcattctataagtaacaagattatttaaggttattttgtattacagaaatagtaaaaatcaaataaaatatcaaatgtagaatagtccaccaaaaatattttatttcatcttttccagagaggtacacatataataaagtaaatgagcattatatattttattattaatcctcaataatatatttttcacaggtatgttgcttcttgtaagtttaccttttttaatgtgaaaactacaataaactaaattaaattttaaaaatattttacttactaaagtcaactgatgttttcctggtagattgataggcttcttgtggtagcttttaatcatttgcaagttttgagcccatttctaaaacttttctcattgtaaatatgtatttcctttcttatattaactgagaatttgtttttataaaaataaagtggggaatcagactcaaggtgaaatgttgtagacttagtgccagcaataagcagaattatttaaaatcattcaaatatctttaattcccttgttgtctttttcaaaaactgtacattttaactacattaatataacggaagactttttaaggcttagttttcctttatagatattccctaatttcatttttatttcagtctgtcagggttgtgaatgtgatgttttaaggtacactgtagtgttttcacatcctcagatgaactgaattgggacaatactttgtaggaagttttttaatatagtatgtagacacattggtaaaaatcagtatgtccrctggcttattagtttcacagatgcttccataattcttagtgtactcttgggtattttaaattatcatttcctgacagcaatcctgaaacatgccagtcttttaaagccttatttctgagaactaaagcaaggcatcagcgaaccatatctgacatgccatgttaatttccataactatcatttctgggaggtggtaggatttctaaggcatggagaatctcagtaaatctactttaaaaaaaaaaaaagcaaaatatctgttttattactgggtttccattcacgagccctgactgcttcattcccacttaaataatttcaaaaatagtgataagcatattttttctcttatagattattaaatatttactcacgtgcacaatatatcaaaacatattttgaattctatattcttagtgttgggtgttcatgttgtgaatgaaaacctcattctgttatctcatagcatatttatatatacaaataatttttgccttaagtaggaaagaaacagctaaaagatacataggttattttgctttttaaaattttagcaaactattctgtgaatcttttgtgtgtttggggctgtttgtagaggaaaatttcatcaagcaacattttgggaacattggccttttgtactctttcctaaataaacagaaacttgtactccccaaaataaaatgtttctttgtatattgttacctgcaagttattgataatggaaggaacaccttttcaatccttagtcccctttcccccaacacagcttttagattgtcgataaacttcccagctcagtaattaactgagctcagtcattgcaccctgtatcatgtgatttttttttccagtggaatacattattagagcacttacacagccagtctagctgcagcagcccaggcggcaacagcagtgccatttttcacaaagaaaatgttgaacaggagccaaatgtttggtggcagtctgttgctaggaaatcaaggtcctgaggcgattaatgacaaagcaagcaataacaagaaggcagaattacagatttaaaagagaaaaaagtggttggtgttataattacccaaagaaatccgcactcattaaattggctgtttttatgattgactttaattggaggttagctcagatatttagctcctttcccacccctttaaacacacacaggcacataatctgtagaactgcagacttgtttttctaagcattgagaggagcttgccctgtaatttgatccccactgacagatgcattttctatgctgccattttgaattaacctattgtagaacaattttcttcagccctgttgaataaaacatccagtctgattacctccgatggatttgatagagtaaaagaatgtacttctcattgaagtagattgtttgcatggactctactgattgtgaactctgccagtaagcacaatcatttgtaataaattttcaaagaaatttgtgaggaaaaggtaatgagagtcacccttttatagtttaatgtttggcacctccatcaaaataatataattcttataagacagtgttatttttccagtaagcttttcacgtggttttagaaaaaatttctgaatcttcatttggactattcatatatttaggaatagagtcttgtatttacactctaaaatgaccattcttcctccccaacaacagtattttagtgcaagactcaatatgcaaagcactctattgcaaaaatakttttggtatgtacaatatttaaagtgattttaagattggcctatttcagtctttgaagtatttcccccccccaaaaatcccttatttaaattttttagggtgtgataaagcatattactagaaaagcatcaatcggtctttcaggtacaataccagaggaaccatcacagtttatttacctttcagaagctttaaaaataaagttacatgatgcctctgctctccagatttctaatcaaaccctggaacaaaagagccaagcacattctatctgacaatgcacacactgctaatcagatgccaatgccaagctgtctgctttgttaaatacttagcttcctagaggcaggaagacagctgctataagtatgatgaaattttgtagttcaatctatttttgctacccttgggctaccaagatactgttaatttagaccaccccaattggtacattttagggagttttttaaagagtttgtaattaaaatgataaaacatcgttattacattgaagaccttctgtaagttttacatttggcagatacctactgagataaccccagcatgtaatttacaatgatgtaatggttgtaattgcattttagaaaaaaagaactataggaggcaagtgcttccattagaagagtttttaaatctgcttctgtttcatttaaatctacttctatccccaaattacttacttataattgactagagcagctataaaccttaagatgctatctgaatatttttaaaaagttatcaccccagacactgccaccagggggaggaagctaaaatcttaaagttcttaactgatgatgatactgccagtaggtagattatattgcttagccctacatagttaactacttcctccagataataccgccttttgggacatgattctcacaacctgtaatatgtgatacctgtagacttagcacactattaattgtaaataaaatggaaactttcgtactctggtggttggggtcaggaaggggaaagaggaagtacaaataagcaacctggacatttttattgtttttctcttatctgttagtctacttgaagagctatccttgaaagtgagtgctttagatctatgaaactgggcagctatcatagcacatctattaagatctaataatcacataattaatgtagcaaaatgaatagactgtaaggtagttttctattttttgttactacactgtggttttgtttttaataaatagttttggctttattttaaacaattaaaaattcaaaatatttttatgaccaaagcttgtaggttctatccctggaaaayattttataaatgcagaaaatagttgcttaggattggaatccaactctgtttaccatgaacaacttaaaagttgatctcataatcttgcatgttgtggaataataccacgaaaaagttaattaaagaatttagatgtttgttctcctgtctagaactcaataacttttaagtagtaactctccctacagtttaactgttaaacagtaactcttctgacagttttaggttttattctgtgaagactcatgatttttaatttttgcatcttaatttttcagttatttcaggtattgaaattacaaacgacgggaaagaaaagtggttgactaaaaaggggatacaaaaggcaatttttagggcgatgtactgttctgtatggtactgtggtggtggatacatgatactatgcatttgttaaagcccaaagaactgtacatcacaaagggttaattttaatgtatgcaggttttttaaatgttagggatttcaggatagaatgcaagctgtaacaaatgaatctaattgtattacaaatgtatggcataacttcactgaatgggtgggggaaaaggagctgacctaagtaactttggaaaatggtgttttgattggacaatgtaaagctaaagactaaggaacactatagaaacactctattctagttggtaaatttgtttctcataacggtatgggtkaacagttctgaacctctttacatgtatcctggggttgaacaaataagtaaatggatgatgaatggtggaagctaggtttctcactgtcaggaagggatgttacagataaataaacaagaggggagagccagaatgaaacctgtggtactggattagagttggagatataagtatttactcatgtttagcttaatatatgcagatggatagatgcagaaataattatagatgcatgtgtatatgtggattagtatacatgcatatgtttcctagctgtgtttactgagaaggcctagaagcagtgatatcccagtagccacaaacacatctaacgctcacatcctggtttgtaaatcctattctccaataaaaggatccaggactccttttaaatatgactgattctggggctggtgatgggaaaatacaacataagcatggaatatcttgtagtgccagaaggcaagagatttcttaaaaataataaagattaagcatgccaaaagggacacatgagccaatgtgaaagaactccgagtggccgtagctggaataattagagcaacaaaataaaacatgtagcattggattaaggataaattattgagtaaatatacatgagttcacagtgttatgtataaattgtataaataagtaaatggaggagaagagataaatctccctgacagaagaattccaaataacatattgccccctccagaagggggatcctacttcccttctccttgagagtatgagctggattgagtgagtcatatccaaaaattgagtttggaagacagcgaaatactgacttgactatttccattggagaaagctggtaaacaactatgttaactaagtgatcaaggttaacatcacaaatgggaagtcatgctgatgtgaagaggtggaaacttcatctctctgatattctttccctaaacctgtagcctcaatctaatcattaggaaaacatcagacaaatcccaactgatggacattctaccacataagttgagcattcctgaaaactgtcaaggttgtgaacaatgaagaaagactatgaacatctcactgacaagaagagactacagagtcatgacaactaaatgttacatagtttcctggatcaggtccagaatagaaataggatattagtgtaaaaactggtgaaatctaaataaagtcttgactttagtcaataatccaccaacattggtttcttggtttggmcaaatgtaccacagtaatgtaagatgctaagatagtgacattagaacaaattggatgaggggtacataggaagtctgtatattaaacttgcaatttttctgtatatctaagttcccaaatataaaataaatttatttgaggttgatcaatgggctgactatattgacaagatactgataggttacatgttgaagaaaacatacaatataaaatagagaaaaagtcagttccatcccttcccactccccctttacctacctgctccccagtactcatcattgtgatttagtcagaacagggtttagtgccagaggtcagggtgactgagggtggaggagttgtgagcaatgggttcatggctgtcacaataatgctgtggcaattctatggtttcccagctgggagttaggagtggggagggggctgcagcctgatgacagccagctgaaggaagagctacctctcccttccctagctgctcatcacctgaacccaagaccacgccaaacaagatatggatgtagatgctcttgctgagtctgttccgcaagagggaaagaaagggtagctgctccaaacacgccgtcctcatatacaagggtgaggggaacagaagcatgtggctgctaccagcaaaggaaaagtaggagagcaatagaaaggggaggaaatgggaagagcagaaaatcaatattatttaaaaagtgacctaagacttaaaattgaattagtatttgtacagaaagatgcaggtggaataactcactctggcctgtgatcaaaattatatggagaaatcatggtgggccccttcctctgtccccagtggtggcaccagttgctgagtgtgattagttagaatggattccagtctagtcgttcaggcagaggaagtagttgcagtgggcaggcaagaggggctcagttgctgcagcactggctcttgctggctgggtggttcttctggaggtccgtacctcagttttggcctggagcaccaggtgcactctggggcttattaggaatcttcttagctctcgccgtgtaaacttcattcacgttcattgcagtctttactgatgtctccatagtcaactgtcgtcgtctgcatagtcctgtgcttcgtggaattctggggctttcttgctggccaggtctgccttgttacccacaagtacagtgacaatgttggggctggcctgcctctctagctccttcacccatttcttggctggtgcaaatgtatcttttttggtgatttcatagtacatgggggctgggctatgataccgctcctgtccagcgctgccccagatctcaaacttgactattgtgtcgtctaarcagacagtctgtgtaaggaaggctgctctgattatgctctcctggtactcttgaaattgtcccttgacaaagtggaggacaaggctggatttggccaccatagactcattgttcccagtggctggtccacyaggtcgtgtgctgtgccttgccgacccgccactacccgtccagctgttgtgataccagagagcatggggacgggagccattgctatgcaaagaggcacttagttgggaagggggtctccaaaatgacgcaagggcagtagtattacttggggctggggctcacacaggctccgcttctctccccccacccctggtggtatctccatataaaaattttacttaaacgcagagaccatatatgtacttaaacacttgtctaaagaaataaaatatggccgggcatggtggctcatgcctgtaatcccagcacagaggccgaggcaggaggatcacctgaggtcaggagttcatgaccagcctgaccaacatggagaaaccctgcctctactaaaaatacaaaattagccgggcatggcagcacatgcctgtaatcccagctactcaggaggctgaggcaggagaattgcttgaacctgggaggtggaggttgcggtgagccaagatccccgccactgcactccagcctgggcaacaagagcaaaactccgtctcaaaaaaaaaaaaaaaaaaaaaaaaaaaaaaaaattcccctgcctctctccaccccagagggtaaccattatcctaaattttattattattattcacatgcttttctttataggatagccatacatgtatcactaactgttctaccatatctcataacctcttatatagtttcccttttttgtcatatttgctgtgttctggataatttcttcagatctatcttccgatattggtaattgtatcttcagcagtgtctcatattctgttttacctgacattgaattttatgtaataatcattacttccattttcatttcttcccctgaaatcagtttactttatcattttgataaactcatttcattctcatatatacaatcctcttgtttatttaaatatattaaacttattttctattttgtgcctagcctaatatttaaagcttatgcagttctgattttgctgtctgttgtttctgctggctgttactcaaactgccttattttcctgtgtgttagcttgtattcattatttgtggtgatttctgagactgagatgaagatacgtttccaaagagagtatttacatttgaatctgccaaaagcctggggatactgtcaacctgggaacacattcaaataaatgttgggcttaaagttttgtgggctgcataggtaacatgagttccagatccataaaccttcatgagggtgggcttgtggttaaattttcagggaagatgtatttacctgcacccagcatcaagtttgaaagaggttaatttccttgtttattccttctgtagggtagacatcattctattcaactcttacactaaacatgtatgtagctctttaggatcccaactttatgtggagagtctaattagacttcgtatcgttaatgtaccctagaatttatcccctaaaccttgggttcagtagtgtcctggtaaatattttaaagctggctgtccagggcaaaaaaaaaaaaatcctaatttctcacatttttctatttcacactatggctgatttcacgataccagcctgaagtcattgaacgtggagttgggaaaagatatgtacagttagctttctcaactccagtgtatcactgccagttctgtacatggctgtgaaaactgaagctcaatgcacagggcttggcatatccctcagaatgaaagaatctgagtgtttgcctacccctctggatttccatttttactttgttttaaccttttgagtattctgtgtcaactcagcaatatacttcaaaaaaagattcttttgttttctttttattttaacccagcatttgttgttgtttttagcaaaagtcctgtgttagggtacctatttagtcagaaatagaagtctctgtgcttgtttgtaagtataatgtattatttttctttttggggaaatatagaaagaaatagaagtctctgttcttgtttgtaaatttaatgtatttttcttttttgagaaatagagaaaagtacagagaatattaaaacacccataatcctatcatatatgttcattttatgtgcatgtatgtctctatacatttttatataatttgcattatatctactatttcagtatatgatttttgttaatatataatgaatgtttgctcatgccgttaactattcctttaaaacagcccccattatatatgagactaaacataaaatgctgcacacataggagttagtataattcagaaatttagtctgtattgcatttggaaataattttgtgaaggttattcatgcagcattattaataattgcaaaatattggaaaccatataaatgaccagttctagaagattggttgaatatactctggaacatacaatagactactatgtttataaaagctatctgtttttataaatatatggagtaatttccaggaaatattacatgaaacaaaaagcagaaacaaatacccatagtgctacttgtcatacaagaaaaagggagaattaaagaatgtgtatgttcaggaaggataaagcagaaaacagtaaaattagttacaagaggtagaagggagagtgaggtggaagggatgtgggagggagtgagacttggatattggggtatactttcttggcatagtttcaacttttgaaagcatgttaatgtccaacatattcaaacagttaaataaaaatgatatcactgggacagggacctaaaattgtaaacaaacaagtgaacttaattcatttttttttcttatttttttattattatactttaagttctgggatacatgtgcagaatgtacaggtttgttacataggtatacatgtgccatggtggtttgctgcacccatcaactatcacctacattaggtatttcacctaatgctatccckcccctaaccccccaagcctcaacaggcccctgtgtgttatgttcccttccgtgtgtccatgtgttctcattgataaagttaattttaaagtaaaatgaatactatatccataccgaaaggggataaagaagaaagaaatgaaggaagaagggaggacaratttatgaacaccagattcaactatatgtccttagcttggggtgggtgggagagaaatgaagaattgcaaacaaatcctgaactcacttttgtaggtttattttattttattttatttttttgaggtggagtctggctctgtcgcccaggttggagtgcagtggcgtgatctccgctcactgcaagctcgacctcctgggttcacgccattctcctgcctcagcttcccgagtagctgggactataggtgcccaccaccacgcctggctaattttttgtatttttagtagagacggggtttcaccgtgttagccaggatggtctcgatctcttgaccttgtgatccacctgccttggcttcccaaagtgctgggattacaggtgtgagccaccgtgcccggcctataggtttattttaatggtatgggcaaactaaatcagagactattttgagcaaatgagtgagcctggkttctcactatggaagaagggacaaacatatagacaggaggaagacaggtaagaattctgtgtagaggaattggattggaggtgtctgtgtacatatggacatttctgtgtgtgtatgtatctgttgatgtgtgtgcatgtatttttgtatatgtatatgtakgtgtgtgtgtgtgtgtgtgtgtgtgtgtgaagagacattcatatatttcttagctctattgctgaaagagcaaaggagcgaagtcacaatagtagtgacacacctagcgttatttcccactgttagtttcctaaggctgctgtaataaattaccgtaaacttaacagaaagttattctttcatagttcaggcggccagagctccaaaccgaaggtgtttgtggggttggttccttcttggggaggcagagggagaacctatccatacctctctcctagcttctggtggttgtgcataatccttggagcttgatggtttgtgacattataacttcaattcctgccttcattgtcatatgacattcaccctatgtttacctgtccaaattttactctttttatcagagtaatccactcattagggccgactctaattcactgtgactttatcttaacttccaaagaccccgtttctaaataagctcacattcacagggttagtacctgattatgactttttgaggagcacagttcagtccctaatgcctactaaaactaaagctcttcactcaaatgactggcttcagtctggggcagggtaggtacaagatgaacctagaacatgttgtaatgccaaaaagtaaggaaatgctaaaaagtaagataagttgtttgttaagtatacagaatctagcttgaagagttccccactggtcaaatctagggcaatttgagcatcaaataattaaatacagtaatgaattataagctgttggaaataaagaactttataagaccattccaatcactaatgggtggatggatagaaaatgaagatattttacttacagtggcatgctgaaagttgaccagcaaatgtggaggttgtgctagagttgggaaaaaacaaaacaaggaaacctcattttgcagtcatcatgttaaagattagatcaggcaaaaatcatcaatggttgtaacatctaagaggacagacatgttgatgaagaacagaatatttacatggtcttgaaatgttgtatgggagaagagaaaaacagcaacaatgcagtggagaaatcagacaacacattgacagggtgatcacaagtatcacctccagtgagagtcaaatgaacattgtttgcctccttatgtgtttatctgtccctgagaagtacacaacatcatctatgcagtttctggcccagaatgcatctcaactcaatcacaagagaatattatgcatacatacagaaaaagaaagaatacaactgaacatagatgataaagaaaatgaggtaaaaatgtgacaacagatgaaaatggataaaggtattttctgtgtttttatttttggaactttttgtacattgaaatgattgccaatggaaaagtttagataaattgtcctaaagttacagagaacttgcagggaaaaacatcttaaagtagactaatagtggagagtcataaaagacacttggcaaatcttcttagttgaatattattcaaactattcagtcagggaactgattttgtgctaattatgaaatgcattattgcattgactttatgtctcttacaacattaaattatgttacctaggatcaatttgagattcaacacatgatagtagtttaatacagtgaagtcataacttgcaacaaactatcccaattttaagaattaattctgagcaatttttatatgcatgaaaaagatggttagaattatttgcagacacttgcatattctttagtcaagtggtcttattaccataattcatatctgttgtgggagtagggaagaaagagatttaaaaaatatctatcagttctttcaatcaagttaggtataatattaatagactttgagctaagaaagttttcatgaccagaagaggagcaggaactgtctaacatagaaaatgtttatggtataccataatcagttatacaaatataaaaggaaaaaatgtttgactagtgatactctcaaacttggatatccagaagagtgattctgtcagtacactaaaagcaaattcatctatcaggagctttcatgttttcattcaacaaatatttatccagtgcctattatgtaccagatagtgttatactgtgaatcgggagcatatgttaaaatagacaatatagtagacattattctctaaaattattaacaatagtagctaatactcatatgatacttactctgggccacataccattctaagatctttacatatagtaattcctttacctcaaacaaccttattagattggtactattattacctctattttattgatgaagaaacagaggcacggaggtgttaactttctccaggtttcacagctaaaagtagcagacccaggattttgaatccatcagactggcttgtgtccaagctttttttaattaattttttttattttgacataatttgtagattcacatgcagttgtaatataatacagagagatctcatgtactttttactcagtttctcgaggtaacttcttacaaaactatagaaccatatcataaccatcatattgacactgatatagtcaaggctccaaatatatctgtcaccacaatgatccttcatgttgcccacccacttccctctgttcacctattgaaagacatcttggttgtttccagtttggagctattacagataaagctkctgtgaatatttgcacataagtttttgtatgaacaccaatttttggctgggcgtaatggctcacacctgtaatcccagcattttaggaggccgagatgagagaattgcttgaggccagaagttcatgaccagcctggtcaacrtagcaagaccccatctcattttataaaaataaaaaattattttttaaaaggaacatcaattttcattactttagactgcctctaagcttttaattcttacattctaccacctctcaatatatagtagggaataaatagtagagaatgacttgatggttaagttgacattcagaagaggcctgaaggaagtgaagaaaaaagccatacagctgtttggggaaagcacatttcaagcagagggaacaagcacagaggccttgagaaggaaatatgcctagagtgtttgagacagagcaaggcggctggaaggagatgagttctacaaggcagctatgagccaggtctataagatgtggctgctatatagaaaatagatggtggttgggcaagtgttgaagcatggggaactattaagaggctgcccatcggagcttgcagtgagccgagatcccgccactgcactccagcctgggcgacagagcgagactccgtctcaaaaaaaaaaaaaaaaaaaaaaaaaagaggctgcccatgtgagagatgatggtagcttagacttatggtggaagtgttaaagatggttcagattctagatatgttttgaagaagagctcacaaaaatttttctgatgggctgacagttggatatgagaaaaggaaaggaggcaagaatgattccatttaccaggttccaagagaatgattacagaaaccaatagattgccttatttatttatagtaggaaatgtagttatcacatcggcccaaatgtttgtgtctgcttaatccgcatatctgtttctttaggcaaacttgcattggaatgtaatggcgactgcagaatcaggataaggggacttgaataaatcagtctttaaatgcatctgaggccgggcatggtggctcatgcctgtaatcccaacactttgggaggccgaggtgggcagatcacttgaggtcaggagtttgagaccagcatgcccaacatggtgaaatcttatctccactaaaactacgaaaattagccaggtgtggtagctggcacctgtaatctcagttgctcgggaggctgaggcacgataattgcttgaacctgggaggcggaggttgcagtgagcctagattgtgccactgtgctccagcctgggcaacagagcaagactctgtctcchatcaatcaatcaatcaatcagtaagatacatttcactccagcctggacaacagagcaagactctatctcagtcaatcaataagatacatttatctctttagtagggacctgaaaaarttaaattccatagacaaaaggctttctgagctcttctttaataagtagtgttggcagatgcagtggctcatgcttataattccagcactttaggaggccaaggcgggaggatccctgaggccaagaatttaagacgagcctggtcaacataacaagtccctgtctctaccaaaataataataataatatttagacatggtggcttgtgcctgaggtcccagctactcgagacgctgaggtgggaggatcccttgagcccaggaggtcaagcctgcagtgatccatggttgcaccactgcactccagcctgagcaacagaatttttatttttatttaaaataaaagtagcacaaacatttgcttttgtttctctttcataatgcaccaacactaccctaacccccaacataatccttttgtagatttgttaatatattcagacaggccatattccatatctgatcctacttagtggtttgatggttggctaaaaggcagtattaatatctgttatttccatgctattgagggatatctcacattgatcatccttgtattggcaatagaaataaatggtgatagtatttttttcatttagataaatttagcactgctcttagtattattgaaacttagtttaggaatgtatcatttatctataatcatttattgctgaagtgaacccttctttaaattttcctcttccaaatattgatgtagttctttctttcttcatcagttccatgcatacaattcaattttcttcatgacacgggatcatcatctataacgtctgttacttataggactattctatgagtctcttcaagtgtatacatgtatttgcttttattttaagttactcaaattgttatatattttgagtacttatatatacattttaataattttactagccctggagctggtggtgtgtcatcttcaacttcctttttaaattccttctaatttcttagggtgggaaaaatctaattcagtagattgaatttttagaaaagagtagataaactgatgtctaaatatttaggtatttgtctattctggaacctttttgcttcatgatttttcttttttactttgcattcctgagatttcctttcatgaactggaaggctttactttactaagtgactcagcagtagctctatgtatcttttagttggaaatgcctttggctctatgcatgcacacactgcccattaattagcaaaccaacatagaatcatctgttgatgacaaaattaccaaaatggatcatccataagtgtttatactgcaaacagtgtatcagaaatgtcataatctcattcattaagaaatttacatacacaccagattttagagtgctcattcatgatgaatgtctacttccacactgtttgtttggaaacattcaatagccagtcttgaatttaaaaaatttaattgaatgcttaaagaattacaagtgttcctttccttggctctaatgctaaccaaagtgcttttctaaactgctaagaatggactgaagattctgctgagggctgtagatacttatctgcctaattgagccatcatttgttgacatgaagaaaaccacgtgacctactttaatgcatttctcagtagcagcaggaggctagaatgtagttcatccaacagtaaaactagcagcagtattattagacatgtgaaaatagcattggttatgggattagttttgtaaagtaaggatagtaatataaaggtatatagtcataatataaacagtatagagtgatttttttattttcaaaattatttgaatccaataatcatttaagtcagtcattcagtaactatttaccaatgtttacagttgccagctatattaaaggaattgttgacttgtcaaagttgattcatatgagagtaacagtgttaaaatctgaaactggtatggattgctaaaacgaaatactttgagtacacagggaattactatgatcaaaactatgctggatacattaatttgaccatgtgtctttaaattggaggtgaggaagattagttacagatacattaattagaaaggtgttatattagtctaggttgaggctgatataagtaagaaagtaggaaaggatgcaaaagcccttggaaatgaatatttgtgtgtggtgaagtaaaatgaggtagaggttacccttttacatgacttgagagaatcatggctcatttagtaaatccagagggagaaatgattttctatatatataatgagtttggaatacaggaagaatgccaaaaataacatcttaaggaattcttcctaaatagtgaagaaagaaattagtatcaacagaagagacagaaaaggatggttatgaaagataggaggtcatcgctgtctaaaatgactgatggattttgattacaccactggtgatagaaaaaaaattattagagaaaagtgtagtctgagaactatttgatcttagtctgtaatgaatgaaatataaaatttgagactatttggaaactgtttaacaagtttacacccccttccagcaaatacaaaattacaacaaatttaaagatgttaattggtttttatttgcaattctaaaatcggacaacaacctcattctattaaatagaatgaatattccagtaagctgagcagaggaagttgactttatagacagaaaagggctgaggaaagcaaaaacagaaaacaaaatgtggattggtatttccaaaattacttttcttataaaggttaaagcagaggggacttccttataccagctaaaactggtctgtttggggatctggctattatctgtttctcctgatttcttggaaagtaagataaacaactatgttttagcttagtgatgtggaacttcagcttgagtgactccattttggtttggtctggtgggcctagtgcaggagcttagtccaaactaatgggatcctatacattttgtttaacactgccaacatcctggtgcacgatcatcagatttytcattgaacagggaatggatgactttgaatgttggagagcacctgtggtgagttgtttatatataatctgtaaactagttatgcacagtagcactatatatgggtctatgttggactagaggataaaaaataacttggccttcacctcagagagtttaagaatcactgtgccaccagaaagatggtagtagtaggcacattacatcgagtgaagactgttgggtgagagggaaggtttgcttaaagatataagagatttgagtttgtatattgtctaaggaagatatgatagaacagaagactgataatgcagtgtggaagagtgataactgctagatggaattgagatcaaaggtttatagatgaagactttatccttggaaaaatacatttacatttatttaatgtttagtttttaaattagatattatgtaacttgagcctcacagtaatccaatgaattaggtgacatatggttggtataattcatccgcctttacatttaagaaaattgagacacaaaaaatgttgtgtgttatccacagtcatgtggttagtaaatggggagatattttcatgcccagttctatgctataactactattatgtctgaaaataaaggcagaaaaaaatacttgaagaaaaaatggcaaaaaacygcccaaatttattgaaaaacatttgtttatacatctaggaagctctttgaacaccaagtacrataaatgcaaagagatgcacacctggcctcataatagcaaaatcttgactatttgacaaggacaaaaggaaaatcttaaactcagcaaatcacaacaggggaacacaaaattaacagcttacttctcaccggtaccaatgaagccagaaggtaatgagataacatatttaaagtgctgaaagaaaaaaatcatcagcaaataaccttatgtccagcaaaaatatgtcaaaaataaaatgaaatattttcctagataagcaagtctaagagtgttcattgctggaacatctgccttaccaagaaatactaaagaaaattctttaagctgaaattaaatgacaacagatagcaatttaaatctatacacaaaaaacaaagagcatcaataaaggtaattatgtaagtaattacaaaagacagtataatgacatatttcttcactrttctctcaactcatttaaaagcaaatgcatacagcaatttgtgtataattgtatttaggccctatgacttattagaatgtaatgtatatgatgataacagcagaaaggaggtgcatggcaacaaagctctattggagtgagtaagaaaaggacaccagatggtaaactaaattcacaagatgaaatgaagaaaaccagaatggtaaataagaagattaatataataaactctttaaatgcttgtagtcctagctacttgggaggctgaggcaggagaatcgcttgaacctgggaggcggaggttgcagtgagccaagatcatgccactacgctccagcctggaaatcataaggaatagaaaatatatttactattcattaagtggaattgaatcatcataaaggtcttcatcctcttagtcttcatttactgtctccaaaaaaaaaaaaaagtttccatgactcttcagtagattatcataaattaagatgtatattgtaacccttagggcaactgatgagaaaataacaaaaaattctagttaaaaattattaaaatgcccctataatatgcttaactgatttttgacaaaggtataaagccaactaattggtgaaaagatagccttttcaaaatgttgctgtggcaacatgacgtcaaaagtgaaaagtggccaaaagaccaaaaagtgaaccttgacctgatacaaaaatcgagtaaatggatcacagccttaaatgtaaaacgatgaaacttttatgaaaaacataggagacaatctcagaatctaggggtaatcaaatttctactgaaaattttagtagccacagcaaataagcaataaayagaaagaaatgkcattaaggttggaaagaagtgaaactactcttatttgtagatgacattttgcatatagaaaatcttaaggaatccactaagaaaaataaaggaggacaggtagtgataaatgcaaaaacagaaagtaatgaaatagaaaacaagaaaatagaattaaatctaaagcctttttaaataaaattaacaaaataatcaaagtggtcataacactaagcaagtgaaaaaagaaaagatagaagcaatattataagtgaaaaacaatgtttaatcataaacaattctaagaaatttggaccaataaaagtttgacaaaaatctgaagttctctaatttgtttatatatttttggtatttatgtatttattgtcataggtttcttagttagattcatggccaaaagtaccatccaaaaaactatttccaaatgtatatttttagcacatacctcttttctgatctccaaacttaatgaccaactggttatttagattattatatgcaaatagacttcttaatatacagtgtcaatcctgtttctcttatgtttaatacatctctgtatatggtaccactgcagggtttgactcatgtgccctagccaaaccctaggagtcatccttgattttttcttttccttcaataagtccctatctttatatctggaacccatttactcttcttttatcagcaattaccattytattacagaccrttagtatttttctcctgccctactgctatagtctcctgactgatctccttctactttttaaccctttcaaaccattctccacagaatagctggagtggccttttaaaaatgcaaaccagcataaaacattttgatgtttaaatccctctcatggctgccaatgattgctcatagaataaactccaaactttctgccatggtgtataaagccctacatgtcttacatggctttcctcctacctgtctaatatcatcttattctagttctttctcattgattattcctttaacaaccaagcccttttccttcaaaagtccttcactcttactcctccttcctggaatgctcttcactgttttctaagggctgactcatgtataaccttcaacattcaactcaaatgccatcctcttagagagtcattttctggttagctatctaaagtagctttccctgttcctccatgagctgttgtcataatatccctccaacccccaacccccaccttatataaccatgcttgtctcctttgttgcagttatctccatttgtaattaacttgtttaaatcctcctagaatgccagctaataagaaggtaaggtccttgcctctctctctctttttttttttttgagacagtctcccctgtcacccaggctggagtgcaatgacgccatctcggctcactgcaacctccacctcccgagttcaagcaattctcctgcctcagcctcccaagtagctgggattacaggtgcctgtcaccacatccggctaattttttttttttttatctttagtagagayggggttttaccgtgttagccagagtggtctcgaactcctgacctcgtgatccctccgcctcagcctcccaaagtactgggattacaggcatgagccactgcccccggccttgcctctcttaataaccatattacctctggcaaccagcatagtgcctggtatttattgtgctcagtatgcatctgttgaatattattattttgtatactctatagtgatgagcatgttgtaagcaacccgatatgtataaattcattgatggtgttctctctctaaattttctttattgttttcatggtgggttcatttcctcctttaccccctctttttaggttgtataatcattagttttattttcatctctgattttatatggacatgtttcaatgcatacagacagttaatattcttttcctcctaattatctattatatatatcatcttcagtatcatcaccattcaaaaaactcttttatatgttctagataatgtggcctattttttacgttagactacctgataaggtgtcaactgaattggctgcctttatctacattctgaaccaaaatttaattctagagtttgtagtcagcgtttttccaaatgtgtaaaactgtaatccttcataaaatgtcatatgtaaragagtaagcaattctgtgtgtactaaaaggtgagaaagttattactttagctttcactgggaagacttaaagtttatcaaaaaggattatagaaagaacagatttatagcaactgtctgatatatgaccagaacccttatgttccactgaaasagacttgccctaggctttctagagcataatgcccttagcaagtagctttcaacatctttttcaggaagcaatattttccttcagtaaaagggtcactgtactgtttttctttttccttccctgtcttatcttttgagttcaggaagtactttaaatttacaggcagctttgaagacatgaagcaagttcagccccagaagtatttcctgttatggcattaatctaattccatgaaagtagaactgatttttcatctgtaaagtagataaagtgcctagagcagccgaccattattctgggttatcatgataaagaggcttagttttgacacaaaagagtttatcagcctacccagtggaagatttcatcctttttgttgaaagatatattaatggattataatctgtcttggcttccaaaagaaagttcacctttatattgaaaatgattagttaaatcagcaaatattttcctgaatatacattttataatatacgataaatcaagcaaacattctagggatatcacatataattaaatatctaatgttaaatcattttatgttattttaatgtttaaattattgtctcaatttgaaataatcacagattttccttataaaccaacttggtttaattttaacatatagactaacataatttctagtaggcatatatgcttcattttaraagcccctgttattaggttatataatttctccttacaacttataatgtagaaatagttttcttataataaggtatttctcttaatagttaataattaaacttagttgattattttaagtatatagtacatacaaataatatataattcaaaagctataatatatttttcctatccctatttcctggttcctctctaagctaaggcatttagactaatcctagtggcttagtattgtttaaataattttttatttgaaaattgattccatattggacatatttacaatatttccttgaataataatagcttaccacatagtaatacattacatatttagttctctcagtagccttctgagttaaattctgttatccatttgaaaaatgcaggaactcaaggttagagaggttaaataattggctaaaattcacctggctgataagtgacagatttgggctggaactcaggtcctctaataccagagcctatattcatagcccatactgtaggattatagaaataaggttattcccagttgtgccttttatacttgaaaagaacaaaagattccactgaatgcttattttacaattaataaattaagttaggctttatcataccctaatgagatatcttattatttgtttaaaataaatgatctaccattatgttcataaataaaaataaagatattgttttattatagatgttaatgttttaaaacttagatcatctaaacatgaaaaatctctggcctagtcaaaggcacactgagaactaaacttgggattggaaaatttggagttttcaaatggccctaccaattcagcgcataattgtatatgcttatcatttttccaaagagggttgaatagtattcttccattgtatatcttagggaggcattataaaggtaatatgacatcagatgttaaacttacttatttaaccagcattcattgaggctgcctactatacgtatcctgtgaagcaatgtgaccratacaaagatgaagaaaacatgggtgctgtctttagtgaactacccatcttctaggaagaataagatctattgtaatataaacaagagtgatgagtccttagtatatgtgaaggtctcctcagctaagttccaaaaagtaacaagctaactgtaatttcaccaccttagtattttatgaacaccaccttagtttttatgaactcaggaccttacctccactttatgaaaacacatatacacaaagcaaggagttttaataagcacttgaaaagatgctaatcttagccatcagacagtggcataaccatgtgagctttatcttaacacccactaggatgtctataatcaagaagacataataccaagtgttgacaaggatgtggagaacttggaaccctcatgcaccactggtggaaatattggcagttcctcaaaaggctaaacacagagttaccatatgacccagcaattccacttttagatatataccaaagaaaaatgaaaacctgtgtttacacaaaaatgtgtatatgaatgtttatggcagcattawttataatagtcaaaaggtagaaatgactgaaatgttcatcaactgctgaatggataaataaaattagattgttattttacatgagacacaaaaatgaactcaaaacagattaaagatttaaacataaaacctgagaccttaaaactcagaagaaaacatattagaaaagctccgtgacactggtcttgcaatgactttttatgtatgacactaaaagcacaggcagcaaaagcaaaattaaacaaaattgtatctatatcaaaccaaaaagtttctgcacagcaaaggagacaacaaaagaaaaggcaactcacagaatgggagaaaatatttgtaaaccccatatatgataaaaggttaattatccaaaatatgtaaggaactcatacaactcaatagcagaaaacccgattaaaaaatgagcccaggacctgaatagacattttccatagaagacatacaaatgacccaggtatatgaaaacatgtgcagtgtccctaatcatcaaagaaatacaaatcaaaagaccacagtgaagctgggttcagtggtggtggtgcrtacctatagtgccagctacttaggagactgagataggaggatcagttgagcccaggggttcaaggccagcctaggcaacataggaagaccctatctctttaaaaaaagaaaaaaaaaattactcccccacccccactttcctctccctcacaatgagatactaccttaaatttgtgactgttatcaaaaagtcaaaatcatgtggaaaaaagggatcccttgttagcgggaatgtaaattggcacagagattatgaaaaacaatacgaaagttcctttaaaaacagaactactatataatccaacaatctcatttttggatataaatctaaaggagatcggccgggcatggtggctcatgcccgtaatcccagcactgtggaaggccgaagtgggcggatcacttgaggacaggagttggagactggcctggccaacatgatgaaaccccatctgtactaaaaatataaaaattagctgggcgtggtagcacatgcctgtaatcccagctacttgggaagctgcggcaggagaatcgctcaaacccaggaggtggaggttgcagcgagctgagaacatgccactgcactccagcctgggcgacagagtgagactctatctctaaagaaataaataaataattaaataaacggaaatgaaatcagtatgttgaagagatatttgtactcccgtgttcagctgcattattcacaatagtcaaaatagggaaataccctaggagtctgtcaacagatgaatggataaagaaagtatatgtatatataaacagtggagtactgttcaaccttaaaaaagaaggaaatcctgccatttgcaacaacataggtgaacctgcaggacattatgctaagtgaaataggccagacacaaaaatatagatactgtgtgatctcatttatatatgaaatcttaaaaagtcaacctcatagaaacagggtagaaagtgtggttgggggagggaagaagggtagtggaatgatggggagattttggtcgtggggtgtaaacttttagttataggatgaatacgttctggagacctaatgtaaaacatggtaactatagtttataattatgtattgtatacttgaaatttgttaagaaagtagctcttaagtcttctaccacacacaaaaaaagataaatttgtaagttcatggatatgttaattggcttgatagtggtgtcatttcacaacatacacatatatcaaaacatcatattttatactgtgaataaatgtaatttttgtcagttataactcaagaaaattgaaagaaaaatgtattatatccacacagtgaaatattatttagtaataagcaggatgaagtactttcatccatgctgcaacatagataaacctttaaaacattgtgctaagtgaaagaagccatttataaaaggctgtctattgtatgatctcattcatgaaaagtcttaaataggtaaatcaataaagacagaaggtatattggtggttgtcttaggctgaaagtgttgtgggacaatgctacactcctaatagatacaggatttctttgggagttagacaactaatctaaaattgactgtggtgatggttacacatctccgtcaatatactaaaaatcacgaattgtatgctttaaatgcaatttatatgtgaattagatctcaataaagcttttattttaaaaaatagatggtattaacaaaacttttagactactgtgaccacttggcacacctaacaacaaagcatccaaggagattaatatttaaacgtacattataatatgaaaggcatgaatttagatgggggcatgtaacctcttgaagaaatatataatgtaaaagtgttattattgctattttatttcttattttaatcaaacactgtgatagtattattcattccactgtaacccctattggataaatacattatagtatttagaataaaactcatgtgttagtaagccagtgagaaagaatcataccagagctttatagatcaccagttctatctcctgtccctccatttcaggtatatgcaactggcctayctgttcagagtattaactctatggtgcttcatcagtcagaccatccactatgcccaaatgagtaatatgtccaaactgtatttgcaaaatgcatttcttcacagaaattaatatcctrtgcaaatgctggctaattgattattactctttcataaaggcttaattaggtaggaaacccagtacctgcagcgagagaggaagaaaagtctttcctagggctagatcctgacccaaggttttggattttaatggggcagagttgtctgttttctattaaacacatacttgggagtaagtagacttgcccatctcctgttttatactgatcttttcacgaatgtgaacctttttcttgaaagagtaaatatctttaaatttttctgtagccttccctgttacaagttaaatgttcctacttctctagagtatttcgaagtgtttatttaaataagtaaacatggatagacactattttgtagcaaggggttgggggagtatactctaaggcagcttctctctgacagcttatctttcttataagtatagtgtaaacatataatttataatgtgggaaaagagggtttgatcttttaataaagccatttctttttatttcagagttaaggagtttaaattctttttctttagcatctagcagtgagttcaggggtgatggtcattaatatcttgatccattacttttcctaaaagataagattttttttcccataatggttcatttgtctgactgctttatttcccaccagaaatcacaaaatccatttttcctgtgacagtataataattttcacaacatctgattttagtggcacatacatgcagaagattaaaggtgtaggttagaaaagaagcagtaagaaggcattgagaataaaaacatggtagaatttatttctttaatgtcataataactaatttagaaaaacaaatataaacaatgggttgtaaatagtttattcaatattttaataaagaattaattcattacatgcacacttatttttacatacttgcccagatttcttaccaaaaaaaattttctcgccctattctcaaacaaaatttatagacattatatacagcctctgttgaaaagaccttctgttaaaatcagctgcccttagcttgacatatcttgagttcttagtgattaacatgttaataacaagtgtgaatgtcattaatgttcctataattaatttcagtattaacaccttatgtttcttattattcattcctcaaatgaaggatttttccatttataactaagtggcaattattatatcatttttatataatggagcaataaattgtatctgatgttattaatagtaattcctacattccttataacatacttttatactcattcctttatatattcctttactgttatataatactttttaagtgcctttaagtgaagagaagtggttgaaatgtaaaagaagctacttggaatgtctgtaataacaaatgtgttagtatatttacacctgcttgaaggaaagagtaaagtatttcctgaaaaccccacaattatataggtagttcaacctctgatctgcactgaggcatttaacctctcttaaccttggcttccttatttaaaggaagtggctgttgagccttacctaaatcataaagtgagtgcaagtaattgtttactgagaaatctaagaaaggctaatggaaaacatcaagtatgaatgaaacagttataactgttttcccctttgaaaagaattgctgttccacattgaatttctgtcatgaatctaactctttttaaatgagctatttaaatttaaatacataaatggatgttatattttgattttaattacttcagtagtaattcagaattarttgaagctacagcttaaacatattttattacatttaaatagttgggaaaaaataaayagttggttagctaaaacccaataaataaattgggaatagattctgctagttgaatgctgaaatgaatagtatatactttaaagggctttaattttttctttcatactgatttaagactgataatttatctctttacttattctaattatttgaccctttttgttggaggagagggggcaatcttgtcactaattgtgtaacccttgtttaatttactctttcaggaacccttccaaccttccccctctccaccttaatacactgatgttcattttggatttccaagagggagatatgatatgcaactttaaaaaacctattttccagtcaagccatttttcaaagagagcttattaacctctcctatggatcaaattgtgaaatactaaactaggttgcctgtggaagtatagtgagagacgacgataggaragaagataggatggggtcagaagaaccttacattccatgcttaggagtataaactgtatacgataagcagctgggaaccataaaatccttttaagaagtattgtgatataagactaatttgaaagaatagtgagaaggtggataattgtacatttgattttattcctttatgctaataattcccatgtacatacagtgaatgaaatataggagacaaacatcttcaactattctcatttcttattggttttagagcttggaaatatgttaaaaagacatgtaaactagttccatcaattgtatttcctcctatttagatagtacagtgattttgagcaaactgttaacattgattttaaaatccaaaatatattattagtctataaatcactgcatggttctcattcattgattttcacttaggaggctttggggggttgttttgtttttataatgctttacccaaagcattttaaatcttctactctccagtaatagtttttgtcaaatatattttgatatctgctgtactatttgctatatttacttaaacatctctccactacgtagagcaggtactataggaggaaaaacttttcctctaccctcttatgttcagtagttggtgcttgcaaattaaactgacaaaaaattaggaggataaaaggattattttgtatgcacgtgagaagcctcacagaaaagaattgaaaaccccaaaaaaccaatgagaccaaggggcttacatatcattttaagaaagagtgataaagtatggagaagagactagacaaaatgggggtttagacttctggtggggtgagggtgggcattaatgataggtgactaaggaatgagtggtaaataagggttgtttagtaaggtttattaggcagagtcaagtgagaagagtctgcttcttctcttcctggtactggagaggaggacgccattacaaatatgaatttcctttacaaaagggaaatttatgccctatttttaggaagtaaaggggagggcagagagctcctcctatgtttgctgttttaattgcctgtagttcaaaataatccttatgctgaagtggcatatttgagggtgtcatactctgatccccttcactatagactactctctaataccagggtactgagttaagataattctgaaggcttcgctaataatctactactctttgtcaatttcctatcttagttttctcatctgtaaaatggagatcatgatagcacttacctcaaaaaatgataagaagtcaattaaaaaagcaccaaaaaatgcttaataaagtggtctgacacatagtaaattctcaatgaataatgtatatactgttaaggagtcatttccctctaagagtacaaagtacaaaagaaaaagttggagcttaagatttaggtttggctgggtgtggtgtatcacgcctgtaatcccagcattttgggaggctgaggggggtggatcacctgaggtcaggagttcgagaccagtctggccaatgtggtgaaaccgcatctctactaaaaatacaaaaaatggcagacgtggtgatgcatgcctgtaatctcagctatttggaaggttgaggcaggagaattgcttgaaccctggaggcagaggctgcagtgagtcgagatcacgccactgcactccagcctaggcaacagagtgagactctgtctcaaaaaaataaataaaagagttaggtttaatcccagctacttgggagggtgaagtgggagggtctcttgagcccaggagttcaagtccagccggggcaacctagtgaacacttccctccactccatctcttaaaaaggatgggagtgttcccagtgctgattatgccacctattagccgtatgaccttggacaactgtaagcctcaactttcccatctatgcaataagaatcatttttacctcattagattgttatgaggattaaatgaagcagcatgtatatatgtgtatatatataygcatatatacatatagtatcttgtatataataagtatttattacatgcaatttcatcttttatgtagactttctagactctaaccttgccccaggaagataagtgacttttacattaagccatgttctctttttcctttatgacactcctcaatgcttaatgaagaactctggctacacaaaaaactaaagtaaaatgttgacagactgcttttttctacatctgggcttctttaattgaaagctgacatttaggccaagaattgttaggaattcctatttaggtttataccagttctcgcttatatacaagatgtatacttgtgtatacatgttatttacacacatacaataatatatactggctttctttttttccctctcatcccataacagatagtatactgccttttttaaaaaaaaaaatgcccacttttcaaattaaaaagcagaggcacacattctttccaaatgtattagtataatttgaaataatgagattgtattaataggattcagccacagaaacagacccattagggaagatagagtgagaataagatttatttgttggttgatcgatttygaggaattggcctatgtcattgtggagactggctaagtagtccaaaaccatagggcaggcaaccaggaaggggagaaagccttgaacttcttaggcatgggcagaagctgtcattcataggtggaatttattctctctgtcaaggaaacttaagccatgcttttctttttaaattttattattattatactttaagttttagggtacatgtgcacaacgtgcaggcttttactttcaactgattgaatcaggyccctccagattatccaggatactccagtaatagaagtcaactgactgggagttttaattacatctgaaaaatacctgtatagcaacacctagattggaatttrattgaataactagagtctgtagcctagtcaagttgtcacctcaaaaaaaccatcttgggataaagttttttgaaaaaagaaatagaaagttcagggcattttggtcattatttttgtgtattgtgcctattatatctttttattttwaatttttgagaatctgtttagtgcctagtattttgccaagattataaaggaaacaaaggtatcttaatgtttttttcaaatcttaacatcttaaagttgtttcaagcattttccctgaattcattgattaagtattgttagaagaagtggaacatggatgatgcatatgctttagattgaggcaggagtatgtgtggtgactaagagagtaagaaatgatgatctcgagaatactagactgtgagctttctaaaagctggtatcgtgtgttatttatccttgtattgccatggcctggcacagtaattgaaaaagttcaacaatggtttgttgtttaggttgattaaggaatgagcaaaaacgtaacttaaaagctatctgtattgaagtgtgatctgttatatgtattcagatctgattatacttggagtcgaaatcactgtatctaaattaatattaagactcagggccaggcacattgtctcacatctgtaatcccagcacttcaggaggctgaggtgggaggtcagttgaggccaggagtttgagaccagcctgggcaacatagcgaaaaactctgtctccacaaaaaattaaaaaaataaaaattagccrgacatggtggcatgtgcctgtagtcctagctacttgggaagctcaggtggaggatcacttgaatctagaggtggaagctgcagtgatctgtgatcgtatctctgcacttcagcctgtgtgacagagtgagactttttctcaaataaaagaatcaatacagcaatacagccccaatttctaaattggagaaagtcattttctatttcrtctctctctgttcctccactagattgtaaactctttgagrgtaagaattatgcagttttgtctgctcttcaatgttttattgccttgcattaaaaagataataaatactgcttgatgaattaattaaaaacagcatacagaagagatccaaatttaattttgtaataaatcacctctgagaataataagaaaaccagaatatttgaaatacatcatttaattgaataaggaacagtaaactgatttttaatgttcctgtttttatgtatttgaagttaatgtttagttattttgttttaaaatctttataaaaattctctgctttatcttccagtgaacaagacatattaatagcttttctgtagarcaaggcatattaatagcttttctgttgaatatgaaagaaagcagctgtagttttatcctactgagtacaaatatttgttggggaattaaagatttattagataaatggcttaaagattaattaattaactatactatctttttactttcctatcttatctgtaggccattggtctgttaatatatataaattgctctgtttcctgctatctttccatttcttaattaaatattagaaaaatgcccaaggaaaaacaatacaactgagcttcctttctggttttcatgcttttaaaatttataaaaattgtggctctgctgcctttttttttttttttttttttttttgkagttagatgaatttggcctgrgattctatgaaaaaaataaaacaatagtttttatttcatgatttttttttcaagttgttctgattttataatatctagtcaagtgatgacatgcagagattttgctgtgaggagagggagagagcaaaaagtattctgccctgattgctttttagtgattttattactagaaagataaacattgccttgttattttagccagtaaaattgtctgcaaagtaggtaacaaaatgcaaagcagtgtatttacttttccactttttcccaaaggtatgataaaagcagggttccagtggaacaatttgctgagttctttcctagggagcactggtagcccgtattaaatgattatattttggaaaatgctaatgatgaaagatgagaataatttatattctttgaaatgtgactaaaaagttggaaatgaaacctatctttctgaagtgacatccacatttgtggttcattttcatcacacctgattcacttctgccagcaattcagaaagaaaggtggaggtgggaaagcatatatgtagctaagctactaaagtgactatttgagtatttcattccatctgtcaaaagattcagtgggataaagaatttggcataaatggatgtaattcattctctttttacaaagaagtaaatgatagaacaaaatcatcctaaaatgaaggaacaaaataccagaaagtgaaagaaaacaaaatttgtattttttgatagaatagtagcagaactcaatgtaaaaataatgattacattaataattatttgctcactttttcctgtatttggtattttgggaaagtgggcttgaaaaacagtggatacattgatgaaacatttcaattttcacttgcctgttgtgtttgctcatgttagacaaactataacttctcggtgtatagatatgatgtacacaaaattacacagaaattaagccatgtataataatgcatgactagaagaaagatatatctcccttgaacaaataacagttattttagtaaatttgtaacagagaaaataggcttgattaacaaaaatatgaaagatcttttaaataaatgaattttgaattttcagagtagcccagaattttatctaaaytcggattatttcattagctagaacatgaaaataggcatttattctactcacctacagcttctgtagtactaaatttatggaatgaggctttgtggtgctgccttcagagctcaatgatttgctttttctgaattttggaagtctgtctctaattgattgacacatatgaatgtagtgggaagaaatgagattaagcatacaagctttctttttcatttaaacatcattgaagccatgaatttgtaaattgatataaaaacacaatcctttggatctgtattaggaaatttataaatgggagctttattttgctccagaaatgtgataattagaaatatattcaggtgattttttccctttggtttttgttgttttttaatttatttttctttcttatttttaccaaaggttcaagtcatctgtaatattcaggtgtttttaagaatttctcatggcaagttaattgtgggtgaacatttccctattggactaccagatgtactttgtggttataacttgcatagctccaggatttttcgtgaacaagtaataaaacacatttctggtttgctttctgccrtagagtattaagagtttaacactttttaaatgttactttaatctctgaaattttcaacaatgattagtggcagtatactcaaaaaaggaaatgtgtaggctttactataataaaaataagaacaacttatataagctccacactttatagatttgtatggatatacaatcaaatgtactaatttttaaattatcctcattttgcagtaattttacattttgctcatttgtgcaaaccrtggtgatagtaaaatatttaacagaaattcaagcacattcttttaactctttctgaaaaatctcacaaatgagatttttttaaaacagttaagaatttactaaatttaaaatgtatatatacctgatgccatccagatgttttattgaatttctaaaataaaagtccacctaatgaatggctaatttactcaacacgtaagacaaagatgtatttctgtgttactaagaacatgcatcctatctccttgacaatggctctaattacctcagcttggactgatcaatatttgatctttttcccaccatgcaaacatgttactttgactttgtctcttcctcttcttttcagataatttgcagccatgtgagaatggttcattttgtttgttctccctggcttgaggccaggggtctcttattagtataatgcagttcattgatgtgaatttgttgatctcctgggtaggttttcacaaatttaaggcaattaaaagcttttatatggcatttcacttgaagttattagtggcctttcagtgattttgcttttaaaaattacttcatcattttatgattatttcctttccttctcttttctctactctccccatgctataaaattctatagtaaaggattgaaacaactatttcattgatttcattaaaagtaataatttataaacttataattcaatagcttaatattttaattaccacaatttttaaaggactaatgaaatttttggttttgtgttttcaaaagctgctttgttttaagcatataaatattcatgatagaagccataatttggagaataataagaattgaatctaaaaattattagtaattgctaaaaaattcaaaaagcacatagtgtaaactttgtgtatatgagacagaactttttctaaattgcagtttcattaacatcttaaagttttctcgtagctaacagatgtccatgatatttttgcttccttaacttttacagtcaatggaccattctccagcaggtcataagtaagaatgttaaataacggccactaaatcttaaggaatgtgacaacattgattagattaaaatcctttgacttcattgacatatcttttttctttccccatttaaaaaattgtttcagttgttttcctactgtttgttggtggcatactttgttacagtacttgatccagtttgtttcattggtgtgcttggtaaatttgaagaaatgatcactggagaggatttgaaataactagcaaaagttttgaagtattgcagtgagtatatggaatgtgttactcatttatgcaaaaaatattggtgtttttatactttttattttaaaaaatatataacaataatagcaaatatttagtaagaatgtaactttatgccatactaaggcaagaatagtatattgaataagaggatataccctgaaggcagggtataaatccaagttgcgctgcttactagttcacttcttaagcagttaacttctgaatctctctttatgtgcaaaatggtataggagaggaaaaaaaatatctttccctcctgatatgtacatgactggggcctctataacaaaaacagattaacaagagaaaagtatactataatttaagtgtaagttttacatgacatgggagccttcataaggaaatgaagacccaaagaaacagctaaatctgagtgttttttatattaggttcaatggtgaaatgatagggtatgaagtaaatgtagtaaactgggtgaaacttggcaaggcctttttgtttggattcccctctgtctctttgtctttggagaaaagatgctcctttatagagagggtaccattcacataagggtcttgtgacctacttaagggaaaggtcaaaaaacagttacaaggttttatgatctgtttctagagaaaagggcaggggacagtcagagagaccttcctgcttctgccattttctcacattccttcaccttaaaattttcaatatatcaaggtgctatattttggggtagtatatcctgaaccgtgcctataggaatgatgataataatatctactttataaggataaaatgagacaatatgtataaattgtatggaacagtgcatgaaccacaataaacactcacaaaatgtttgctataaagatattttcgaccttccatggtggttcatgcctataatcccaacactttacgaggctgaggtgggaggatcacttggagccaggagttcaagaccagcttgggcaacatagcaagaccccatctcttaaaaaaaataaaaaataaaaattacccatgcctatagtcctaattacttgggaggccaaggcaggaggatcacaattgatcctcaggaagatcatgcttgtctgtaaaggattttatwtccccttgacttatgaagcttagtttggctggatatgaaattctgggttgaaaattcttttctttttttttgagacagagtctcactccgtcaccaggctgaagtgcagtggcatgatctcggctcagtgcaacctctgcttccctggttcaagcaattctcctgcctcagctgccctagtagctgggactacaggtgtgcgccaccacgcccagctaatttttgtatttttattagagacagggtttcaccatgttggccaggatggtcttgatctcttgacctcgtgatcctcccgccctcggcctcccaaagtgctaggattacaggcgtgaaaattcttttctttaagaatattgwatattggctcccactctcttctggcttatagggtttctgcagagagatctgctgttagtcccatgggcttcactttgtgggtaacccaacctttctctttggctgcgcttaacattttttccttcatttcaacctttgtgaatctgacgattacattgtgtctgggggttgttcttctcgatatgtatgcacccaatacaggagcacccagattcataaagcaagttcttagagacctacaaagagtcttagcctcccacacaataatagtgggagactttaacaccccactgttaatattagacagatcaacgagacagaaaattaacaaggatattcaggacttgaactcagctctggaccaagcagatctaatagacatctacagaactctccaccccaaatcaacagaatatacattcttctccgcaccacatcgcccttactctaaaattgaccacataattggaagtaaaacactcctcagcacaagcaaaataatagaaatcataaaaaacactttctcagaccacagtgcgatcaaattagaactcaggattaagaaagtcactcaaggctgggcgcggtggttcacgcctgtaatcccagcactttgagaggccgaggcgggcggatcacaaggtcaggagatcgagaccatcctggctaacatggtgaaactctactaaaaatagaaaaattagccgggcgtgatggcgggtgcctgtagtcccagctactcgggaggctgaggcaggagaatggcgtgaacccgggaggcggagcttgcagtgagccgagatcgcgccactgcactccagcttgggcgacagagcgagactccatctcaaaaaaaaaaaaaaaaaaaaaaaacctcactgaaaaccacccaaccactgctcctgaatgaatattaggtaaataatgaaattaagacagaaataaagcagttctttggaaccattgagaacaaagacacaatataccagaatctcttggacacagctaaagcagtgtttagaaggaaatttatagcactaaatgccctcaggagaaaactggaaagatctaaaatggacacactaacatcacgatgaaaagatctagagaagcaagagcaaacaaattcaaaagctagcagaagacaagaaataactaagatcagagcagaagtgaaggagatagagacacgaaaaacccttccaaaaatcagtgaatccaggagctggttttttgaaaagattaacaaaatagatagactgctagacagactacttaagaagaaaagagaaaagaatcaaatagacacaataaaaaatgataaaggggatatcactactgatcccacagaagtacaaactaccatcagagaatactatagacacctctacgcaaataaactagaaaatctagaagaaatggatacattgctggtcagataccccctcccaagactaaaccaggaggaagtgaatccctgaatagaccaataacaagttctgaaattgaggcagtaattaatagcctaccaaccaaaaaaagcccaggaccagatggattcacaactgaattctatcagaggtacaaagaggagctgttggtgggagtgtaaattagttcaatcattgtggaagacagtgtggcgattcctcaaggaactagaaccagaaataccatttggcccagcaatcccattactgggtatatacccaaaggattataaatcatggtgctatgaagacacatgcacacatgtttattacagcactgttcacaatagcaaagacttggaaccaacccaaatgcccatcagtgatagacgggataaagaaaatgtggcacataaccaccatggaatactatgcagccataaaaaaggatgagttcatgtcctttgcagggacatggataaatctggaaaccatcattctcagtaaactaacacaagaacagaaaaccaaacactgcatgttctcactcataagtgggrgttgaacaatgagaacacatgaacacagggaggggagcatcacatactggggcctgtcagggggtaggggactaggtgagagatagcattaggagaaatacctaatgtagatgacgggttgatgggtacagcaaaccaccatggcatgtgtatacctatgtaacaaacctgcgtgttctgcacatgtatcccagaacttaaagtacaattaaaaaataataataaaattttaaaaagaaaaagattgggtatttcacatcttcttgaatgtaaaactgggggaaaataatcttttttaatgtgcattaaaactttttttttttttttttttttttttttggggggagaaggtctcactctgttgccctggctggagtgcagcggtatgatcaccgctcactgtggcctcagcctcacaggcccaagtgatcctctcacttcaggctccaagtatctggactcaaaggcgtgcaccaccactcccaggttttgtttttttttttttttttttgcagagacagggggttttctatgttactcaggctgttttctaactcccagcctcaagcaatcctcttgcctcaggttgccaacgtgttgggattacaggcatgagccactgtgcctgacccagtgaaacattttagtgcagaatagttgtgaatttttgaaatagataaccaagaaaatttaacttcagatatcacctagttgtaagttatctctccgttttgtcattcaggaatgggttttctgagactttctaaagaaatatatattatcgttcagtttggctttggaaattttattattgccctatatttctagtaaagtaatgtagatctagtttgatacaaaccattctatacactacaccggtactatcagctttcacttttcacagctcccaaaacaaataaataaaagaaaatagctttcttttctatgccgtttctttctgaaatagtactaatctgccttacctttaatactatcccatagacccacctagtagctcttcccttacgagagagttcttttgatcagataaggtttaatatggaaaataaaaagaaataatcatttaaaacttgaccaaaatattttaaaaacatacacatatatactctaccttaacatatggtgaaaagcaatttttcctaaaatatattctatgaaaaaaaaattttggccaggcacggtgacttatgcctataatcccagcactttggaggctgaggcgggtggatcacctgatgtcaggagcttgagaccagcctggccaacatggcaaaaccccgtctctactaaaaatacaaaaaattagctgggcacggtggtgggtgcctgtaatcctagctacttgggaggctgaggcagggagaatcgcttgaacccaggaggcagaggttgcagtgagctgagatcacaccattgcactccagcctgggcaacagaacgagacctcatctcaaaaaaaaaaaaaatttatttccaatcagttggaaaatgtaagaatatgcaaaaatttaacagatttctttaatgtgggtttttcctagaacacctttttacatttcagaggacattagagttcagcaggacacagtttggtaaatattagtataaaaagttaggctcagccgggtgcggtggctcatgtctgtaatcccagcactttgggaggctgaggtgggcagatcacgaggtcaagagatcgagaccatcctggccaacatggtgaaacctcgtctctactaaaaatacaaaaattacctgggcgtggtagcacacgcctgtagtcccacctgctcgggaggctgaggcaggaaaatcgcttgaaccagggaggcagagattgcagtaagcctagatggtgccactgcactccagcctggcaatagagcaagactccatctcaaaaaaaaaaaaaaagaaaaaaaagaaaggagaaaaaagaaaaaaatcaggctctctgtagtcaaaagtcaaacatttttactgctaaaataaggcattattttttttccttgcttaattgccatgccaacttttattggttctttcctgtctcccaatgagttaaaaaagaaaaaagtatccaaatgtgttcccaccccaacccaagcctgtgatcacttctttgtttttttgcttccctstaagggtatttctccctataattatactcacactttaagaagtaggagccattatactttattttcaaatttcaaattagaaagtgatttgggtttggaagcttgtttctgtctctggctatccaactgtttctcggctccaagatgtgaaactgtttcttcaccctaacggcaaaagggcacctgctattgagcgtgctttgagcgttattctcccaatagtaccctagataggtaagacatttttgaaatcaaaaataaacaaaaacttcttgttgtgatttctctgtataccaaaacatcctcttgacataaactgtgttatcctaatgacacagacaaacacaaattatcttcatttgggttgcagagttgggggtcatttcttgtgcttatgagcctgctattctgcaactgtgagatttcagacatgttcaatttgtggattttattttttattacacacacatgtgtagtattattgcttgtaataccttgtatgaatataaaaagattgtcatttttcaggtgtatattaacttcattaattttttacaattcaaatgatggagagattcctattgaaggatacttagctttttctaataattcagttatgattttatattcaatgtaaatgattttgtctctctggggccagattatcctatttaccttgaccccctaccatgacaatttaaatactgcatttaactgtagtatatgtaagattgtccttaacaaatatgagacttgaaaggttgtttttgtttgtgtcctctcctctgaagttttccttttaggatgacagcatacgatagatgtgttctagtaaagtgcttcttttattcatgaattacaaatagcttaagaaaatgtttaaagtaaagctataatgattagtcctggtagtctccattttattcagaatgtctctgtcagaaattatgtcatcactatggactgttagccaggaagttctgtctagcagatgaatgaatagggagtactgagttttctaataaaagacactgttgtaatattgaaatactgctaatggaggttgccagttttctgttcttaaatttacaggacatcttctgtgattaaagtaaggaatacttagagcaagtccttagagtaaaccaactataaacttaagaaaccggaaatagaattttttttttttaaacaatgccatttaagtccctaacttgtcttggttcagctgctagacatttgttcctttgtctcaaaaacgttagcagaaagcaataaatatagttcttgctttactcagctaacatctgattttatctgcacattgcttccatcttaaaactttcttaccttactagtctgaatggcttgtgtagcctaatactgttataattgtcagaacaaagggtttgattattttggcaaggaaaaaagcctggtaatagtatttgcatttcaattaattgtttcattctgatttgaaatgtgacttatgttagatacatctctgayccttccctatctcagtactaatactaatatgttgtatttccactacaatagcattacatcttacaaacatttatttcctttataactgacgtagagctttccacatagtagatatttaatataattgatggtttggaattcatacattttgtaggctaagtataactctcctactgtttcacctacttcctaagctagatttatctttacaggtactagactttatagaactaatggtaaattcagtatgcatatcttctgtagtaaacatagaaaaacatttttgtaatagtgctccccaaattttagtttcttgactagtaatgaaatatcttatctgtactagagttttgttatacaataatgacagcattttcatgtgctatgttatggccagttaactaaaaataagtggatatttaaaatggaaaatgaaattatcctgttgcctgaaatatcttgactcaggttctattacaggttgcatatggtatctgttagagctttgaatctatgttggttgttgagttattatgtgcattaactattgcattcaaaagttctttaaaagcatatgtctgttttaaatcttatacaaattccttgcaggttttgagagcagtctttttgtatgtctttcttgtttgttgttttgtttttataccagagcaccatgtcctaagcagcagtaaatttaaaacattgcttaggatagttttataatatcattaatagatttttatattagatagtttctctgaattattgacctattatagggaacatggaaaaatttagaaaaattagaagttatacggagtattaagaaaaaaactttatattttggtactcccaggaaaactaaaacctctttctaagagtatattttaggaaattttctaaaattttgtaaatcaacctacagagaaaaaaagtatagaaagtattttgaaatatttgtgtgtatatgtgtgtgtgtgtacacaagccacattttctcctagaactcactactgaaatttctgaaagtgattcaataagatatatatttcatatctggtttttaaaatccatagaatttttgtgttttgaccatcaggtagagtcttacagtttagtcacagtggaatcatcagcttcaaaatgaaagaacaagatagtctcttggcattcaaaaatttagcatactttaactcatatttgctgtgatgttaggtagtgaattattcttgttaactatctagcgtccaatgtgacatgtgtttgttgttacctacaacttatcaaataaacagttaccctctggaatgataagaacttgggctttttatgaaaaataccctctaaatgaggacagaaatctatattaaggataggctattgattaaatttagagatacacataaagatgactctcatataaaatttagaataaacatgaaagttttagcatgtccagactttagggatttagrctttatgaaggtctcaagcctgtctcctggaattccaacrttgtgatgactcaaattttatcagtaaatatggaaaaataagctaaagttcttgagaaattgctatctaataagtgattattttattttttttctagttttaaaataaaaaatctttactatttattagattcaccagtgttttatactgggggtccccaacctttttggcaccaaggactgtttcgtggaagatcattttccacagggcagggtgggggaggggtggtttcaggattattcaagtgcattgcatttgtcgtgcactttatttctgttattattacagtataatatataatgaaataattatacaactcaccataatgtagaatcagtgggagctctgaacttgttttcctgcaactagacagtcccatctgggggtgatgggagtcagtgacagatcatcaggcactagattctcataaggagcacataagctagatccctcacatgcacaattcacaatagggttcgcactctaatgagaatctaatgccgccagttatctgacaggaggtggaggtcagacagtaatttgagcaatgaggagtggctgtaaatacagatgaagcttcacttgcacatctggcactcacctcctgctgtgtggcccagttcctaacaggccatggatttgtatccgtccatgtctgaggggttggggacccttgttttatacaattctaattgtgtcattgaatttcttttttcttttttctcattgttaggaggctaaaaacaaacttgtcttgtgcagattcgtcgtctttaccaccaaatttttgtcatggtatcttgtcttttttttacgtctttctaaactgccttaatccttgtaagggaataggtaaggtgtaaatataattaataaggtgcaaggaaatgttattagaaagaaattagattgttatttgaaaacatacagagcctaaatgtaagagaaatgtcctaagcaaaacttattaacaggaaatttactgaattggaaagtactcttgattttatgactaatatgaattgaggtattcttatagacactcagagattcctgtacacatgttacttgtgtttttccaaaactatatacgtatagtctttttacaaataaacagtggccaccaagaaaaattacagcagtacacataagacataccgtatacatgatactcaactttgtctatatcctttgtgttcaagtttctagaaattttcatctttgtaaggatatcatgtgagtgtgctcaaggtttgttctaagaatctagctgagcacagtggctcatgcctgtaatcacaataccttgagagtctgaggcaaaaggaacatttgagcccaggagttcaagaccagcctgggcaacatagggagacccccatctctattaatttaaaaaaaaaaattacctggacatggtggcatgcatctttggtcccagctacttgggaggctgaagcaagaggatcaagaggatcacttgagcctggaaggtcgaggttgcagggagccacagtcatgactctgcactccagccttggtgatacagcgagaccatgtctttaaaaaaataaaataagaatctatacacaattcatggaatgatgttgttttatagttttactgtatatttgtttctgtcataacttccaatatcccaaaaactttttaattatttttattcaagacatacatacagaagcaggccaggcacagtggctgatgcctgtaatcccaacatttttggaagccacgatgggtgggttacttgagctcaacagtttgatgctacagtgagctatgatcatgccactgcactgcagcctgggcaactatttaagaaaaaaagagagagagagagaagcagaaattcaaaggacactttttgaaatgyacttaatgtaaaggctgctttgcatggttaatttattcctattaaaggaatactacattcctgccacttttctaggtggtgaatttatagcagcgaccaggtaaatattgctgtcctcagggtgcttacctttcagtgggtaatgctttaaacaaaatatctagtatattagatggtaataagaaccttggagaaaaataaaacagaaaagagtgttcaggtctagcatgaaaggttacactttcaaatctgatcattagggaaagtctcacccaagacagtgatgtttaaaaatatttcaagaagcaagttgtgcacatattagggagaaaaacaatcagtgaataaatagcaagtataaagtctctatgccaggagcatagcatgtttaaggaatagccaggagattaatatggctagagtaaaatgagcaatgggaaaagtaagtaggagatataattacactgggaaagagtctaggggcatattaaataagactttataggtcattataaagactttgttgtttttgttttgttttgactctgaatgagatcaaaagcctttagagggttttgtgcagacgagaaacataacatgacttatattttagtagggttattctcactgttatatggacaaaactgaatggggcaaagatagaaatagggagatcactttggaggtcattgcaataatccagtgggagatatgatgacttggactagagaattagcaatggaggtgttaagatacaatcaggctctggatatagtgtgtaggtagatttaatagaaattgctgttgaattgaagaatagtttacgagagaaatgagtcaagggtggaagcttcattaactaagagagggtaaatggggataatttggtctagttttgtataaattatggggaaagtcttggtctcatagtttagcattccatagtacrttctccatagtgtataagtgataggttttactaatttaataatttttttgtctcaaacttgtgacttagactttgataaacttctgtttatgatagatggatttttaattgattttattgtttgtattttataatggattttaaggcatattagtgaaaacacaacttaaaatttattttcttaccttactaacattccaaaaaaggaacrtatactgtataatgtttttttgtctcactaatatattcgtatccctcttcccccttcttggcaaacttgtctgaaagtatactgttgcatgttatgtcatggatgtaccggagcatgtgtgtaaaatacatgtcataaatggaagcagctggtttcctatgcagttaagagaagaaatgcatacagctgagctcttcaaacttcagaactcattggattcagtttctatcctgtgtaagcatgctatgatttcaaatagtacaaatgtataacaagttaccttaatagcttaaaaaattattttgtttcgatagttgaactactaaatctgttttattctctttccctctgccttcagtccctacttacctatcctacctcttgaaaagaacattacacctatagtcttagttttaaattcgaatctgaaaaggccttggcaagagttgggaaaaagttatcatctcaaagggaaaagctgaattcatacacaggaactgcaggattactctggcgttttactagtcccttgcagcactcgcaagtcccataaatacctaatggaaaaacagcagaaaatgagatctgcagcagccttttgagatcaaatttatgttgctgaacatttttttgaggttgagtgtaaaggtcaaaagaaagtgggtagattaaagttgctgatttttgcaaacttaaggccatttttaaaggtttctctttctgtagcaagaaaatttcaagataaatggctttgcttcattagctgaaatgtcatgtcttcctttaatatctgttacctgagacatttagtgatttagtggtatttatatacaacaaataaaaatctcaatccactttaacaaatctagataaatttatgaaattgcagatctttccaagaacagcatgatgataaattaatgtatatatacatgtttgtattgccatgtatatatgtatcttaaatgacatattttagatgtttttgtatgatacagaaggaaaagataataatcaaagttttgtatttttaaagtataggttattgatccagcagtgtaattataaccatctttttttaaaattatttcttatattaaactattacaatgaagataaatgacctcaaagaaaagatcgtgcatgtaatagcattaaaacaaaattcatggatgcttttaatggtctcttaccttttgaacaacattttaacacgttgttactggtgcaagcctatatctaagaaactgtgagttactagggtactgcagacttgatgcaatgaagaacaataaactgccatttctggacatctctatcctgagttgatagtacagaaagccaccacatatgttaacgtgaagttatagattatttatatctccagggcttgcttcgtgtctttgatttcgtagttcagattgcccagttattagtacttagaattcaaaagaataagataaaaaatttttacttaatacattcatttctgcatcacaataaagagttttcatggaaattatccagataatttcatagtagaataatatatgaaatgaaatcttttcttttttatggtagttgataattaatagtaaatctattcagtttatctctaagaagtcagattatgggagacttgtctctatttttctctatttaattttcccaaaaaaattcataaggaaaatattaattttcatttaaatctctatattaaacattaagtgatctttttatgccttggaatcacaatgaatataaatgttatttttattatagttgattttgcagtttcaattcatttctattaaatattttaataaacatttttatgaaactaggtagaggtcacaaatctcattagtcactgacagccaattctcaaacccaggtcttttcctgtataccacatttcctcattagttctcactacactgtatggctatttccgcctcttaactttttatattttattacactcttaaagtacaactgtacttctcttctcaagtgcccttttctattcagtaagggtcccaggtgagcaatgattctgactggggaagagggagaagatggtgttgtagcaagtagtattaaaaggcccttaggaaggtagatagatgtataattttgtctctttcttctcactgttttcgtaaagacaaaggctatgccttaacttttttgccattcttatttttgagactacccattagggattgtttttgatgttgttgagatgaagtatttggtgaagccaaaacctccttgacttttatagttttaataagtttgtgctctccaaaccttcataaagtaatgtctagtgatcctttcagatatggcatgctgtcatgtcagctttaaataattgttaatggcatgatttttaacattttacctagttagaatcagtaaaatttattatatatactctttgctgatcagtagagcctcttatgaaggagtcagtatgatgtgctggatagagcattagatggcaaattgggcctcagatattattaggcatagttttgccactaatttgtataatgtgcaagtttaataacctttctgggcctacagttctcctcttctgaaatggaaagatgaataggttatctctaaagtctatccagatctaaagatctattttattatagaaaacttttaatcatacacacaaagatagaataaaaataaatggcattatgaatccctgtgtattcattacctgtcctcatatgttatcaatagtaaccccttagtatcttctaatacctagttcatattaaaatttcaattaaagtatctagtccatattaaaatatcatctcagtaataatagtttctagttgctttgttttgttcaaattataatctagacaaggggtgtgtgtgtatgtgcatgtgtgggtgtgtgtgtgtgagagagagagatctagttgtgtttttaagacttatggtcaaaaatacatatcataaaatttcccactttaggctgtacatggtggctcacacctgtaatcccagcactctgggagaccaaggcaggaggattgcttgagcccaggaatttgagaacagcctgagcaatgttgcaaaaccccatccctacaaaaaattatgaaaattagccgggcatgatagtgcgcacttgtagtctgagctactcgggaggctaaggtgagaaaatcacctgagcccaggagtttgatgctgcrgtgaactgtgattgcaccactgcactccagcctgggtgatagagtgagcccttgtctcaaaagaaaaatattttttaaccttttaatttattttttagagatagggtctcactgtgtcacccagaactggagtgtagtagtgcatagcatagctcactgtaaccttgaactcctggggctcgagtgatcctcctacttcagcctccagagtagctaggactacaggcacacaccacctcacccagctcattttaaaaattttttgtagagctggggttttgccatgttgcccaggctgttctcaaactcctggcctcaagtgatcctcctatcttggcctcccaaaatgctgggattataggcataagccaccgtgcccagtctatcttaaccatttttaagtgtaaagtacagtaatgttaattgtatgcacattgtgtgcaatagatttcttgtacaaacaccttgcaaaacggaaactctgtagccattgaacagtaattcccctttgcccccttcatacagccccaggcaaccaccattccactctgattccgtgaatttgactattttagatatttcatgtaagtaggatcatggtttatggctggctttttatggctggcttatttcacttcccttaccatgatgtcctcaaggttcatccatcttgtagcatatgacaggatttccttctctcttttttttaggccaagtaatattccattttgtatatataccaccttttttttttttttttttgagatggagtcttgctgtgtcacccaggctggaatgcaatggcgcaatctgagctcactgcaacctctgcctcctggatttgagcaattctcctgcctcagcctccggagtagctgggactacaggtgcgcgcaaccacacctgactaatttttatatctttagtggagacagggtttcaccacattggccaggctggtctcgaactcctgacctcaggtgatccgccttccttggcctcccaaagttctaggattacaggtgtgagccaccgcgcccagccacattttctttatacattcatctgctgatggacatttagattgcttccacttctttgctattttgaataattctgcgatgaatatgggtgtgcaaatatctcatcaacatcttgttttcagatcttttggatatatttccagaagtgagattgctggcatttttaattttttgaggatacttcatagtgttttcatagtggctttgtcatctaacattgtcagcaatagtgcacaagcgtttcaatttctccacatcctcactagcacttgttatttttcggtttttttttttaatagtggtcatcctaatgagtatgcaatatctcattgtggatttgattttcatttccctaatgattagtgatgttgagcatcttttcatatacctgttggccattctgtatcttctttgaaaaatatctattcaagccctttgacaatttttcatttggattctttcgggggtgaggtgttgtggagttccttatatattctgaatattgatcccttattggatatatggtttgtaactattttctctcacttcataagttgcctttttactctgttgtttcctttgctgtgcaatagtttgtaagtttggtagtcccatttgtcttatttttccttttgttgcccatgcttttggtgtcttatctaagaaattattaccaaattcattgctgtgaaacttttttctccagtgttttcttcttggagttgtgtagttttaggttttaaatttaattgtttaattcattttgagtttatttttatatacacaataaggtaagggtctaactttattcttttgcatgtggatatcctgtttttcccaccaccatttctcaaagaaactatcctgtatgcattatcagtactatactttttcttttttyttttttttttgagatagattctcactctgttgcccaggctggagtgcagtggtatgatctctgctcactgcaagctccgcctcccaggttcacgccattctcctgcctcagcctcccaagtagctgggactacaagcacctgccaccacgcctggctaattttttcagtttttagtagagactgggtttcaccatgttagccaggatggtctcgatctcctgacctcgtgatccacctgcctcagcctcccaaagttctgggattacaggcttgagccaccatgcctggcctatcagtactatactgttttgattgctgttgctttgtgtaatatgttttgaaatcaggaactctgaggcctctatctttgtttttctttcttgagattgttatggtatttgggggcctttgcagttttatatgaattttagaatttttttctatatctgcaaaaaaatgtcattgggatttgtataggaattgcatgtgcaaaggaatctgtacattcctttcagtagtatggatattttaacagtattaagttccaatccatgaacacaggacgtcttttcatttattggtgtcttctttaatttctttcakcaatgttttgtggttttcaatgtaaaaatcttgtgcctccttggttactcataagtattttattcatttttaatgctaytattaatatatttgttttcttaattttctttttgggttgttcattgttagtattttcaaacacaattaattgttttatgtttattttgtgtcctgcaactttgctgaatttatttattcctcctaataggtttttttgtatgtgcagtctctaggctttttatacatacaagattgtgttatctaaagaaataattctacttctctgtttccaacttgtatgcctcctatttcctctttcctttctttctttctttagctgactgctctggatacaacttccagcactactgtgttgggcctggtggtatgctcctgtagtcctacatacttggaaggctaaggcaggagaatcacgagttcaggagttcaaggttacagtgagctgtggtcataccactgcactccagtctgggtgatagagcaagatcccgtcggtaaaaaaaagtggcaaggggggcatccttgctttattcattgtctttgagggaaagctttctgttttttaccatcgagtattatattacccatcggcttttcatatacagtctttattgggttgaggtgatttcctctgtgccttttttttatttaattataaaaagatgttgaattttgccaaatagtttttctgcatcaatagagatgtcatctagttgtgatgtctgataagattcttctttctgtaagtcattttcctcccctccactccattttttagctttcctttggtttgtcagagaagccaggtcttacatttgtctcatataatgttctacaaggttcagtgcttccttttgtagtgttgttcctctatcacctaatttcctaataagacctagaaatgcattgtcgtctggtagctactagctacatgtggctctttacctgtacatttttaaaaattaaagtttaaaattttcagccattgtagccacttatcaagtgctcatatagccaaataggggtagtggctaccatatkggatagkgaaaaggaacatttccrtcatcgcagaaagtggtctcatataaagaactgatatgacagtgttttttccatactctattttgtctttttccacatgccagctatctcaacaccatttggggctatttttagatgtcataattttagccaatactaatgggtatttattgatatctcattgtggctattttttcatcaatagttttttgtttgttttggggggcagattttgtttgtttgttttcatttttttgagatagggtctcactctgccacccaggctggaagacagtgatgtgatcatggctcaccgcaaccttgaactactgggctcaggtgattctcccacttcaacctcctgagtagctgggactgcaggtgtgcaccaccatgcctaatataaatatatatatatacacacacatacatatacacacagacacacacacacacacacacacacatatagagagagagccactgygcctggcctaaatagttttattttgaaataattttagatttatagaaatgttctaagatagtaaaaataarttccatgtactcttcacctagcttctcctaatattaacaccttaaataactgtaggatcttcatcaaagctaaattaacattggtacaataccattaactaaactacaggtttattttcccagtttcttaagtaatgtcctttttctgttccaggatctgttggaggatactacttgacatttcattgtcatgttgctctgtcttgccttctcttttgtggccttgacacttatgaagagtagaggtcagatagtttgtaggatatctttcaatttgagtttatctgttgtttccttgtaattagactgaaattatggggttttgagaataccaccactgaggtgattttgctttcccaatgtatcacatcaaggtgtacrtagtatcaatctgttactgttagtgtgaaccttgaacatcaagttaaggtggtgtccattgggtttctccattgtctatttgttcctttccatatacagttcattagaaatgaatcactaaatccaccccacacttgggggtgggggggtaaatacaaaatgaatagtgtttagaaacctcatagaggaaggatatagccaccacagtaattaataaatattagtggagagatattatgaaattatgcaaatattctagttttttaaagttttacccactgatttatagcatttattagtggatattgcctataccaattacaactatggtgttctaatggtgattttctatttccctcatttattctatatttaataattcaaattctttaaggaagatttgtctctttgcttccatttttaatattctttaatttttttttcgagatgggttctcactctatatctcaggttggagtgcagtggtgtgatcgtgactcactgctgcctcaaccttctgggctcaagtgatctacctgagtagctaggactataggcatgtgccaccacgcccaattaactaattctttttttaagaggcagggcctcactgtgttaccgagcctagtctcaaatgcctgaactcaagtgatcttccctcctcagcctcccaaagtgctgagatcacatgtgtgacccaccacacctagtctgtattcgttttttacaaattcagtagtcttttcttttctttctttcttttcttttcctttattttctttctttctttttctctccccctttcctctcctttccttcccttcccttccctttctttcctttctttcctttctctcctttctccctcccctcccctcattctctctgtgtcatccaggctggagtgcagtggcgagatcatggctcgctgaaacctcagcatcctgggcttaattgatctcccaccttaggctcccatgtgtgtgggkgtgtgtgtgtgtgtttgcatgtgtatgtagatggaatttcactgtgttgcccaggctggtcttgaaccttctaggctcaagcaatcctcacaactcgcccttccaaagtgctggaattacaggcctgagccactacacctggtttgtttccatttttcataaattctgcctggtgcggaggctcacgcctgtaatcccagcactttgggaggctgaggtaggcagatcatgaggtcaggagatcgagaccattctgaccaacatggtgaaaccccgtctctactaaaaatacaaaattaactgggcgtggtggcacgcacctgtaatcccagctacttgggaggctgaagcaggagaatcgcttgaacccgggaggcagaggtttcagtgagccgagttcacgccactgcactccagcttgacaacagagcaagactccatctcaaaaaaacaaaaaacaaagcaaacaaaaaaaaacaaaacaaaaaacccttaattgtcatttatatcaatagggctcatggatatttatttagttctttgggttataatctaaaactgtgtcacttttactactcaaattcgagatttaactattgagagctttgtcacattggcttctgtatcattgtgacagacctgtcatctttttattactttcttactttctggcactacaagatcatctagactttctgtaccccagcttgtttctccaaggatcactggttcactttatcaaagagaaggaccaggcatggtgactcaattctctaatcctaacactttgggatgctgagacagaaggatcacatgaggccaggagtttgagaccagcctggacaatgtagtaagacccccatctcttaaaaaaaaaaattagccaggcatagtgacatgtgcctgagacctagctacttgggaggtttaggcaggagaattgcatgagcccaggaggttgagcctgtgtgagccatgatcatgacactgcactccagcctaggtgacagagcaaggccctgtctctaaacagagaaagagagagaaagagagagcgaagagagaaagagagaaataaaagaagaaaagagagagagggagaaagagaaagaaaagaaagaagagaagagagaaaaaggagggagagggagggagggagggaaggtaggtgggaaggtgtttcaaaaccagcatctgagcactgttttctcgtaagctactggcagtaattgcttctaggttctctcagcagatagaattaggaaatatgcttatgtctgctaactcatgtatacatagacacacattgtatttaatcctgttacctatgtgtgtttataatatatataaaatcgtgagtttataatggtatctcttactctaattcagtaccacagagttcatgctagcatttccctttgacttattttaacttccttctctgatagtgagaaagctggctctgattatttgacatgtatttacttatttatgcaaacctagtatacatataaagtcgtttaaaaattgctggctgggtacagtggctcatgcctgtaatctcagcactttgggaggctgaggcgggcagatcacctgaagtcgggagttcgagagcagccttaccaacatggagaaactgcgtctctaacaaaaatacaaaattagccgggcgtagtgacacatgctgtaatcccagctactcgggaggctgaggcaagagaattgcttgaacctgggaggcagaggttgcagtgagtcaagatcgtgccactgcactccagcctgcgtaacaagagcaaaactccatctcaaaaaaaaaaaaaattgctgaatcatacctctgtgataaaccaatttaccagaatacaatgcttatatatagttctttttgtctttagcactatagtatgtaaaggaaatactgttggctacagttatttagggtcttttcattcccaccactttcagtaagtttatttcatacatatttaatacatttagactaatttatcacagtttgcattccatcttgggttcccttaacatcctaattgatatttttaaattagtatttgctgaaagaaacctaaaatattgctcctttacggtagttggtcccttccacctgccaaccatgggaaaagttaatctgtttttcatctctgtagtttggcattttctagaatgtcacatacatgaaattataaaatatgtagactagtggttctggcttttttttacttagcaaaattcatttaagattcattcttattgtgtgaatcaagtttgtgtttagtatgtaaaatatatagtttaaaccagatattttggggctgatttctgttattgtatggtatgctttctgtactatgaggattttttaatttgtttctatcttttgccatatcctcccactttggtttgtgtgtatgtttcttccaataatttgtgagacttgtatttttattcaagtgaccacatttagatctgtaacttcatgtaacatgattaagatttttttatttaaaaaaaggtcttttgagacatggtctcactttgttgcctaggctggagtacagtggcatgatctcagcttactgcagctgcaacttcccaggcacaagcgatcctcccacctcagcctcccgagtagctgggtttacgggtgcatgccaccaggactggctgttgttttacaatatgtttttagagatagggtttttccatgttgcccaggctggtctcaaactcctaggctcacgtgatctacctgccttagcctcccaaagtactgagattacagtagtgcaccactgcacctagccaagattttttaaaagataataagtattctttttcggggaattcttcattctcttttcctagaagatttttctttcccttagtgtttttaagaatacttagacctcaattacatgatttatcagcttttcaggatctccttgacccctggctataaaagatgaggaaatctttcttaccctcatagtctcacaccttccctctcccaattactctattttgtatatttgttccygagatttataacatttatattgttctgtaaccaaacatattctcctccctcctgcaaatttttgatcttattcataacagttaaaaggcaataaacagaatcaatgtttatagctaagcctttcataatagtcattttatctcttggtttgctgaggtttgttctggtggtttcttcagaaagtcacatagaaactatatttcccaaattattttatgttctaaattttgtctcttcatttatacttacatggtagtttgaccagatacaaaattaactaggctatctttccttgaggaggtaatagacattgctcttttattatagggttttttggtttgtttgctttaatgagatagggtctcactttgttgtctatgctgatctccaactcctggcttcaaccaattctactgcctcagcctcccaaagcactgggattataggcattagccactatacccagcctatcttagaactgtatttatttatttctagagacagtgtttcattatcactcccaggctagagtgcagtggagccatcacagctcattgcagcctcaacctcctaggattaaatgatcctcctgcctcagcctcctgagtgtcagggactccaggcatgtgccaccacacctagctaatttttaaaaaaaattttcatagagatgagtgtcagtctgttgcccaggcttgtcttgaagtcctggccccaagcagtcctcccaccttggcctcccataatgctgggattaaagacatgagtgaccacacccagcaattctttaaatgatactttgaagaacctgagcacgcacatatatttcttccctctttgttagtaactctcagttccttatctagctttatttttctgtcacctggtgtatatattccttggattatttgtttgctgtcatctccatctatagaatgcaactatcaatagtaaagggatttggtctgatttgttctctgttgaattccaaatagcttgttagtgtttaatacttagcatatagctaatacacatttattgaattaataaggtcagaattcatgattctgccccattctccatccttataagtactttgatgggtttgattgcttacaaaaggattcgtttcacattttgaattcccgtgcctttactcagatatgtcttggtcttcactactgtgtgtcagtgttgtgctctttccaactatatttttctgtgctatttctagaaagttcttccacatgtatctttttttaaaaaatatttttttgagacagggtcttactctgtctcccaggctggagtgcagtggcatgatctctgcccactgcgacctctgcctcctggtctcaagtgatcctcccacctcaacttcccaagtagctggaaccacaggcacgtaccaccacacctatctagtttttgtattttttgtaaagacgtggtttcaccagttgcccaggctggtctcaacacccgggactaagcagagctcacctcggcctccaaaagtgctaggattacaggcatgacccatcgtgcccagcctcacatatctttatattaggattgcagcttctgttttctactattcccactggcctggtttatcattctctatctcttttagccactttgttttttgttggtttttttttttttttcattttttttctccctacccctctcttttagccactttgaattggtttgttttagtgtctctttgccatacagcagagaattttcttttgcttcctgaggcaatctgaatatactttcatgtcaataagctgctgatatatttggcctcaaacctgtcatgttattctataattactaaatatatatgtatactgtttttctgtgtgatttattatctctgctgtttttaaattttttattctggcattttggaaaggtttatatttcttttctagccattagcttttcttttaagtgtgctttttatggtggccttaatccccatttttcttataacattctactctccaatcagttttaaatgatatcctttgattctcacctattatctatacaacagtgattttattctgcatttttctctcacttctttgttttaaaattgtattacttctactttgtcagaatatgcagtgcttacaaactatgttctttccatcctttttaatttataattataattatcttattaaatgtaatgaggtttaccaacaacagtcctgtgtttgagttttcccccaatcatgcttggatgaagcttatcttctaatacatttctcaggaaaggcgtatgtgtacagtatcctctgtgttcttttttttctattactttatactttttcctacacaaagacagcttggctgcatataaaatccttgactttatttcttggaaataatgttctagttttgtcttgctttgtgttttgctcttgaagtctaaggcagcctaattttctttctttctttctttctttttttttttttttaaagagacagagtctcactctgtcacccaggctggagtgcagtgtggtatgatcatactttactacagccttgatctcctcagctcaaacaatcatccaaccacagcctcctgagtagctgggactacaggcatgtgccaccatacctggctaatttgttgttttttgttgtttatttgtttggttggttggttggttttgtttttgtttgttttttgtagagacagggatcctgctatgttgcccaggctgttctcaaactccaagcctcaaatgatcctcccacctcagcctcccaaagttttaggattataggcatgagccaccacacccagtccctagcctaattttcttattcttatttttctaatttcttactcttaattttatctttttgcctgtaggcctgaaaatactgtttcatcattaaggtctaataattttaccaggatgtgtcttagacctttcttgtttggggtcagtttttccaggtatgcaataataagctggaaatatagtttctagcttatagagtaatatggtagctcatgccttgcacatgcttttacaccagcagcacatcttttaaatgtgtagatttaaattttcatctatttctggaaagttttcttagactatattttaaatatactattccattgcgttattttttcctcaaggattctgtgtttatgttggatcttcttttcctgtcttccatttcatctactttctctctttgttatgtctttcttctctcattttcattcttttggttgtttgccttcattttttcagtgtacctttttagattttcactttattaatgtattcagcatggtgcactttgtaatttatttctgggattgttttttccttttattgcatttcttccctgattactttgtcctagtaatgttgaagacatggtcatatattgttttatttgtacttcttgtggcttattgagagaatacgaagataaatttggtttcagattattgccattatcctgaaatagattttgaactgtttttctgtgctactactttgttactctaatttaggaatgccatttatattatcttagattcacttttcctcttgttctgtccttttctcaccaatttattttattacctttgttagttcctatttcattttgcttgctttacacagtcctgacctccattttatttactatatttttatcagtgtttttttctccatttctttgatggttgcatttttctttcacactctcttgagcccagccagtttgtgtttcaccatctgttaatatgtttaattataacttctctatactttagtgtctctgcttaatagggataattgcttcatgaattttgtccatgcatttgcttataattgatgtgtgttccattactatatatttctgttaaatgtcttgtatgtgtcatttactttgctactttttttttcttctgtcctcatacaaattctgttctggttcctttttcatttctcatcttcgaatatggtattttcctacattagctattttacatgaggtttaattaaggaaggggttacacatgtatttcatactatgaagaattgtccatatgatgcacatatgccagttcaattaatggtcttaactcaggacaatacaaatagtacctattgtttcctaccactattcctaagcaccttatatcagattttcttttccttaacccttggagacatctagggaagattcatcgtagtttttagtcactttcagctgttaaggaaattgccctgcttttggttatttaaacaaattttaagtctgttgttaaaaatgtcagtcttaaactgtgtttgtattagtcctttcttgcactactatgaagaaatacctgagactgggtaatttataaagaaaagaagtttagttggtttatggttctgcaggctctacaggaaatgtggctggggaggcctcaggaaactttcaatcatggcagaaggggaagcaggcacatcttacatggctggagcagaaggaagtgagacaagggggagacgctacacactgttaaacaactatagctcattgaaaactcatgcactatcacaagaacagcaaggggaaaaatccaccctcatgatccaatcatctcccaccaggcctctcttgcaacattggggattacaatttgacatgcagcttgggtggggacacagaactaaaccatatcattctgcccctggcttctcccaaatctcatgtctttcctacagtgcaaaatagaatcatcccttcccaacagtcccccaagacttaactcatctcagcattaactcaaaagtccacaatctgaagtctaatcagagacaaggcaatctcttccacctctgagcctgtaaaatacagttagttacttccatgatacaatggagatacaggcattgggtaaatccctgttccaaaagggataaatcagccaaaagagaggggctacaggccccatgcaagtccgaaacccagcagggcagtcattaaatctttaaactccagaataatctttgactctatgtctcacattcaagccacactgatgcaacgagtaggctcccaagggcttgggcagttctgcgtctgttgctctgcagggctcagctcccatgtcagctctcaagggctggcgttgaatgcctgcagcttttccaggtgcatgatgcaagctgtcggtggacctaccattttgaggtctggaggacagtggccctcttctcaccrttccaataggcagtttcccagtggggactctgtatgaggactccaaccccacatttctcctttgcattgccctagtagaggttctccatgagggttcacccctgcagcaaacttctgcctggacatcaggtgtttccatacgtcctccgaaatctaggcagaggctcccaagcctcatctcttgccctctgcatacccacaggctraacactaggtagaagctgccaaggcttacagcttgcaccctctggagcagtggcctgagatgtatctggggctcttttttccatggctgggacgcagggagcagtatcaaggttgcacagggcagctggtccctgagcctggcctaggaawgcactcttcgcttttatgactctgggctggtgatgggaggggctgctgcaaatgtctctgaaataccttagcagcattttccccactgtctcggctattaacatttggctcatttttacttatgcaaatttctacagccaacttaamttcctgcccagaaaatttctcttttctaccacacggtcaggctgtacattttccaaactttccaaattctgtttcccttttaaatataagttccagtttcagatcatctctttgctcacatatatgagcatatgctgttagaagcagacaggatacatcttgaatgttttgctgcttagatatttcttctcccagataccataaatcatctctctcaagttcaaagttccacatttccctaaagaaggagcacaatgctgctagtctctttgctaaagcatagcaagagtgaccttcactccatttgccaagaagttcctcatctccatctgagacctcctcagtctggacttgactgtccatagcactatcagcatttaggttacaaccatttaacaagtctctaggaagttccaaacttacccgtatcttactatattcttatgagccctccaaactgtttcaacctctgtgtgttacactgttccaacgttgcttccacattttcagtcatctttatagccatgccccagtcgtaggtaccatttttccgtattagtttgttctcgtactgctataaagaactacctgagactgggtaccttagaaagaaaagaggtttaattggctcatagttccgcaggctctacaggacatatggcttgggaggcctcaggaaacttacaatcatggcagaaggggaagcaggcacatcttaaatggctggagcagaaggaagagagacaagagggaggtgctacacactgtttaacatccagatctcattgagaactcgctcattatcacaagaacagcaagagggatatctgccccactaggcccctcttctaacactggggattaaaataaacacgtgattcggatgggaacacaaatctaaacctatcagtgtttacattttttatttttattatttttattacaaagctcagctttccaatatactctgcttataaactgaaatttttaatattatttaaaatgtcaattctccctacagtgagccatagaatcaatgcctttccaaccaaaaaacaagatttttgtgaaactttaccatacatttctatggaaaagcaaaacggcaagaatattcaaactactcctgaagagggacaacaaagtgggatgtagcctaccatatatctgaacattctgtgatttttgtaatatagcagttcgctattaggacagtggtagaccagtgtaatgggacagagaggacagagacagatgccttcatttccataaggaaatggttgattattcaataaatggtgctgcgataattattttttcataacaaaaaagtgaaatcaaatttctgttttatactatacacaaaaatcaatttcaggtgaattatagatctaaatatgaaggtaaaatgacagagcttttggaaggtaacttttgagaatatctgtatgatctcggggtgtggaaaaatttcttaagcaggacacaaaagcataaaggcaaagactaataagttgtaccacattaaaattaagagcctttgtttatcaataggtacctttaaaagattaaaaggcaagccactgagtaggagaagacatgtgtgacacaaataacccagaaagaattaatatccataatatattttcaaaattttagtaatcaatatggaaaagacaacacagaagaaaaatagtcaaaagataccaacaggaaatttaccttagaagaaaatcacatgtgtattgaaggaatgaaaaattgttctacctcatcattaattagggaaatgcattagccgggcatggtggcacatgcctgtattcccagcaattcaggaggctgagacgggagtattgcttgagcccaggatgtcaaggttgcagtgtggtatgatcttaccactgcactccagcctgggtgacagagtgagaccctgtctcaaaataaataaatwaataaataaataaataaataaataaataaataatcctttgaaaaataagggaaattcaaatgtaatccacaatgaggtatcattttataccagttgataaaaattttaaagtctaaaaatttcaaatgctgcataaaattagaattactgactcttacacacttgaagatacaaattccctactatccccagaaaatgttattgcttttagacactaattatatccaatatctagaacttagtctaataaactatgaacaaggcctctaccaagaacacttaaaacataattgtgagaacttaaaatgtaaatggaggtgtgttttaaagatgtttatttattagaagactcaatactgtaaagatgcaatatttgtccattttagtctgtaatttcaatgcaattctgattaaaatcctaacaagtaggggtgtatatgagtgtaaattgacaaactcatttttatatgtttttggaaagtcaaaggataataatagccaagaccatcttcaagacaaataagatgggagaatttactggtgatatggttaggctttttctcccatatccccaaatctcatcttgaattgtaatccctataatccccacgtgtcaaaggagagacctggtgggaggtgattggatcatgggggcggtatccttcaggctggtctcatgatagtaagtgagttctcatgagatctgatgatattataagtgtagttgtcttttccacacttgcacgctctctctctctctcgcctgccaccatgtaagacgtgtgtcttccccttctgccataattgtaagtttcctgaggtcactctagccatgtggaactgtgaatcaattaactcttttttctttagaaaatacccagtcttgggcagtactttataaccgtgtgagaacagactaatacaactggatattgagtcatcttataaagttaaaataataagacattgtgacattggtgcagtgataaataatggaacagaataggaaacccaaaaacacaccaacaggtatagttttccattttgattgttcctttcattagatgtttaaaactttataatgaatatgtacttttagtcaaaatttatttacttgagaagcaaagtgatgtatggattatggcctctgaggctataatgtgagtttgacccaaataatgatccaaatgtgagttccagtcccagttttgtcctatactactagctgtttgagcgtattcaactggtctgtggttcttagtttttttatctttaacacaagataataaaattacctctcagaattatggtgagaatttgacataacaagtataatcctgctggcacatgctgttcccttgatgaggggaatttgttattatgtttcttaggaacacaaaacttctgtttattcttggtaagaattcatgtttcccagatctatgtgtactatttgttatatttaaggttatcaaattgtatccttggtaatggttgccactggatcttttttggaatatgtacaactccttattcaaagtggctttctaatcatgattagttttttgtagttttggaagagccatattactgccctgcattcataaagcagtcttgtaaacactgattatgatagtgttttgaaaaattaaaagcctccaaaatcactaatttttaaaaaataatgcagttaaatatagaaaaggattagccatagatattttgtagttaaccctattatcattaacctaagtgaatagaacctaatttttgtacttgctaataattgctattaagaattttgttaatcgtgtgtggattggtgcttgagttcagaatgawtgattgataggggacaactctaagaaatayagcacttacattaatgttttattaaacagaaaaagctttaatgttttattaaacagattttaagagttacagtcttaaaatctttattatttattttatgaaatatttcattttgttttttttctgggcactttaaaattgagatgaggatggtagaatttgccagtttattttttggctattttttttttaacccatcttattttgagaacgaatttagtaatatttttctcaacatcctgaaattgtgtaacctgtagaaacttcccactgtctttttaaacttattcttaaataccacatttaatataggataaataagtcacaaagcttgcttatcaaaacagaatattgtattcagctttccatcggagcttttggggaagacatcacagtattgtactgtctcccaagatgcaaagtatcaggctttaaataatgaaaataagggaaatgccaatagaaaattagaaaaaatgttagaacagttaaaaacagcatactgaagcctgcattatttggcttatctaaaaatcatatgttttcaaccaatcagtacttatagtcattctatttaatcttttaagaaggagacataatccaccctcaccaagtgattcagtgtagcatcctaactaataatgacttaatgtgtgtccaaatggcatgtaatgagaagtatgaaacattgtctgtatactttcttgcctaagatacttaactgagtctaatcataaagttcagacatatcttcactgtggaacatttctacaagacaacggcctggactcttcaaaaatgccactgtcatgaaagacagtaaggagaatggaaggagactttcagattaagggagactaaagagacttaagcaaatgtagtattagatccttgactatatattagataatactacatcactgccacattttgtgcttatataggaaaatctccttggtcagtatgtatcataatagggtcataatgtctgcaacttattttccagtggtttgaggggaaaaaagacktgtgtgtgtgtgtgtgtgtgtgtgtgtgtgtaaagaatatgttctaattgatacatatacgtaaatagcataggagtgttcatttgtactactctcaattttttctataggcttggtttcaagatgaaatttgaaaaaccttaagggaaaatatgtttaaagtatgataataacaaattagcacactagataaactttttatagcttttgtgagtttttttccttcagaaaatcatatttatgtagatagcaggattaaagaaaacttttctaaatttcagatgtcagaaatggagacatctaaattgtttttccatttcatctctaaatgctaatgaaaactggacttttacgacattaaagacatttaattgatctctgtgggatttcatgtttagcttttttcaacagctatatattgaacatttaggtgatgagattgagtagctaatcttagaggcgctctattgagattgtccagattccaaccctgatcccacaacttaccacctttgtgatcttggacaagtaatttgagatatctgtgcctcattctcctcaaatattcaacaggataataataatacataccagtttcttaggattgtagtaatgcttaaatgaattaatatatttggagcacttaggaaagagccaagtacatagtaattttctaaaaaytatacctacttattatgtggatctttgctgaggaaatatgagtaagcatacaagactggacaggctttgagtagtgaagatgttttactcacaagcaaggtaattatgccttttatattaaaagaaagttcatatggaacactctgcttatatgcttcatcttcttttcaatcagataataagttctccaatgtagaagggaaatgtcagcctcacacataaaaatatacctgtcagagattatataagtgtcaaaataatactatctagagaaattcaggacatttggataaataaaggaatgtcatgtagtttggatagaacatagagaagtgaggaaaggagacattcccagatagaataacagctcaatgacttgaacaaggatacagatgcatgtagtatacacagtggactagaccatttatgtgtgtatgtacatatgtgaaaaaaagtctttgaaatgtttgcatttcaattaaattctgattttaagaacttattttccccctgtatcctgtgtgtgctagcattctgtttcctaaggcattctttcagacagacatacctagtcctgaaaatgctgctattattgttccagatacaaagcaggatgtcataattttttttttttactattccaactggaataatatggctcaacttaagttctgtacaaaactacttaatgataactcacaaaattaaaccaatttatattttctgcagttaaaatagaatgcacagatttttaaagacctaggacacattattatatctagttcctgaaatcattaaatgtccatggggaagaaaaaaacttgtgtaagtaggaataatataattggatttgcaatgctctcttaagagattctttaaaatcatgtgaaataagtagagtttctatgattttttaaaaatcacaaatagcatatatccgttttatctttaatagtgtttgagcccatcatttgaaagcattggagcatgtaaccaatatttctgaaaatgaaccatggttccagtcataatctatatgctttaaaattccttccctttattctttcttcccaaatccatgacatctgaatttcaataaggaagaaaataagcatgtttttaaaatgttttagaaaagattttcaaaattagattaaaatgtttgaggaaataaaaacttctttatgtattcattgtgatactgatttttatcaatgtctttttgtaaaaatacctatatactaactttgaataggtccaacatatggtaatgtgttatgcaattaatgataatgtagaacgatgttaaacccacagaatattgccaaggatttaccaacaaccaaaaatgtaattatatagaagaaaagtgtagttacaaatgcagtcttttgtctttttacattctctatatgtagagggtaacagaaatactgtatcactttttagtatatgttctcccagaataagttgccacaattagaacagagtttaggagcctatattaagctttactagttatggttatttccatagtgctagtaaataagagaaaaaaactttttgaacccatgtctcattgtaggtctcctaaaggaaagtggcccaaagtccaaatacttcaataccgttcgtctctgcctgataacaaagtgttttgtttttgtttttaccctcggacaagccagtcagctgatctttgtcctaatttgttcctggtagaattgaacaagatgtttgcagaagcttcctctagtttgaaaattgtattgattttttttccccatagtaactcacagatggcttctcaggttggaaataatggtgtccatgtttaggtaccacgtgttagatcagatttgtactcatggatctgtgattattttaactttttcttgttatttataaaaataattatgtacttctctctggggtttaatgtgtctttttattctcaaaaaatgtagtacattgatcagccacctaaaatactagccstatagaattctaatagttaggttttatatacagccatttgtcgattaaatattaaataccggatcagcttaaaatggacacacaaaaaaacactaccacataagctatacagtgccttttttcacagtgtcttataggtggaagatactcagtgagtgtttgttgagtgaataaaggatcttcacttggtgcatcccatttccttacaatttattattttttattttactttactttgagtcaggatctcactaggttgcccaagctggacttgaacttttagatccaagcaatcctcctgcgtcagcctctcaagcagctgggactacagggatatgtcactatgttcggctttaatttttattttattatgaaagttttcaagtagcaaaagcgatgtaatgaaccccatctacccattactgagattcaataattactaagattttgccacacttgctttatctagtctttaaagaaatttctccactgaatgatttactttaaaatacttgacctcctggccttttactctgtattttaaagaaagctgtagtaatttgtgacataaaccaatagagagcagctaaattttgttatatcttcatagcaattgactatattttggtttgtcttaccaataatttgatgaatgacctttcattttcaatttatctttggtaactaagtagataagtgggagtgtaggtttacttatttaaattctttgaatttgtgtgtgtgtgttgctttcccccccgatagaaactataaatggtagtgttattgtggttaggagtatggggctatggagttggggaaaacatgtatgaatctcagktctactactttaccttttgaatgtgggcaagacaagtctcagagttgttttagtttttttaattttaactttgaaataattgtagaaaaatagcaaaactagtttaatgaattcccatatgttaatatttaccacagctattgtatgtatgtatgtagagtttttttcctgagtygtttgagagtaagttgcaaaaataatgcctctttaacctctaaatacttgaggtgtggttagtaaaaattcacgttttgttacataaccacagtatatttatccaaaacaggaaattaacatggataaagtattactgtcttatctagagatcttattcaaattttttcagttataccactaatacccttcatggcaaaagaaaaattattttattcttaggttgaatccaagatcacatgttacatttagttgtcatctctagaaactgctggtagtcctagctatttgggaggctgaggagggaggatcacttgagcccaagagttcgagtctgacctgggcaacataataagactctgtctcttaaaaaaaagaaagaaaagaaaagagacagaagaagaaaacagaataagctcatggactgttataaaggcaataaatgtgacataaaggatgctaaccaaaacagataaatagtaaaaggttaaataacagaggacttagctatttgcaagtactgacaaattttcatgattgggcaatgaatgatgtgacgttaacacatctgactttatctttcatgactttgatatttttgaaaagtataggctgcttattttgtagaatgtaccttaagttttttttatgtttccttatgattagatttaggttatgccttttcataaaatactatggatatgacctatccttcatgtaccatattaggaggtacatgatacctgttttatcctattgctgatgatgttaccctttgatcataacattatattttcaaatttctctaccataaagttaccattttccttttgtaatggatctcttgtgggaagatactctgagagtacctaactatcctatttctcattacatgttcacatgctagttttgacatccattcttcctagagacagttattactatggagattgccaaataatgatttgtttttcattccatcattttttctgcatttgttagttggctttcagcttcaatttttatatctgtaaaatgaacctaattgatgtaaaattggttaataacacccaaatcatgtagggtataagataatgcattttattttattttattttactttactgagacagagtctcagtctgtcacccaggctggagtgcagtgagtgacatgattatggctcattgcagccttgaactcctgggatcaagtgatcctcccacctcaggcctccctagtagttgagaccacaggtgtgcaccaacacacccagcatgtatgtgtgtgtgtgtgtatatacatatatatgtatatccacacatacatacatacacacatctttacatatatagacctcatctatmtatatatatatatctcatctatatagaagagatatatatagagagatatatagatatagagagagayatagatatatagatatagatatagatatagatagacatagatatatatctcatctgtatatatatagatgaggtctccatatgttgcccaggttggtctcgaaatcctgggctcaagtgatccacccacctcagcctcccaaataatacattgatttgggacaattcttagcacataactctttaaaatattagatattataatttttattatgctagtatctacttttcagttgaagaaatagatcattttaaagatctttgaaaggtcataggaaatgttaaaaatatcaggtattttatgtgtacctaccatgaatgttttacctcatctttggtaaggtcagaagtgagatgatgtaacagccatcatatgtatgtgtattttttttattgacctgagacagtttttggttatttaatgcagaaaatatatttgcagtgtacttcatatgatatgcagtactttaaatacttgttgtaatgtggtcatttaataggagagaaacttagagacatggtaaattaagttttgatttagtatactgaatgatgaaatagaattatttatggtcattttaattctttaaaagtttttaaattagtattttaaaataatatatgtacacagtttactgattttgtccttaagggtatactgtggaaaagagcaataccctgccctgtactttgacagcccttttagctatttcttcttttacctacctccatatttttaatcacctcacctatccaggttagatattatgtacttaccaacttcctactatgataagataaatatttgtctctcttatatacatacattctgtcctctcctcctctccagttctccagtagagtttttgataaatcagttttcagcataaataatattatacagatgtrtgtattatttatttctgagacaaattatattctatggtgttttacaacttttagtttctcctagagtttagaattcccttatctttttgtttccttaggtttctttatacctgtggtgacttccatacacatatcttccaatagcttctcacatttattttgtgcatagttaaaaatgtgagttttaatttgtaaaggtaattataaatcatgtgctctgaaagctttgtttttcttatttttttctttctctctctttttttgtttttgagatatagtctcactctgttgcccaggctggagtgcagtggcatgatctcagctcactgcaacctctgcctcccgggctcaagcgattctcctgcctcagcctcccaaatagctaggattacaggggtgagccaccacacccggccaagttcttttgatggctcacatccttcattaactttctgagaaaaaatacaagggagataaatattttgagaaccaaagtgtctcaaagtatctctgtttactcactctggattaatatatgggctccatgtggaattctagtgagaaaatttattttctttagactcttgaaaccattgctctattatattctaaacttacatattgtttttgagaggtctggttcttttttttcctaagcctttatatatgatctgccttttctctagaagcatttatgatctgtctctggttttctaaagtttcatgataaataataatgatgtagatctcttcattaattcattatattaatacattattccctataaatttagacaataagtcagttctgtgaatttttaaatgaaattttacttcctgggttgatcctctatttttcattttttctttctttttgatttttttttccttttttttctctttcattgaagttgagctttttgcatactcttctcaagtgtctggtaatgctggtagtgcatttatatttaagagtgatgcactagacaatgtacaaaatgagacctttcaacttccttagggtatttgagtaaaagacagctttttcataggggaagtaatttacatgcaccttctccagggctatttaatttctccaaggaaaaatggattctctaattttctttttgggtgaacttaagcctaagtactggtcaggaaaagggtcagaagggctatttggtatgtaagtgttcacataaccagcccagcctgttcttagttcagcacttcacccatttccctatcttcctttgtgcttggagttcctgagtctgaagcctttccagttctttcctagcctaccttccctccattattctgcagaggtaggaaaaggacacttgtcaggctatatgaggtgggaatggggtctgaaagttctgctgttaattatctccctattttcagctctactagttacctggtaccaccattttctgaattttccaaggtttggagggtgaatcagcttgatttttgttggaatctcctcttagtaggcttttatactttagctttcttccccctgctaatctaattaccttttctccatatactgtctgacctcagaaattgtaatccaggattatcagtatcttctagtttttttactaatatggttagttgtaatttttcattattgtcttgagatgatttttgataggagaatgtgcagaaatgtttatattttggcatcagaaatatcacctttggagggggcgagggggtcttacctaggctggagtgcagtaatgcagtcacagctcacttcagcctctacctcctgggctcaagcaatcctcctgcctcagcctttcaagtaacttggactacaggcatgtgccactgctatggttttgctctgtgtccccacccaaatctcaccttgaattgtaataatctccacatgtcaagggtgggaccaggtggaggtaattgaatcatgggggtggtttcctccatgctgttctcatgataattaatgaatctcacaagatcagatggtttaataagcatctggcatttccgctgcttgcattcattctctctcctgccaccttgtgaagaggtaccttccgccatgattgtaagtttcctgaggcttccagccatgctgaaccatgagttgattaaacttcttttctttataaattacccagtctcaggtattccttcacagcagtgtgagaatggacgaatacagccaccatgccacactatgtttttaatttttttgtagacacagaatcttgctgtgttgcccaggctggtctcaaactccttggctcaagtgatcctcttgcttccacctcccatagtgctaggattataggcgtgaaccaccatgcctagccagaaatactrtcttaaaatcaactctgcataattcactgacccatcattaaaatttgtcagtacttaaaaatagctaagtcctctattattttatttaaccttttactgtgtagtttatttgttttggttggtatcatttaagcctcatttattgcctttacagcagtccaaacagaacctattctgttttctttctcctcctctctcattttttttctcttttttaagagacagagtcttacagtgttgcccaggttggactcaaatgcttgggctaaagtgatcctccctgctcagcctcccaagtagcagagactacagggactacgggcgccaccttgcctagctccccctctctcttatcttctttaccctagttaaattatttctgctttgtcccaaaaaataatatttgtacattactctccacatggctttatggtggagtaagggtgatgcttgagtgtaagaagttttacactgggatgtggtacttttccttttttcacttatagttgttttgaagtttgggcattctttttgtcttcaaattgtgctgaaggcatggtgtttttgtagatttatttttctgtccttgttctatattcttttggagagaaacagggcttaggtggcaaccattgcttcagctgtctggaattcctcaatttattttaactttatataccatcttttctcccacctctctcttcattataagcagactcattcattcacagtatgtttagtgagtgctatgtgccaggcatggttctagggatatggtaatgaacaaatgtctttgccctcataaatattatattctggtggtagagacaaagaataaaacaaaaaagtgaatatatactataatgttaggtagtgattaatgctatgttttaaaaaaataaacaagatgagtgcagtggtacactcctgtagtcccagctgcttgggaggcagagacaggatggtcacttgagcccaggagtttgagtagccactgcacgtcagcctgagcaataaaacaagactgtgtctctaaaagtatagatatatcaatcaagaacctggggaagttctagtgctacctacaagagttgaggaagaccttttcttttttttttttcttttttttgagacggagtctcactctgtcacccaggccggagtgcaatggcccgatctcggctcactgcaagctccgcctcccgggttcatgccattctcctgcctcagcctccccagtagctgggactacaggcacctgccaccacgcccggctaattttttgtatttttagtagggatgggatttcaccgtgttagccaggatggtgttgatctcctgacctcatgatccacttgcctcagcctcccaaagtgctggaattacaggcatgagccactgcgcctggccaaggaagacctctttgaaaaagtgttacattagcaaattttgttttgttatagaatagtaagtacatctttttatattagcatttaccttatgtaaatcattaagattttaccactgatcaggtttccatgataaattgtttaattttaaaacttctgtagtagaatgggcatgtggtgttatggaattcataccaaataagaagaattttacagaaagtaaaaccataagctgtctactattcaactcttctcattctgctttagagaactgctattgataaaagattatttgagaaacatataatctatccttttctctaataactctacactttattttttatttttattatactttaagttttagggtacatgtgcacaacgtgcaggttagttacatatgtatacatgtgccatattggtgtgctgcacccattaacttgtcatttaacattaggtttatctcctaatgctatccctctccccttcccccagcccacaacaggccttgtgtgtgttgttccccttcctgtgtccatgtgttctcattgttcaattcccacctatgagtgagaacatgtacactattcacaatagcaaagacttggaaccaacccaaatgtccaacaatgatagactggattaagaaaatgtggcacatatacaccatggaatactatgcagccataaaaaatgatgtgttcatgtcctttgtagggacatggatgaagctggaaaccatcattctcagtaaactatcacaaggacaaaaaactctacattttatgcttggactatcagaaaaactgtttacttgaaaacagtttacagaaaaactctttaccctgacatgtattgatttgttgctttgtgttttttgagacagggtcccactctgtcacccaggctggattgcagtggtatgatcatagctcactgcaacctcaaactctggggctcaagcaatcctcctacctcagcctccctagtagttgggactacaggcgtgtgccatcacacctggctaaattctgagttgttttttatattgaagccttaatctttcattgaggaataccacaataaacagactgagcttgctgttgagaagttgttgaggacaacatagtcttctgtattaatgtttaacatattaaagaccctatgaaaagtttattttagaatcacgtgtttcttataagaaagtgacatttttggccgggcacaatggctcacgcctgtaatcccagcactttgggaggccgaggcgggtggatcacgaggtcaggagatcgagaccatcctggctgaagcggtgaaaccccatctctactaaaaatacaaaaaattagccaggcgtggtggcgggcgcctgtagtcccagctgctcaggaggctgaggcaggagaatggcgtgaacccgggaggcggagcttgcagtgagcagagatcgcgccactgcactccagcctgggcgacagagcgagactccatctcaaaaaaaaaaaagtgacatttttatctcttcaagcatgaaaagtagataactaggcatgtcttactttttgctttcactgtcaagaaattggaaacaaattcagagctaattcaagacgcctctgccatgtatttctttttctccccaatcttatactgttctgttttctctgatcattttttttaggttgtctcactaattatggaacaatggcagggatgtgtatgaaagagtgagcaggtagataagtcaatagatgaatgctgttgcctcctcaaatcattagttgtatgagcttgggtgagttaaacaacctttctgcactgttaatttcatctgcaaaatgagaggattaatagatcaaatatttgtagctgcagaactctgttttcatgggaaataatttggaagcccgaaatagaagccaagtagtagcagaactgttgtgtcaggccagtgccatagtggccgggaaactaagcctcattttttatccagatcatattagaactgcctcttggaacaaagaaacactacctctagtgtttctgcaatacagtgttctgtattacagccttgactactctactttttcccccactccagtcaagttttacattttgtagtaggcctcctttttgccatcttcgtgaagattctgaattttcctggatggataaaaatcataaggataataaatggatatttcagtgtttttttagtcagtggtttgcaaaaccacctggagggcttgggaaaacacaggttgctgtgtcctacccacacaggtttctgattcagtaagtctggggtatgaccaagatattgcattttgagcaactttccgagtgattcagaaattatactttgagaactactatcctatgtgagtattaaaaatgtattttagtcacttttcttattttaaaaattacatcaaatcatataacttcataaagctcagaaaacaatgtctgagtaatatatggtttttgaaaaataacatttaagtgacatattccgatgtcatggagcaagtgagaaactggtttgaaatgtttgctatctagtgtcaagggctatctatccctttttgacttcttgtgctactggtgcaaatggatagatattaatcctgcagcaatcaggatttgcttcagcaataaagaaattattgatgtctgaaagcaatcctttccttttgacatgttggcagcacctaagaagaaaatgtcagggtcaatataagtgcatttactgacagtttggctctttcctatgttacagaaaatgatttcacatttagcttttatcaaaaacagaaacactgaccactctgaaggatataaacaatagctttcagcttagtcattttccacttataaagtgatactttcatagaaataaacaatgcaaacttcagagagccaaaacaattacacagaaaaaaatcattgcatttttgccatttttaactcagatttaaaacaactgtgtctggtagtaactggagaaaaatcactgttttgtgttctgttaagttaaaacagttaaaatcactttatgataaaatatggccaaaaagaagaatcatcttcaattaggtacttcaagatcacttgtattctctgcttctctttcagagcctgatccatgtatttcttaaacttcttcatcatatataaaatttcgtgtttataaaatttccactaaaacctcaattattagtttcatgaatcagaagttacaattagtttcatttctggctcaccaagatttgtcaatttctggataaaagggactccctattcagaatatccctttaaatcttttttaaaagtgcacctttgatgtgtacatgtttttatgttatttatggcttctgaaaatattatgcaaaaaaattgttatggaaacaacccaaatgtccacaagcaggaagatacattgtgatagatccatacaatggaatatcattcgttcataaaaaagaataaagtactgatgcatgatagaatgtgagtgaacctcaatatcaagaaaatggacgaagccagacataaaggatcacatattgtatgattccatttatatgaagtatccataataggtaaatccacagaaacaaaagcagattggtagttgccagggacttgtggggagtgaggaatggggaataactttttaatgggaagatagggtttcttcttggggtgctaaaaatgttgagaagtagatagaggtcatggttgcacaacactgtgaatataattttatgtgaattttacctcaattttttaaagaaatcagttgatttaagacttaactgaattctagaatttttgaaatgaaggtgtttctcaaggtcatccaacccaatctcctgtttttcacaaatgaaaaaactaaaactcatcaagattaaatactatatatcactaagattgcctagtagctagtccaaacccaggccagaatttgagtatctggatttttagcccagtgatttctttttaaactactgcatgctgctttattatcaattgctattttttttaaatttttttctgggaacatactacaagtgttagtttaaaagtaaactaacataaaagtaaatacaaaaagaagcatagcttcctttgtgccacatataagaaatgtagacatagagagtgtttattgcagtaatttgccaaaaagcaagccatagtttaaattagaagaggtttattccctgcagcactttcacaatcacagaaggcacctatattttaaatgtagtctacattggcctggcttatgaactgcaaccttctatgattgcaattcacttttttaaattaaaaaaaatttcaaaataatttttgcataattattagcacattctaccacttgataattttttgtttctttcaatagacgaaagcactcacattgtaaaaaaattatataaatgaccttgtcttgtgatgaagctagaagatctgttttcaacgaaactattctcagaggcatctagggagaaacatttgagtcaggttgggagttagagatagaaagcagcagcaattaaagcaagataatgtattaccccctggaaattgggtgttatactcaaatgtaaaggacttgtattgatttagtgctagcctcagaaaatagtcagatgtcctcattttaagggaaaactttaggaaatgtaattatatcgtttctttctctctaaatctgccttagttttcaatttctttatgtagttcgttactaagaggaagctacactctcattaccacactaaatggattttctattaatatttatctccaatgttatttttatctgggttgttgttttcatttctacttagtatgtattttcttctttccttttagttcagaggtcaacaaagtatggcctatgagccatacgctacaatagcagagttgagtggttgcaacagataccatgtggcctgcaaacctaaaatatttattggggcattttacagaaaacacttgccagtccttgctttagttgaccaagtagaaaaggaagagcagattctacagagtgaataaatatcaccagcaaaggaaaggatatagaaaggtacaggatttatacttaggctagctagaaactccatatggtcaaagtaagagttttgtggatgtgagtcatcagagattatataggaaagatagattactgtcagatttagaggatttttaatgccacttcaggaacttgagctactattgtttaggaaatgagtcatttaaggttttttgaacaaaggagctttgccagarcaggaaagtgttscagtagggtttacaaagtaawgagagttatcaactaaagttatattaataggaaggatgacatagttccaggagttgctgtataattaaaattgataggaccttagacactgcattttgagacaaagagataatagtttaaagattaaaacttcattgggcagaaaaattattatttatacacatattagggaagtaaagagctaatttttgtggaaggtttaagttgatggagaaggattataacactacataggataagaaacaaaactgattactagttatcagcattactgaagttgttcactcatcccaggcacaggcaattttttactcgccatattttatctccagggcacccagctgccatcatcttgtcagggtccatctctttataaaatcctcttactttgctctccagaatcccaccctgatacacagatttacttacgctacctcatacagaataaagtacttccattttccaagtactctgaaccatgctcaagaagggctttagctctctcaaataaaaagacttatctcaaggtgtttaattcaagtagagccacagttccgaaactgtgcactgacaccccagggtactgcagcagactcacaagagtgctacaggatattttatatcggtttcaaaattaaattttgctacattccttttggatgatgtctttttaaaaaataattactgttgttgttttttttttaatatgtacctcctgaaaaatcaatgcagaatgggaaatgaaggtagcagtatccacttggaatacaaggcttgaagagtgtgcagtattccataagcatacatattcmtttagtaaatacagttaacccttgaacagtgccgggggttagaggcactcccctcccccgggtagttgaaaatccatgtataacttttgactccccagaaactttactaagagcctactgttgaccagaagccttacctgtaacattaatcattgatgaacatgtattttgtatattatatgtattatacagtgtatttttgtaacacagtaagctagagaaaagaaaatcataaggaaaatatattcattgatatggtttggctctgcttccccactcaaatctcatctcgaattttaatccccataatctccacatgttaagggagggacctgttaggaggtcattagatcatgggggccatttcccccatgctgttcttgtgatagtgagttctcgtggaacctgttagttttataagtgtttgacagttcctctctcatgtgccctctctcgcctgctgccatgtatgacatgcctgcttccccttctgccatgattgtgtttcctgaggcctccccagccatgcagaactgtgagtcaattaaacctcttttctttataaattagtcagtcttgggcagttctttataggagtgtgaaaacggactaatacatttattgttcattaagtggaggtggatcatcataaacatcttcatcctagtagtcttcacactgagcaggctgaagaggagggtggggaagagctggtcttcctgtctcaggggtagcaggggtggaaatgatgaaggaggtggaaaggatggcagaagaggtaggcatactcagtgtaactttacagaaatacgttgtaatttctgtcttatttttcatttccctaaaaatgttactctaaaaatgtttctatatggcacctatccttccaccttttgcttttggttcagtgcccatatcatagaagggtccatgttgtaaaagaagtcaaaagcagtcttttgaataactggaatcattctgttatatggtctaatatgaatttgtttctggcactacttattctacatcttctttctcatcatctggcactgatttggaagcactcatctccatcaagtcatcttctgttaattcctgtgatatggtgtctgttagctcttgaattactccaagatccgtatcttgaaactcttcaacttccccccacttttttttttttttttttgccatatccacagtctcttttatgatatccttgattgactctgttgtaaatcctatgaagtcatatacaccattggacacagtttttctctagcatcaatttatttttttgggcttgatggctttcatggctacttttgtaacaatggcgttttccatgatttgattctttcagatatccttggtgttctctaagttgaggtctacttccatagcattgacaatcttttctatagattaccatgtgtaatgatctttaaaggtccttatgaccccctaatctagatctgaattagagatattgtgtttgatggcaagtagaccactttgacacctttgttgttgaactcctggtgtgggtgacccggggcattgttcaatatctaaagaaatttaaaagacagttccttactgacaaggtacttctttgtcagcagaagttacttctcctcttatccattttttgaagccaaacctctttctaaaaatgtcaagccatcctttgctgacattaaattctccagctttaaatccttcaccttccttttgctttaagttgtcatataatgacttcaagtcttactagagtatgcctttcttatagcaattctgtactcacattgtattttaaatataagataaaaagatattttacagaaacttcaaggttttcatgcctgctgtcgtagctgcagtgatggctccacaaagtcctcccccaaccacaatggtccttacactggattcatctatcttgaaatggtgggcaaccacagctgcagacctcaatctacggtacatatcaagcaagtcagcttttttttgtaatgatttttctctgcttcttgggagcacttccagcatcactagtgacatttcatatgggtcccatggtgatgttcaagatttacagtattgcactaaacatgatgaaaaataattcaagaaccatgagagatcactttttattgcaatatgcaatttactgtaagatgtagggttcactcagagatgattagcatcagatgtcattttcaatggatacaacacttgagctcactgcaaaagcaacaggtggtagttacaacgttgttacaatagtacagtatttactgcagttcattttatgcagttaggatttaatactgaatttttacatttgtttacatttctcttgactcaaatgctgccgtgtatggtctgtaagtgtttgcctgtgtaagttttgatagattttaactttttataatacattttwatagttttatgatagtgataaaatagtatctacatatactttatgagttcatgacatacttaacaatttttatcaatatttctaggctacacagtttgtctgtagagtatttcaaactatcacaaatttccaaaaaattttctgatatacttcttgaaaaaatttttacacacaagtggatccatgcagttcaaacccaagttgtacaagggtcaactgtattgtagttattttttaatgagattttaaaaacttttttcaatttatatgtatttttcttaactgagtattaaattctgaagctagtacttattaaattgtttggacttaacattaaacaggactgttaggcatttgttagcataccatgaaaaaatgaaaaaaataacaaaaacactaaaaacactgtaaactgggaaagtttcagattctctgaatttgagagagttgttcaactctaaaatgaatgcattcttccataagcatgtgaaaaggcagcagtctttcttttttctctttttttcaaaattgctttctagactgggcacagtggctcacacttgtaatcccagcattttgggaggctgaggtggacagatcgcttgagcccaggagtttgagaccagcctgggcaacatggtaaaaccccatctctacaaaacatccaaaaattaaccaggtgtggtggtgcacacctgtagtctcagcttctgtggaggctgtgaggtgggagaatcgcttgagcccaggaggcagaggttgcagtgagccgagatcgtgccactccactccagcctggtgacagtgaaatcccctctcaaaaaaaaacaaaaaaacaaatttgaaaacacattctagtgacatgggattttgtgtagcatcttaacaaaaatgtaatcacatatttaaaaattttctgtgctttttgctgtatcaaacaaaaaaagtaagaagtgctcttccctttaaggttatggtcaggtcagagtggtaagacaaatacaagttgcttatatcattaagtaaaataaaataattaccctcatttatttcataatatcacatattatgggcattcaaagaagaatgtgtacatctgttagtgggaatgaagaaagaatttgttagattttaaatgggcattgacatgttggtaaattctaacatgtagaggtagtggacatttcagatagaaggaaaaacataaaaactcaagatttattttgggagaagcaaattattctatatgactgaagcaaggacatatgttatgaagtaatgtagattacagctggtttactataagttggagtactatcgtggagcactttgaatgctggggtgtgaggcatttggattcaatttactaggaaaagaagagtgattagggtgattaatctgtcagcaagatataggatgattaaatcaaggagagaaaggaggcagggatagctttttaaaagggaatgatggattttgctttatgtatatgtatttcaaaggaaacaccaaactgttgatctttaaagagcatacttttgttcagcactgtaactaacagttgtaacataaaactcacttttctgatgggaggcagaagactttctaactttcttgttatttctagaggaataatatcaatacaatgtaaatatgtatggaatgcatactataggccaagaactatattaagcatttatttaattctcacaacccttgagagacattattattcccattttacaggtgagaacagtaaagcctagtaaagttaatgttgtccagagtcacatagttaataagtagacagattagcaaaaatttttaaaataagtttactagttggtttaaactaaggagaattgagttaattctccttgggtcttatcaaattatcttcatctgacttaggcatagtttctctcyttttttatttttcatatcactcctgatctcttcccaccatgggtactcttaatgtgtttgatatggctcttacatttggatgtgtcctttaagactgtattgtgttattttagatgcatgcatatgtgtttaaattatacataatatataaaagggtaaattatagcttgtctgatttgatatatatgtttctactctattgcttttatatttttattttataagaaacacacatttttattttataagaaacaaggtcttgctattaatatgttaccaagaccagaatgcagtagttattcacaggtgtgatcattgtgcagatagccttgaactcctggcctcaccctatcctcccacttgagcctcctaaatagctggaactacaggtgcatgcagctgggcctggcttagtttactgcttttttaaaaataatttacaaataataattgtacatattcatggaatacattatgatttttttttttttttgagacggagtctcactctgtcgccaggttggagtgcagtggcgcgatctcgcctcactgcaacctccaccccctgggttcaagcgattctcctgcctcagcttcctgagtagctgggactacaggtgtgcaccaccatacctagctaatgtttgtatttttagtagagatggggtttcaccatgttggccgggatgatctcgatctcttgacctcttcatatgcctgcctcagcctcccaaagtgctgggattacaggcgtaagccaccgtgcccggcccataatgatgttttgatacctgtaatgtatagtaatcagacagggataaatagcatatccatcatctcaaacatttatcatttctttgtgttaagaacatttaatatcctccatctacctatttaaactatttaatatatttttgttaactaaatagtcatcctgcagaggtatagaattctataacttactcttatctagttgtaattttggtatcctttaacaaatttttccctatccttcctttccccctactttcccagcctccaatatcctctgttctaccttttacttctataagatcaacttttttttatcttctacttatgagtgaaaacataccatgtttaactttctgttcctaacatttcacttaacataatgtcctccagttttatctatgttgccatgaaccacaggattttatgcttttttatggctgaatggtttttctttgtgtatacattacacattttctttatccattcatttgttgttggacacctaggtttgttccatatcttggctattgtggatagtgctgcaataagcataggggtacacatgtcccttaaatataatgatttccattcctttggataaattcctagtagtaggattgctggatcatgtagtagttctacttgtggtttttaggaaactccaactattctccatagtggctattcccaccaacaatgtattaagagttcccttttctccatcctcaccaacatttttttttctttttgataatagccatcctaactggggtgagatgatacctcattgtggttttgatctgcatttctctgatgattagtgatgttgggcactttttcatatatttgttggccatttgtatctcttttgagaaatgtctgttcagatcatttacctattttttaataagattggttttttgctattgagatgtttgagttccttgtatattcttagtattaatcccctatctgatgttatgaatagtttgcaaatattttttcccattctgtaggttgtcttttcactctattgattgtttcctttgctgtgctaaagattttcagtttgatataatctcatttgtttatttttacttttgttgcttgtgcttttgaagttgtattcataaaatatttttccagatcaatgtcctaaagcatttcacctgtgttttcttctaggagggttatccttttaggtcatatatttagttctttgatcatttttttgagacagggtcttgctgtgtcacccaggctgcagtgcagtggtgcgataatgactcactgcagccttgacctcctaggctaaggcagttctcccgcctcagccagctgagtagctgggactacaagcatatgccaccatgcctggctaatttttatattttttgtagagatagggtttcaccatgttgtcgaggctgatctcaaactcctgggctcaagagatccacctgccttgacctcccaagatgttgggatcacaggtgtgagccaccatgcccagcctctttgatccactttgagttgatttttgcatgcagtgagaggtagaagtgtagtttcattcttctgcatatggctatccagtttgctcaggaccatttattgaacagactattcattccccaatgacaattcttggcacttttgtcaaaaatcattttgctgtagataatgtggataaatttctgggttctctatgcctttccattggtctatatgtctgtttttatgctggtaccatgctgtttgtgttattatagctttgtgatatattttgaggtctgatagtgtggtacctccagctttgttctttttactcaggattgcttcagctattcagggttttctatgtttccatacaaattttagaatttttttccatttctgtgaaaagtgtcattggtagtttgatagggattgcactgaatctatagatgtctttccatttatttgtatgcacttcaatttctttcatcagtgttttgtaatcttccttgtagaggtcttttatcaccttggttcagtttgttcccaagattttattttcttttctagctattgtaaatgaggttgcctttttgaattcttgttcaactactttgttgtttatgtacagaaacactactgatttttgtgtgttgattttatatcctgcaactttatggaattcatttatcagttctaagagttttttggtagagtctttaggctttttaatatgtagaatcattacatatgcaaatagggacaatttaacttccttcttctcaattttgatatggtttatttctttctcttgcctaattgctgtggctagtacttccagtactatgttgaataagagtggtgagagagggcatcattgtctgttccagttcttagaggaaatgctttcaggtttcagtaagatgctagctgtgagtttgtcatgttgaggtaatttcaacatgttattatgttgaggtactttccttctatacctaatttattaagagtttttatgaaggaatattaaattttatcaaaagcattttctgcttttcattgagatgatcatatgatttttgtccttcattctattgataggatataagacattcattcagtgacatatggtggaccatctttgcattcttgggataatcctcacttgctcataatctttttgagacactgttgggttcagtttgctagtattttgttgtggacttttgcatgtatgttcatcagggatattggcctatcattttctttttttgttttgtccttatctgtttttggtatcacggttatgttggcttcatagaatcaattaggaagtatttcctctgcttcatttttggaataatttgggacaaattggttttaattcaacagtgaagccatccagttctggactttttttttttttttttggtgttggaagactttttgttattaaatcaatcttgtttcttgtcattggtctgtttaggctttctatttcttctttcagtcttggtaggttttacgtatccaggaatgtgtccatttcctctaggttttcaaatttgttggcatatagttgttcacggtagtctctagtgatcctttgtatttctgtagtatcttttgtgatgtctccttttttgtttcctattttaattatttagatcttctctcttttttcttattctagctaatggtttgtcaattttgtttagaagccagctttttgttttgttgatcttttgtatttttttgtcttatttttgtttatttctacactgatcattattatttctttccttccattaattttgggtttagtttattcttttctagttctttgaggtttatcatcaagttgtttacttgaaatctttcttgttttttgatataagcatttattcctataaacttgactctgaatactgtttttgctgtgtcccataggttttggtatgttgtgtttctgttttcctttgtgtcaaagaatttttaaattttattcttaatttctttctttatccattggtcattcaggagcatattgtttaattttcatgtaatggtatatttctaaatgattctcttgttatagatatctaagtttacgccattgtgttcagataagtacttgatattttgatcctttaagaatattttgagacttctattgtgtccttacacacgattgatcctgagactgttgaatgggctgatgaaaagaatgtgtattctgccactgttggctgaaatgttctataaatatctgttgtatttagtctatggtgcagtttaactctgatgtttctttgttgactttttgtctacataatctgcccagtgttgagagtgggatgttgaagtccccaactgttatttcactttagatctaataatatttgctttacatatctgggtgcttcagtattgggtgcatatatatttacagttgttatattctcttgttggatcaatccttttataattatatagtagccctctgtcttcttttacagcttttgacttgaagagtgttttacctcrtataattatagctattcctgtttgcttttagtttccatttgcactgaatattttttccatccacttccagtctgtgtgtgtatacaggtgatacaagtttcttgtagatagcatataattgggtcttgtttttttaaaatccattcagctagtatgtatcttttaaatgtggaacttaatctatttacaatcgtgttattattgataggtgaggacttactcctgtcattttattgattgttttctggtggtttgtatatcctttgttcattactttctctcartgttatttttgcagttgaatggttttctctagtgaaaaggtttgattcctttctccttctcctttgtacagcagctctatcagtgtgttttatagtttcacatattttcatgatggtgattattgtttttcatttccacatgtaagacccccttgagcatttcttgcaaggccagactagtggtgatggattcccttagttttgctagtctgtgaaatattttatttgtcctttatttctgaaggttagctttgctgggcgtattcttgggctaataatttttttcttctagtactttgactatattatcctgtcctctcctggactataggatttctgctgagaaattcactgttagtctaatggggattcccttatatgacttgatgcttttatcttgctgcttttagaattctttctttgtctttgacttttgacaatttaactgtaatgtgccttgcagaggtcctgtttgaggtgaatatatttgagctttctcgacttggatgtctctctgtctttctgttattatttcattaaatatgtttttctcacctttcccttcaccttctggagatatttatttgcttaatggtatcccataaatcctttaggctttttcattctctttttttttttaaagttagtctgcctgtgttatttcaaaagatcattcttcaagttcagaaattcttcttcttggtctagtctgttgtttagctctttattgtattttttatttcattcattaaattcttcagctctaggatttctgcttcattcttttttatgatatctgtctttgttgaatttctctttcaaatcataaactcttctcctgactttgttgagttatctatcggtattctcttgtatcttattggatttctttaagattattattttgatttttttcccacatttcatatatttccttatagtttggagtctgttactagataattattgttttccttttgacattacatgttttcttgctttttttccttcttcttcttttaagacaagttctcattctgttgcccaggctggagtgcagtggcacaatctcggctcactgcagcctctacctcgtatgctcgagtgatcctcccacctcaactccccaagtagctggaactacagacactcaccaatatgccctgctaatttttgtggtttttagtagagacagggtttcaccatgttgcccaggctttttcttgctttttcacggttgatgtgtccctgtgttgatttctatgcatctggtggaaaagtcacctcttttaattttatggaatagatttcataagaaagaatacgaatgagtcttgggttgttggtttggtggggtacattagccttatttctagatacagttttgtagtctctgagtaatttcttcagctgtaatccactctagtggcatttgtgagtttctcagtggcatgggctgagagagtttgtggcaatggtgatgccactttgccaggggtgggctcactagactgtttctcaggtctggggtatgtatgtgcacatagtaggtcagccaacttggttggtgagattggcttactgagactggggccacaaggctgttactctgaccagaaatacaagtataaggttgcttgggcaacctggggacatgcctgccaggagcagctttcaggtcggggacgtgggcttttggccacttggctggcttggagatattccctgtggcacgggggcagtctgcgggactatctctcaggccattattgggggtaaaggactgttgggcaggccaagggcgtgcctatgggggacctgtgtgtctgtttctcaggttctgattgcttgcaggtagccctactctgctggccctgggccatatcaccttctcagaggctcagggaggtctcctgcttagagaagggagcccagcagtttggccagcttaagagcaggcttgctgtgggtaggactggcagactggtttctctgttggtggtatggccatggttcttggttttcttgctgtgcaagaccagaataacagccagtccagggtccagccttcaccagcttggatcatggtgttcagaaacttgtttggagttggcataatgaagatggagccccagttctggagaggtgcagtggccactttccccccagaggagggcatactacacaggtggctattctcaagatgacgccatgttacagcagtttggctcacagtggtgggatggggagtacacaccttgtgctcttaatccaggtcagtgcgtctgcatgaattcctggcagctctccaaaatgggctcagggcttgtgaggactatgggattcttgtgtagtaaggccttcatgtgtttgtggtggcaaagaggctggtagggatcttctgctgacttttttccctgcaatagcaattccctcccgtctccaggcagatctgatctaggtggggaagatgggaccacgagtttgagtgcctctatgctgccttcctagatttccaatcaccacaggtgcatcttcattctatcagtgcaccccactactcttccttcacactccagtcaaatcttagctgtttgtttgttgccttgatcctttttttgtgtgtgggttagacaagcaccaggtatccctactcagccatcttgctgatgttactcctttattgcttttcttttcttttcttttctttttttttttttgagatggagtcgcgccctgttgcccaggctggagtgcaatggtgtgatctcagatcactgcaacctccacctccttggttcaagcgaccaagtagcctcagcctcccaagtagctgggactacaggcacccaccaccacacccaactaatttttgtatttttggtagagacgggagctcaccatgttggccaggctggttttgaactcctgacctcaagtgatccgcctgcctcagcctcccaaagtgctgggattataggctggagccactgtgcccaactcctttattgcttttaatctctgcatagtagtgtgtgtattagtctgttttcatgctgctgataaaggcatacctgagactgggaagaaaaagaggtttaattggacttacaggtccacatggcttgggaggcctcagaatcatggtgggaggcaaaaacagaaacccctgagaaaaccgtcagatctcgtgagatttattcactaccacgagaacagcatgagggaaaccaccctcatgattcaaattatctcccaccagtctctcccacaacacgtgggagcacaattaaagatgagatttgggtgggaacacagagccaaaccatatcagtgtgcattcaccacattctcatcttttcccctagaaatagacttctaggatttctcacactttatgttcaacagagctatataaatatgctcctatgtattcccttaaagcccatcttctttctactatatctttttcctcattttacttccttttttgagggagttatgtgggatagaagaaaaatggacttcttcatttataacatacctgaagttgggagtattttaatccttaaacagattaaaatgagctgggtgtggtggctcacacctgtaaccccagcactttaggaggctgagggaggcgtatggcttgagctcagtagttggaaaccagactgggcaacatgacaaaatcctgtttctactaaaaatacaaaaactagctgggcgtcgtggtgcatgcctgtagtcccagctacttaggaggcagaggtgggaggatcacctgagcccaggaggtcgagggtgcactgagctgtgattgcaccactgcactctagtctaggcaactgggcgagtctctgtctcaaaaaaaaaaaaaaaagagtaaaagatatgcagactatgtgattttctgcttccaaaaggaaccacatagacaggaagaagatccaagtgaattattctcttctatttctttacattgccttctgtcattggtaacataacctttatggcattcacaagtatatttgttctagctttcttcttttagtaattctgttgctgtcgtttgtgtgaaatactgcatattataacattgtaattataaatgatttatacattatcttaatcgttgtcagggccaacgtttttcttacaagcagataggaactatgctttgttgtaactcatatttgatcgactctgagaacaaaatgtattttatactttcttggagtagtcccacaaaacatgtaggacccattaagaggaagaaagcatgctatatggttgttatatttgttatttttgacttgtaatttattcattctctcagccctgttctctgactagtgttactatggcacctaagttatggcatggaaaacaagctaattatgttcttcagaacagacgacagtgatacatcttgagacacaagcatctggtagtcttagccctttcctcatcagtgctagtctaggcttggttgggctctctggttgtccaaatatttttctgttacaacacatccttctttattttatttttcttctataaatagtggtttatgctttctaaagcctctagtctcatatttagtttgttcctttttgagccttctgtctactcaaagaagtaatatagacttactcccagctgtgtatgatctactcttactcctgtttattgagttaagctttttactatttgtaaacatctcttggttgtgtagacacaaatacaccaaaactaaaaatggttaaattggggtgaaaacttacggatatttcttacaatttatttttcaaaattcagtgatgtagttagatggctctcctgataaaaattgtttaagagatatgagtaatcaatacttttttatcagaagtgacatctaaccatattaccaaattttgaaaaacaaagaaaatattagaattatccacaatttttgtacctaaacttaaccagttttacttttgtttattcccttataatcttttttactattgatttaatgtaggttataatcatactgtgtacacactatttgtatgtcttctatttaattgaatatttatgtgccataagcattttctactttactacttagttttcatcatcatcatcatttgtaatatctttaaaatattctctggagtggtgctattcaatagaaatataatttaaaattttccaggacccatatgaaaaatgtaaaaagaaacagcttaataatggattttatttaatctaatatatctaaaatatttattgtttcaacatgtaaaaattatataccgtattagacataaaaattattagattttaaccttcttttcatagtacatctttgaaatgtacctattttacatatataccagtgaattacgtcactaaactttcaatgtcaaaataaaatgtagtcctaccaaaacaataaagctccagcagaaaaatatgaaatgcttcaatttttacatttaaattaatgaaagtaaattaaaaatttagtttcacgatcatactagccacgttacttatgctcatcatgtacatgtagcttcttcatttaaatttaaattacatttaaaattcaagmctctctttgcactagtcacattttaagtgatcagtagtgagctttagagtatatagccaattcttgactgttcctctgtcatttttttacattgatttcaatgaaataagtacactgataagtttatgaatgtatattttcccatgttttggattactttcttaaagtagactctcagaagtagaattactgggtcaaagagtataatcaacccttcttcatcattgttaccatattgtttctttagttactagagaggaatatttctctacatatttatttactatgtatttctctttcaatggaatactttttaatgttatggtttatttatctattggtgtcctaatgtttgtttaatttttagtctacttttaaatttctttgtggactaaagatactaacgctttgtcttgtttttcctcatcttttgtttatttgtttgtttttttccttctgggagtaccaactgaaccctttacttttactatagcaaatatttagataatacttcctctgtaagcttcaaagtttttcccactctagaagtttgatatttacttctcttttatcatagattttctatgtatttttaaaaaatgtttttatcaaactggaatatatgattatgtaattgtgagaaaataaactaaattacaagttcttaaccttcagttgaatccagtgcttacccattatttttagataaagcctcattatatatagttgctgaccaccactgcatagttttacgcatatgtgtagttaatcaggaagtagatggacccaaatagattaaaatctactgtttcaaatatttcaaaataatatcatatattcttccctattatattctgatcagaatattgttctcagtaaaaacaaagtcttttttttttctatatcaccatgtatccacagttgattaattatagtcatggttattttacataggtttatttccttttgaattaatatagacttatacttccaagagttataaataactgaaatttacatagttgtgtatgcacacatacacatacacatacccctattcctcacataattggtaatagaaataatgaaaagaggttgtgttcttaggcaaggacaatttaaaagaaccccaaatgattaccttgaattaaggtaaacactggtaaaaaaaaaaagagcaaaaagggcaattttttcctttagtatattaaacaatgttgtttctaacattccctcacgtttagactactctgaaaaatccttagagtggttgtgtaatgtgtttaagttttttcgatttccaagcattaagtctggctccactaaaacggttgtttggttctattttagtctgtccctatctgtcctactgctaccactttgtgttgttttgttttctgttataatgaatacaacagtcccacttcattctcagttctaattaacgttatccagcctctaagtgttagcatctactttgcttttggttataggatcaacgataaacagctaactgttgtgcagactgaaatccctaattagtaaagcacaagattttattggttatatatttttctaaactatagacttgattttgttgcaaaccttacatgtagaaaaaaaattttgtaatggcactgtttttatttttggtgatactatagtctggaacatgtggcccagcaaaggttataaatctagcaagaaaaattatggatggcatcaattttaacagtctttgcgatctaacagagcataaaccccaaattgtttaaatactaaatatttacttaaagaaaaacaagagatcattcaaaaatagaatttaaatagtgaatttgccttttatttaaaagttgacaagttttgtatatttataaaattaacaaaattgacatcatactatccatatcacaagactcttgtgttgtattttaaaggaaaacacacacacagcatacatacatttggattggggccagatttagactccaggggcacagtgttctgtaccttaaattacaatcagatgtattttagcacagatcaaattttcagtctgaagttggtgagaagcctaattatttgaccaggttactatttatgtagaccattctgtggctggctgtggttaatccacagctggcagaatgctagctatgggaggtttttatttgatgctggaacagtttggggagaaatagagggggaaagctttaaaatcttctcattaaatgaaagactaaaaagcaagacagtacatccatattactatggagacaagatgctgtataaactgttcgttttaattctccaagtgacagaaatagcaaagcagcagcttggatgctcatagtttgcaagtgataggatacttggttaaaaaagaaagataaaaacatttaaaaataataactaagactaagatttgttgcctcttagaacacttgaatattggtaaagaattaatrgattcaatttttaaatgatgagaaatattgttattatacaaaaacattttgtatttcactaaacatactaaaacatttagaatttcactagcagtactttaaagtgataagaggcagttgtaggggagaaaaagtaacatattttcctcatccatcgcaagggtcatgactgaaccctctgtaacgaaacagattaacaagagaaaagcataatttatttaacaaagttttacatgacacaggagccttcagaaattaagacccaaagaccagcaaaaactgtatttttatgcgaagtctgatgaaagacatggatagttgtagagaaacattagacaaaaggggtatgatctaatggtaataaacctagggttgaaggatgtggaagccagcaagtcctgtctgttagattattcttggccaccaggtataggacaggacccctttggaaaagggttttatggccagctttcacacagaaaggtgggagaaggtcagagtgaccttgcttctgcgggttttctcaattgctagggggccatattttggggtattgtattctgggccctgacacaattatagtagacgattctctcttaacgtctcagaatatgtataaaggcaataaacccttccttaaaagatggaccccaatacacatggctcctgccactaaattaatttttttagtcttcttattgtagtctatttgaaatttgaaagtaatattttaaaagatttttttttctttttaaacttttcagagtttgcattatggaaatcgttggtccctcagttataagtgaatatctcagtagcatttttgtaacttttaacagaagtttcttttatattttcaaggttatttcttccatttataagccagttcttctccccttctagtttccagtgctcccacttcctctagttctttgctctaattatcctctctcccttgcctcttcattcttctatttctccaatagatcctttyctttgaaaagcaaaatctttccaactttccctgcccttaaaagcaaatctcttctttcctcccttccctgcccacccttccccgcaaaaaagcgtttgtgccttttcctcctcttattatctgctcaaattagcaacatatctggagtcatatgaatccaggcttcatcacatgtaagctgtgtgtcctaagaaacatctcttaacttctctatcttgctttatttatcaaaagaaactaatatgtccacctcataggtttgatgtaaggaaaaaacaataactgagttgctgtatagtatagtgcctgggacacaataattactcattacatttcagatggttttattatcattactgatgaagctttgaaaataattattcttaccttactttctcaccattccttttttaacaactacttctaccatcatactaagtgctttctgttaatcatcaaatcttatgacttttactcattcctttctttctctacttccccatagcaccttcttaaaatttcccttgcttagtttctccaccatcacttctcctctcctcatttggcctcctcttgtttyctccttttccttttttatttcctctaatttttgttctccattttttccttcgtcgtcttttgttctgtgttctctgccttgggaattacaccacctctttgacctcacctctttcatgacctttcctctaagtccaactttctggtagatacttagagatcccttagaacctcaactgtagtatgaccacaactaaacactctttaccatctaagccagatcttattctggaattttccacttttattaatggtagaaccagattcaaaaatctcaatcatcttttgactcttttcttctttgccttccacatcttaaacaattgccaagtcctgtatgtagtactcctaatatggttttcttttacacagccaaatgtagacatttattaactgttgctgaattgttgctgcccaggttaactttgctttaaattttcccataagcttgttattccttcctttcacggaaatattcattacccatgatccacccctacccctcttgcacattgcccaccaaatagattcctaccctgccatccaaggccctttgtattcttaacttcgccgaccttttcaagtctctattattgccctttgtgtattcctttacttgtttgtgcaccatccaaactaatttcctgtatatacatgtatgtctttgcttatgctttcctctagaaagcatgaatatgttttaataagactttcattaatattaaagctgtacataaatagcattttaaatgcagctttcctgacatgaaattttaaagaaatttaaagaaaattttaaagaaaaattaaatatttttcttttgcattactgcattcttttctcattatttgaaaattctaattcagaatcttcctcaaaaatcaatttagatatttcttaaggtaacaagttatgattgattgattgattgatatagagacaaggtctccgtgtatttcccaggctggagtgcagtggtgtcatctcggctcacttcaacctccaccacctgggctatagcaatcctcccgtctcagtctcatgagtagctgggaccacaggcacacaccaacacacccagctaatttttgaaatttttgtagagacagagttccgccatgttgcccaagctggtttggaactcctagactcaagtgattggcccaccttggcctcccaaagtgctggaattccaggtgtgattcattgtacccagccagaagttatgatcttaattaacagattattttaaagtcacttataagaatacaaactcagccaggctcagtggtgtgcacctgtaatcccagctacttggagggctgaggtaggaggattgctttatcccaggagttcaggaccagcctgggcaatatagtgaaaccttatctcaaaaaatatatattccaaactgtttgtaagaagctaaaaggattcagtttgccttcatagtacaatttccctaattcgaatgtaattattgtcttgaatgagacctttcaaacattttttctttcatgaatttccagaattctttagtattgagcatataaacctagtatgaaataagtaatgctttattctctgaagtaatggcatgtatcaagcatatggtactcatatgatcaaatatccttccagtcaaatgttgctattttctgccttgcatcttataattgtattttatatacttttgtattttgtataggtttcttttattctcactgagagtgactgtggagatggtatttctaattttccctccttttttcttcatccagggcttttttcttacagtttccccagagtcagtattaaaggtggctcaccatgcttctgaaaacaacaggattttcactttgaatctatctgcaccgtttattagccagttctacaaggaatcattgatgaaagttatgccttatgttgayatactttttggaaatgagacagtgagttacckttcctttttcaaaagaacctgggggttttttgtttgtttatttctgatgtgtgtatatatgtttagaaatatataaattaaatcctaaatttttgtgtaaatrtccttgagaattgtgcaacaaaattgcctcaatgtcaactgctctcagtattttcaatatttccttcagtatatactaacttctttcttagtgaagcatttatttatttatttttatatttttatttttttgaggtggagtttccctcttttcatccaggctggagtataatggcatgatcttggctcactacaacctctccttcccgggttcaagcagttctcctgcctcagcctcctaagtagctggggttataggcgcatgccaccatgcccagctaaattttgtatttttagtagagacagggtttcaccatgttggccaggctggtcacgaactcctgacctcaggtgatctgatcgcctcagcctcccaaagtgctaggattacaggtatgagccactgtgcccggcccaacatttatttttttaaggtgtttgacgtttgatttacttatagtaagagtcatcctttttactgtaatttctgtgagtttttacagatggatacctgtcctgttactatgaccacaatcaggataaaaaagcacattcatcacttttttaagtctcttcagagtctaagtccatttgatatttgtttaataaattatgagtaaattttgatatattacatttatatttctttattaataatatttttaaaatattgtctgttatagttgaaggtgataaaatggaatttcatctcaacaagtacagttttttctttctaccaagaatgtattttcttccattctaaattatggaaatgcttatttacttaaatgcttatttactttgattgcttgtttactgtttatacctcttatttactgtttatacctctttaaaaatccatgaaagaggaaaaaatccttcagtgtgtcttcctatgacttggccatgtcacttgatggtttaatgtatacaatgaaggtattgtattaatcatcccagaagttcattctgattctaattccatagttctaacatagtttgaatatattcatcaattttatatctaataactgccatctgcctagaataacataaaaattgacctggaagtttacgagatcacctgggtaaagattaaaggatgatccatagaaataatatcacagtgtatctgcaaaggtgatggttacattggttataaatggtgacattggaaggaaatgctatattcttgataattcacaaattgagatactggcaagaaatagtggtaatagccaagtgccatataactgctagaagcctaatttgactaagatctaccatttagtttttccttattaacagttttattttgtaaagggtaaaagaagtaaatgggaaaagtgctattcaagccttttgaataacattaaagcattggtctcagtagtcttgagaatcattgggagaagttaacatttggtctcagagttctaaatagtcaagaaagatcagactggcagcacttaaataagttctctagagtttaagagacaaatcttaaaacttttaaaaaagataaatatgattccaaagaggccgggcacggtggctcacgcctgtgatcccagcactttgggaggcagaggcgggtggatcacgaggtcaggagattgagaccatcctggctaacacggtgaaagcccgtctctacttaaaatacaaaaaatgagccaggcgtggtggcgagtgcctgtagtcccagctactcgggaggctgagacaggagaatggcgtgaacccaggaggcggagcttgcagtgagccgagatcgcgccactgcactccagcctggacagagcgagactccgtctcaaaaaacaaacaaacaaaaaaaaaaaaacataaatatgattccaaagaatgaaactttggaagtaaagaaagcttagggagattgaatgccataaaaaatgctatttggactttatagtcacaaatgatcttaattaaggagagaatgtggagggaccttttgaaaaaatatagcagagcacgcagaaaactctttaataagagctcaaatttgraggatracgagatrgctgcctctgcctttgcyggtgcagtgagagcagcttcaggaatcytayggycyctgaatattttggcatcttcagcctaccaaaactgtgtcaaaaatgcctctcttatttctgcattgtccactggacgttttagtcatattcagacaccagttgtttcctccactcccagacttaccacatctgagagaaacctgacatgtgggcatacttcagygatccttaatagagtggccctcttgcttccaagtgtcttgaagctgccagccagatctctaacatacgtcagtacaggaaaaggcaagagaaggattgtgaaagctgtcatctataggtttcttcgacttcattgtggcctttggatgagaagggctggttataagaaaaaattatggaaaaaggcacctgcaagaaaaaagcgattgagggaatttgtattcggcaataaaacccagagtaaactcttaagataaaatgacgacgtccttctggaagaggtgaaactggtatgtccatgatccttatcagaagtgtcatgatcgaacaaacctgaaagtatagatcagaagtttcacttgtttctcagttattgaatatgtatctttgtgtacatatctgcaaaaatggataagtaaaaatctcgatgtaaattgtatcaatgaatatgtaaacatacagtgacaacaytraacttakaaaagttttaaaacttaaaaaaaaagctcaaatttgtaaaagacatgtaaaaagaaggtggaaaatgtatttagaatcagggaatgatgctaaaagtttggtagagacaaaagagaaaagaaagtcccaaaagtggtttaagtttgcagcagatgctgatgatatcaaaacaatcttcacttaaaaaaaaaaaaaagactccaaagtacaagcaacaaatggaaaaaatagataaattagacatcatcaaaattaacaatttttgggcatcgaaggacactaacaagaatgtgaaaagacaactagtggaatgggagttaatatttgcaaatcatatatctgataaaggattcatattcagaatatttaacacagtaacaactcaacaataagcaaactaacaacataattcaataatgatcaaaggaatttaataaacatttattcgaagaagatatacagatggccagtaaacacatgaaaagatgctcaacataaccattcaagaagtgcaaatcaaaaccaaaattagataccacttcacacccatcagaatgacaattgttttaaaaaatggaaattaacaagtattggtgaagatgtggagaaattggaaacacttgtgtattgctggtgggaatgtaaaatgggaatgtagaagacaatttggtggttcctcaaaatgttaaacatagaattattaccatatgatctagcagttctacttctaggtatattacccaaaataactgaaagcagggactcagataattgtacaccaatgtccatagcagcattattcacaatagctaagatagaagcaaatcaaatattcatcaacagatgaataaacaaaatttcatgtatatatacaatggagtattatttagccttaaataaaattttgatacatgctacaacatgaatgaattttggaaatactatgttaagtaaaataagccagacacatcagacaattattggattttctaagaagaattccacttacaagaagtatctagaataggcaaattcatagagacacatagtaggatagtgattacctgggagtggggtggggaggaatgaggcattattgtgtaataagtacagagcttctgtttgggatgatgaaaaagttctggaaatggatagtggtgatagttgcgccacactgtgaatgtatttagtgccaatgaattgcatacttaaaatggaaaattttatcatatgtatagtttaccacaatttttttgaaaaagttttattctacaaatcagtaaacttaaaagttggatcacagcttagcatagattattaaaggaattatttttccccacctagaagaggaagtggtaaaactgtaagctgctacgtggctgtaagtcatggggcaagaaaatcttttctcttttggtatgattattgttcatttgaattcgcttcaagaggtatttatatagtacctaagtacctattatggcagaccaataagcagtggatacatagtatattttagaacatctgtcattacgtggactatagaataataaagattggctataagacaattagaggtatttggtattttattgaagcagtctcaaaaggtctgttgataaataaattgatttctaggggtacgcctcagtgtttaccctgcctttgcttaagtaaacagtgatttagataaagctatatttgcatataattcaaatgcaaataatacaacaccttaatacatactaggtaagttgaaggtcaaaatcagatttttttaaatgttagtagactctaaatatcagttgagtgatgaaatttaatagggataataaaaattatatcgtatttgattataaaaagcaagtagagtaaaatgctttatccctttaatctcatcatccattgtttttctccttgaatactatagtgataatgttatcttcagttttccaggaaaaaagagacattttacttctaaaatgtgacgaaggataaaatatagttatcagagaatatacgtaggattctttaatatttcccccctcaaaaaaataaagtatactgtgtttagtataaatttttaaaatgtcaaaactcagctaaaatcaaacacacttggcccttattttctacatgtcaccttcctcttgtcagaggattgtacagtagtaatgatgatttaaaacttctgatagcctcaatatttaaaaaaaataataccttgtccacaaagattatttcttcacaggcaatgatcaatgatccctgtgagacaagaaataaataagataaacctgatgattaccccagctaactccttggagataatttccaggcaacagaagaaaggtaactaaggccaagcacagtggctcacgcctgtaataccagcactttgggaggctgaagcgagtggatcctttgaggtcaggagttcaagaccagcctggccaacatggtgaaaccccctctctactaaaaatacaaaaaagcctggcagggtggttgtgsgcctgtaatcccagctactcgggtggctgaggcatgagaattacttgaacctgggaagcagaggttgcagcgagccaaaattgcaccactgcactccagccagtgtgattgagactctgtctcaaaaagaaaaaagaagggtatctcaagtagacccttgcagtctcttttaatgaggagttggagccggaagttcaaggagtctaagacagctagtgtttgtaagttaaaagtaccagagaagaaatagctgaatagagggagaacacaggacatttgcagaatcccaacaagtcttcagctgagtatgaatcagtgcatttttgtgaagaaattaaggaagaccacaaaaagaaccacctaaaaagattgtagaagacaatcctcagtgcacacatgaggacctataaccattcctatcctactagtcagagtggataacctcgtaattcacgaggcttcaagtagagtattaaaaggaattttgtctcattagcaggttaaaatcagctctagactagatgttctggtccctcctgtcaatattattacaatatatttgacaacctttatgaaatggacaaatttgttaaaagacacaaagtactaaatcatactcaagaagaaatagaaaaagtctgtttagattattaaagaaattgaatttgtagttaaaacccttgctacaaagaaacttcaaaggctgaattgcttcagtgtttaattcttttctgtttgtttgtttgtttgttttgagacaaggtctcactctctcacccaggctataatacaatggcacaatcatgtctcactgcaagctcaaactcctgggttcaaatgatcctcctacctcaacctcccgagaagctaggacgacaggtgcaaaccaccacagctggctaatttttaatttttgtagagaggaggtctcgttttgttgcccaggctggtttcaacctcctgcactgaagcgagtccttctacctcagcctcccaaagtgctgggattacaagcatgagccactgcacttggcagtgttgaattttaacacagatttcagaaagatgtagtaccaattgtatacaaactgtcccagaaaattgaagagggagaaatatacctatcttatttcatgaggtcagcattaccttcataccaaaaacaaagtattgcaagaaaactacagaccaatatccctcataaacacagatgtaaaaattcttcaaataattttagcacatcaaaccgaacaatatattaaaagagtaattcatcatgactaggagtgtagaattggtttagcattttgaaatccatcaatgtaattaaatatgttaagactaaaaagaaaaatcacatgattatcctaaaagcttttgaaaaatccagacatctatttctgttaaaagccctcggaggctgggcatggtggctcatgcctgcaatcccaatagggattggtgagggtcaggagtttgagaccagcctggccaacattgcaaaacctcatctctactaataatacacaaaatagcagggcatgttggtgggcacctgtaattccagctacttgggaggctgaggcaggagaatcgcttgaactggggaggcagaggttgcagtgagccaagatcatgccaccacacgccagcctgggcaacagggtgaaactgtgtcaaaaaaaaaaaaaaaacccttggaatagtagaagcatgaaaaaatccagatttagaaagaaggaagtaaaactgtctctattatcaaaagcatgatcatcttcatacaaaatctgatgtcatcttcaaaaagctattagaactggctgggcatagtgcatcacgcctgtaatcccagcactttgggaggccgaggctggtggatcatttgaggtcaagagttctagaccagtgtggccaacatggcaaaaccrcgtctctactaaaaatacaaaaattagctgggcatggtggcacacgcctgtaatyccagctacttgggaggctgaggcaggagaacccgggaggctgacctgaggcaggagaacccaggaggcrgaggttgcgatgagccgagatcatgccactgcactccagtctgggcgacagagcaagactctgtctcaaaaaaaaaaaaaaaaaaaaagctattagaactaagtgacgtagcaagattgtagcatacagaataaaaaatttaaatctcaaatgtatttttctatattagcaagaaacaaccagaaatttaaaaatacgatttccaataccatcaaaaagtataacaaagtatttactttgggataaaccagaccaaagatgtatacactgaacactacaaaacattgttgaaaaaatttaagaagacccaaatgggagatatatcatgttcatagattagaagactctgtattgttaaatataaattctactcaaaataatctatagtttagtgtaattcagtcagaatttcagaagttttttttaaagtcaagttgattctaatatttatatggaaaagcactggactagagtagccaaaccaacgtggattttaaaaaccaaatcagaagacctttacatgatttgaagacttattacaaagctacagtaatccagacaatgtggcattggtgtaatgatagacaaatagtcaatggaacagaagggaacgtccagaaatagacctaaatttatttttcaacaatgtttcagaggctttttcatggaggaagaaaacagtctttttgacaagtcgttctggagcaattaaatatccatatctaaaaacgcaaacttcaacccacgtaacaaacaactgcacggctattagaatgtctgaaagtgtgaccataccaaatattggtaaggatatatggagcagctagaatgtaaaatggtacaactactttggagaatggtgttcttgtttcttacaaagttaaatatacatcctccaaatgacctagctatcccactcctagatattcacccaggacagatgaaagcatctgtccatgtaaagacatacacaggtgtttatagcagctttatttgtaatggccaaagtctggaaaacaaaccaaacatccacaactagtaactggttaaacaaattgtgatatttccatagaatagaatactactcaactataaaagaattgtactattgataagaaatgaaccaacagcatagaagaattttagaatacctatgctgagtgtaagatactgtaaagtacattctatatgattctatttatattctagaaagtgctaacaaatttatggtgatggcagatccattgttgtctggggacagggttatgctatgaggcagtgatcacaaacgggcatgaggaaacttttaggagtaatagatgtgttcccattgaggttgtggttgcagtactttatacatacgtcaagttttatctaattaaacacttttagtttgtgcagataattgtaygtcagttatacctcagtaaagctattaaaatgaatatatactttgattccatttatatgtttaaaagtaggaaacattattctaaagccattaagttccaaaaatacactgctaaaatgaagaagtgccaatttgttattttttgatcaccatatatgaaacttctgttatttccatggaagatccccttatatttaagtagcaatgtcaagccagaggaagagtgttttgatagtcctgggttctaatcatgacaactaaaaattatcataacctaccattgaataatgctttaaagttaaaaagggtattcacaaaaaccgtcatttaatctacaaggcaattccatgtgtttttctaatgcatgtaaagtttcagcttggctcatggaatatattctcaatttttgttaggtaatgttggtagtagttttaggagtattgatcatgttatctattaagtttcacttcactttaacttgctttgataactcacactcttcattcattcctgttaaaacataatgaatatagtaccaagtgcatgagggaaaactcacagctattgggctgctctctgctataccaccttacttctgttccaacaaagttatttgcttacaaaagttaattatgtttttcctaaacttggtgaaatttgtgttcattatttaattatttaacattatatattctgatgaaatatgaatgcaagtagaatgagaattagtttaatgagttaaggttggttccaaaactaaatacatatgagttatttttaatgttgctattgaattggatgtgggcatgaaaagtataaaagattaaaggcagtaaaaagctgtaaacatctgtattcaggagtgcttcataggtgtttttatgttttctctctgctttaaagaagttgaaactaggccaggaaccatagcgcacacctgtaatcctagcactttgggaggttgaagtgggaggattgcttgagcagaggtgttggaaaccagcctgggcaacatagttggaccccatctctccaattattttcttaaaattagccaggcatggtggcacacacttgtattcccagctattcgggaggctaaggtgggaggatcgcttgcacctgggaggttgaggctgcagtgagctacgatcatgcaactgcactccggtctgggtaacagagtaagaccctgtctaaaaataaaatttttaagaaagtaaaatgagaattcataaactatgaattctagatgtggttctacaagaaaaactctagaatgtcagtctgtaggcatgctcaaaggttttgaccctatttttttttttttttttttgagacagagtcttgctcttattgcctaggctggagtgcagtggcaccatcacagctcactgcaacctccacttcccaggttcaagcaattctcgtgtctcagcttcccgagtagctgagactacaggcgtgcacaaccatgcctggctaatttttgtatttttagtagagatggggttttgccatgttggccaggctgattttgaactcctggcctcaagtgattttgaactgcccacctctgcctcccaaagtgctgagattacaggtgtgagccccccacccagctgaccctattttaaatattagcaaatgatgtatctttatatattaaaataaaatgtttagattatgaaagctattttttgttcccttaatttaatcatcactctgatttatttatcaactactattccttttcctcatctgtaaattgaggggatttgcatagaaatactagataatcttttaaattttttcttaaagcttaaacatgttataaaactgatgattcattttttttccacattctaagattaatactgttagattttattataaattaataaagttcctcttttaacatgtaaaataatgcctgacatttcttttaggtagttctgattttttattatgagtgtagccttaactgtagtgcctttgaagctgaattctccccatttgtgaccccagtattccttttttgtttagtgaacctaggggaaatgatatttctctccaaaaaatacctgaaaatatttggttagacacgtgctgggacaaaaagtgaagtatccacagtaataccattgctatgttcttgtgatataaccagattataattactaaatgatacaatttactttctttttttaattctggtaaaaaaaaaatacacaatataaaatttagaccattttaactatttttaagtgtacaaatcagtggcattaagtacatttgcaatgttgtacagccatcaccactattcctctccagaactttttttttttttaatcaacccaagcagaagctctgtacccattaaacaataactcactatttcctgtttcctccttcctcctcacccttggtaactgttttactgtctatctatgaatttgcctattttaggtacctcatacaagtaggatcatacaaaagttgtctgacttaatttcacttagcataatctttttaaacttcatccatgttatagcatgttatcagaatttcatcttttttaaggctgaataatatttcattgtatgtgtgaaattttgttttttgcttcattttgttgatagacatttaatttgtttccacctttgattattatgaacaatgctactgtgaatgttaatgaacaagtatctgtttgagttcctgcttttaactcttttggatatatacctagatgtggaactgttggatccacaacaggtacaccattttacattcctaccatcaatacacaagggttccaatttctccacctcctcaccaacacttattttgcatttaaaaaataatagccatcctgctgggcacgaggtggcatctcactttggttttgatttgtgtggtttactttcagccaaggttcagaaatacatagtgacaaatttctgtttctttaatttaaaatctttggtaacctgttacattgcattttgtacttttaaattacacatctgaattgattggttatccttgttaaagtagttccaaaattactgtagtttaaaaactctttaaatattacattgtagttttaatttgtttctgacatcttcaaagtttgaaattttcccttcagcaacaaccatttgttagctacattcacacgaaagcagcttaataaaggacattctacacaaaggtaattataatccattgatgccccttaatgcaagctgctttgtagtcattatctagcagtagatgactaaagaacttgattattcttgtttttcatttttattaaattaagaaggtttttttaaattatgtcattttgcaaatggttcttaggagtaatgcctttcaaggctccataatcactagataattaacctgcaaggattaagtacactcaactttgcctcaggatgcttaactctcaaatacagtcaattatctcatgataataactgctttgtcaagagttaccacttaactccacagtgaaaagtcaaatcacccataccatgcactttaagatagtttcaataataaaataacagtttgaaatggggcagaagaattcagttaaattttttcatagggataagaatgatatgctttagataaagctccccctcatatctagtattttgaatttcacaaatgacttcaatttataaagataatataggccaggtgcagtggctcatgcctgtaatcccagcactttgggagaccaaggtgggcagatcacctgaggtcaggagttccagaacagcctggccaacatggtgaaaccccatctctaataaacacaaaaattagctgggtgtggtggcacgcgcctatagtcccagctgctcaggaggctgaggcaggagaatcctgagaaccctggaggcggaggttgcagctagccaagatcacaccactgccctccagcctggcaacagagcgagactccgtctcacaaaaaaaaaaaaaaaggtaatgtattgctctgcttcatcagtccttttgctggcagtgttcctgcattgcaaattttcttataggaaagccattttgtctgttaacctcacagaggattcaatatattaaaaatctctaatatacaccaagaaaatggaaattactttctttacatattgatttaacttttaaaaaatctcgtttatcaacaaacgaattacaaaacagtgagcaaaattctgcagtttgttgtggttgttttttgttgttgagtagcttcactcatatttggacaggatatgccaaaaacagaaagactgctagatagatcaggacattttgaaagaaaatataaaaatgtctttaggtttgttatccatgtcctctaagcctgaatgatgcttgtatctctttataagtaaactatcattatctttttactaaaccagatgggatacattggctttttcttctgttatatattttactgccatggggatgggaagagactttattgatattttgtttacacttttaaaccctttttaatgtttctaatagttaattaataatttgaaaccatcaattctttaaattgtaaataactttgatacaggttatcttatttttcagtttctatacttctgtaaaatagaagtcatttgctcttttaagataaaaaatctgtgtgaatctatgtgtaattatgtacaccaaatagtgctatacatgcatacaacttctttcagatattcttcttttggttaagagcctttttttctttgtaaaggtattattttaatttttagaactatttttctgtgcactggagcacatgtttgggaggaaaaaagaaactttctgtcaagtccctatacacagagaattcttgtttgaatttttaaaaaattttgtcaagtctagttcttttatttatttatttattatcagttagagacagggtctcactgtgttgtccaggctgttctcaaactcctggcctcaagcagtcttcccgccttggcctccctaaggttctgggattacaggcatgagcgaccaagcctggccaagtctaattctttaaaggatgtgatttccaagtatttccaggaattcaagactgttacctagatccgtattctgacaaaagagatgatcttttctttcttcatatcagaatatttcccccatgaattgagggaaatggggctgtatctaaaaatggtaactctgccctttaaagtatacagaagtgccctgtttcttcctaagagaggtggaagtcccctttctgagactgtgcatatagatctctttattcccctttttctgctataagtgataagaggggctatgtagacaaaatgtaaggttgttataaaatcatcaaggaattgggaaagaaactttatcggaggatatacataaccccttcagaaaaaaaaacaaaaacttatggtgctttttggaagaaattctgacatagttgtattttctgagaaggataatgaaatttcagttaacatggaactgtaacttcgtaaaattgctgctcagctcctagatttaactttctccctagggtttttctaatatatttactcatctgaaaaaagtgagattgactgtagcacaagggagacttctgatgtcagtggcatgttgtaaagatgtgctatgggaaagattcagaaaatgcaaaggctatttaactatatgctctgcatctctcttcctttctacatagctctctcctttctttcttactccttcgtctccctctttacgccaactacattgcctctctgaagatgaaatgcttttaaatcatccccaatctaacatccatcactggtaaaaagccatctaattattatgtgttgatttttaaaaattaaaaaaaattattagaaaattaagaagagcatttaaatgtttttaattgcaaggagaaaataaatacactcaagtaaagaaaaacactgtgtaatttgaaatagtttgaattactacggagataatcatattttatgcagtaatgcctttctattttattcactatttctattaatctttatttgtttcagttactgtactataaatttgtaagtgattattttggtattatttgtatagtatgccataatataaaaataatgaaaaatattaaatatatatttaatgttcttatttaatgcctttaattttttttttctttgagacaaggtctcactctgttacccaggctggagtacagtgatgcaatctcggctcactgcaaactccacctcccaggttcaagcgattctcaagtctcagctttccacatagctgggattacaggaatgcgccatcacactcagctaatgtttgtatttttagtagagatggggttttgccatgttggccaggctgatcttgaactccaggcctcaagtgatccacctgcctcggcctcccatgtgctggggttacaggagtgagacacctcacccagccaaaaattattgtttattaaaaatcatttaatgacattgacatccttataaataaaaactgtaaatttatatcacagtagaaaaagtgctagacctaaatttagaaaacctgtcttttatcctagctcttgagtttttcacagagaaaataggagtcaagaagccaaaattctgacatgagggaaataattagcaaaatttaaataggtgccattgattagtcaatggtattttatcaacattaatttttattttattatttatttatttattttgatatggagtcttgctctgttgcccagactggagtgcagtggcatcatctcggctcactgcaacctccaccttccgggttcaagcaattctcctgcctcagcctcctgagtagctggggttacaagttcctgccaccatgcctggctaatttttgtattactagtagagacggggtttcgccatgttggccatgctggtctcgaactcctgacctcaggtgattggcctgccttggcctcgcaaagtgctgggattacaggcatgagtcaccgcacccagcttaacattaatttttttagttttggtaattttaatatggctatatagaatgtttacatttggaaaaatcctaatatcctttttgactgatccagatccagtccaggttgctcacattgcatttagttaccacatttccttcgtctctttaatctagaatggttcttcagtctttgtctttatgaccatgacaattttgaagagtcctgactggttttttgtagaatgcccttcagtgtggagtttcctcatgattaatacattttttataggaataccatagaaacagcctgggcaacatagcaagatgctgtctctacaaaaagtaaaattcaccaggcatgatggcacattcctgtagtcccaactacttgggaggctgaggcaggaggattgcttgagcccaggagtttgaggctgcattgagccatgattgccaccctggactccagcctgggttacagaacgagaacccccacacaccccccccccctaaaaaaaaacaacacaacacagaaatgctattgtgtcttttttcatgcgttatactaagattttagtgtgtttcgttactggtaatactaactttgatcacatggttaagaaaatgttggcccagtttattcacttcaaagttactatttctggccaggcatagtggcttacgcctgtaatcccagcactctggggagccaaggaggacagatcgcttgggcttaggagttcaagaccagcctgggcaacatggtataaccctatctgtactaaaaatataaaaattagctgggcatagtggcatgcacctgtagtcccagctacttgggaggctgaggtaagaggatcgcttgagcccaggaggtcacatggtgaccttggaagcaaatgctccctcaaacacgagatgactgcagccctggtctacatctcagttgcagtcttgtgaaatcttgagtcagaggcactcagctaagccatgcctggattccttttcctggaaactatggagataataagtgtttgttattttaagtcactaagttttggagcaatttgttacacaataataactaatatgctgtgaaaaacaaatttactaagagctcaatatctgtgtacaattttttttgtctttagccttttgtgtatattgtcaaaacacaggcttttagttaaagttagttcctttccccttcaagtattttaattttttttaaatatgtgaaacatttatatggttcttaacatcagaactatatgaaaaggtttactcagtagtgtcgctcctcccttatccctcatcttcctcattccccattctgtctctattcctaccctgtttcttcctacctaccctctataaataatctcattagtttctggctcacatttctaaatttcttttagcacaaattagcagctaaatgcatattttactgtatcttctttgttacatgaaaggtagcacactatagatagatcctctttgaacttagctttttttcaatcaagtgcatcttagaaatcattccataaaagctcatagagatccttctcatttttaattttattttagttatttatttatttatttatttatttttttaatgagatggagtctcgctctgtcacccaggctggagtgcagtggtgcgatctcggctcacagcaacttccacttcccgggttcaagggattctcctgcctcagcctcccaagtagctgggactacaggtgcctgccaccacccacggttaattttttgtatttttagtaaagacggggtttcaccatgttagccaggctggtcttgatctcctgtcctcgtgatcctcccgccttggcctcccaaagtgctgggattacaggcgtgagccacagcgcctggcctatttcatttaaaaaaaaaaaaaaaactgagacagggtctcactgtgttgcccaggctggtcttgaactcctgggctcaagcaatcctcctgcaatccttctgccttgacctcccaaagtgctggtattacagacatccagccacaataatcctcatttttttagttggattttccccattgtgtgaatgtaccatattttacccagtcactctcttatgtatggacattaagactgtttccagagtcttgcacttaaaaacaatctttcaatgaataatcttgttcatacatatttcttgggttgctagaggtatttcttcagagtaaattccttgaaatggaattgttgggtcaaaggataagtgcatataacgttttgttagatgttgctaaattcctctccaaaataattagaaatgttttcattctcagcagtagtgtaggtgaatgcctgtttttaatggggttattttaatatttggttatcaattattaagcattgctatcaaatggaattcactagaagcatgtaaaattctagctttatttcaaatacttagttgaaccagccaattcattttagcacagtaaaagtaatccaagaactaaaaagtgatcattctttaaggtacagattttaaagactcttttatcttttttttttcttttttttgctattttatcagacacattagaggaatatgaattaatccccattatacactctttagtttcattttctggccctgtattttcatcttatacttctctcctacaagcacctcttcctttctcctgtactgcctaactattcatgttttcttatcatcaatactcatttcatatattccctacctcacattctccccttctttccctcccttctccactcccattcagttggttattttataaatgtgattctgtgatcttgtgtatataattacaatgcttacatgtttcttttacactagaatgtgttcctttacagcagtgactttcattcttcactacattctggccacttgattggtgatcactttctgaccggaagttccaattatttaatcacaaagttggactttctggtgaccacttcccatcctggggctgacagtgagtcgccccatcagcataacaaaggcacttttaacaatcaggaaattctgagggtttttgaagctctgtgctaggaatccagacaaggacttgatatattttttactataccagtttaagggttaatgataccatgtaacaactttattaatagattactatttatagaaacttgataaatgtggtgggaggtggtgcagaatcatgtgatataatcaattataaatgaaagcacagataaaatttgaaataataagagagaaataagaatgaaggttggccacggtggctcacacttgtaatcccagcattttggggggctgaggcgggcagatcacgaggtcaggagatcgagaccatcctggccaacatggtgaaaccccttctccactaaaaatacaaacattagctgggcgtggtgatgcatgctactcgggaggctgaggcaggagaatcacttgaacccgggaggtggaggttgcggtgagctgagatggtaccactgcactccagcctggggacagagtgagattctgtctcaaaaaataatgaaaaccgaggagttttttctttctttctttttttttttttgagacggaatcttgccatgtcgccaggttaaaataaactttcaattctcttctcttgaatatctctcacccaacaatgtttttttcatgttgatcactttactaaagcgaacaattggggttttaccaaaattgtgaaggattttattcttccatacttatgtctgtgttcagggtcatacagattctactttttccttttagtttaaggtattctcttggagatttaatgtacttaaatttgaccacaatttattgagagcatattctgtgtcagacattgcactctgcactagatattcaggaatttctaaaaagaatgttaacattgctgttacatagtcagttactgatcacattcttttcctctcaacttttttcaaaataggaatctgcggtatgttttcacgtatggagttcaggtcaggcttaggggtccctgacaatgtgaatagttttaagctgggcctcaattcgtggtacccttatactaatttaacaagccgtggactctaggttccaccaaaaatattttgttccatcctctctggtttcagtccatggtgtacagaaagaaaactaaggaacttcagccccaaattgtcaaattttgctacttaagaaacagaagatttaaatctatcattttgtcttatattccagagttgactggttcctcctgtctttaacttcttgtccttgaagggtattctaattttcattcagaaatatgacttctcatagggtttgtgttagatattttcagggccagatggatatgatgttcccatttctgttttattgttaaactactattccttttgagctgtaatgaacaattcattctgagaggcaatatatgttttcagtaattgacttgaataaaagtaaatgttaaacatggagttactaagttaatacagtgggtattagtactaatttgttcaaattaagatagaattcttaatttgataaatagaattcttatattacagcatcagtccaattggattgatagtttgtagaaaggtaatttcttacatgaggaaagacaggttttctttctcttagcaaggtattaatgcaaaaatgacctcttcatttcctaccagcttccagaagggaaatgctggttaggaggtaaattcaatttactctacaagcaaacttcacatctgttatgctgaagtcagagtttatctttcttgttatgtggaacctagaaatataccatgaggaatactgaaaaataaactagcagaaattttgcgtgatgctgaggatttttagatggctgcaaaatgggtgaaagtaatataaacttaacaaagaatgttgtcacaactctctggaacttagtactgtttttcaactaacaaatggaagatttgtgagactaggtcgacttaatgtgatttcaatgcagtaattactgtgtggcatgggcatggtaagagataggccttttctagaaatattctcatctctgttttttttagttgctcttacttagatttatattaactcagcttcacattttcatttctttttattttattttaaacaatgagaaaaatactccacgatgtcactgatttagttatcagatttgctttatttctgtatataataggtaatgtgagtacaggaaatatatctgaaaaggttacttgtacctaaattttaagttagatcatttaaaaattacttataagtctcttgagtgttttatatagtagggcagatggaaaaacttatttgatattcatttttggtacctcttaggaaaataattgggaatgtattcagttggaaaaaatgttgagaagagtgttttatataatgattatttagtaaaacattaaaaataatttcttattctggaggtttatagacatcaaaattgacaaagattcatggattatacatttcatcaaggtacctttaagcgattttttaaaaaaaattctgactctaacaatgcatgctcattgtagagcgttaaaaatacaaaaacatgcaaaagaaaaaattaaaattaacatgtgtcatatcacccagcattaactactctataatttttcctgtgtttccttgtagggtttttcccacacatttttatttgtttttatcatatttatttttattccacacactttttattttgaaatgatttacaatctaggaaagaattataagaagagtacagagttctctcctactacacttttgagcattcttgctttttctctctttctgtctctctaaatatatgtgcttaaccatagtacatattcagatttttctagctgtcccaagaatgttctttctagtgattttgttttccaggatcatggatcatgcattgccttaacttgtcatgtttctttggtttccttaatctggagttccttgatctttctccttcatgccattgcatttataaagagtgttgtcaactgttctgtgtatgtaaattcttaaccaattgaaatagattttacatcatttttcccactttatatatatatatwtatttatttatttatttatttttattttattattttttttttttttttggagacagagccttgctctgtcaccaggctggagtgcagtggtgcaatctcggctcactgcaacctccacctcctggattgaagtgattctcctgcctcagcctcccaagtagctgggaatacaggcgcgcaccaccatgcccagctaattttttgttttgttttgttttgttttgagacagagttttgctcttgttacccaggctaagagtgcaatagcgccatcttggcccaccacaacctccacctcctggattgaagcaattctcctgcctcagcctcccgaatagctgggattacaggcatgtgccacaacatccggctaattttgtatttttggtagagacagggtttctccatgttagtcaggctggtcttgaactcccaacctcaggtgatctccctgcctcagcctcccaaagtgctgggattacaggcgtgagccaccgcgcccggcctaatttttgtatttttagcagagactgggtttcatcatgttggccatgacggtctcgatctcctgaccttgtgatccacctgccttggcctcccaaagtgctgggattacaggcgtgagtcaccacacctggccacttaatatattttcaacattttccaatgtctttaattatgtcaattataattttggattgctgtataatataatttattttcattagtcttctagtgttggaaatttttactgtttgtttttttttcagtattgcaaatacaattgggaaataaactttgtaaataaatctttgttgtaattttaatttctgaatctatcaagtatttgttaaaacataaagcaacaaaacaaaaatcctacagaagaggataattaaatgttaatctttttgattctgaatacaattagaatggaaatttggaaaaggggaaaattgccagataaagaggttgccagatttagcaaataaaaatacaggatgcccatttaaatttgaatttcagaagggacacacgatatctgggacatacttatactaaaaaattattcattgcatatctgaaacttaaatatgactgagcatcatgtattttatctggcaaccctaccagtggtttgagtattcgggaagacttcatggtagagataaagagagggaataaagaagatgttttacacaaaaggaatggttgagattacctccaaaacaagagtgaacatagtttatgtgaaatagtctccataaagataaagactttgtgtctcattcactgctgtatccccgatcccttaaacaatctgtacactgtagtcactcaataaatatttgttgaacgagtaaatgaatttgcactataaataaagccaggcaacttgggacaaagattacctgttgtaactaagtagataaagataaaatttccatgaaagtggaaaacctggcagaagaatttggacttcctgccttcccttatttattttataatgattcattaagtgactgttatgtgccacatgcacaggatactttggagaacaaaaacagacatggcttctaccctcatggattttatagtctgtattagaggcagacattcaatttataattcaattattcatttaatagtcaataaatttcaattcaattatagcgtacaacttataaaattgaatttttaatcattcaatttataaatatgagtactgtaagggaaaagtatataatacttacattctgaaatcacacacagtgagggggtattcttgaaagaacctgatcaagataaatgtacatggtgttgtgtcttagggatagatccaatcttttctttgaaatcttcattcattcactaattttccctcgaatttatagaacactctttggactattacacttatacatcttttaaaatctttttatatgtgcaatttagtttacttactagattgtaaattaattaatttatttatttatttagagacagggtctcactcacatcacccaggctggagtacagtggcacaatcaccactcagtggcagtctcaacttcccaggctcaggtgatcctcccaccttaacctcctgagtggcttggactacaggtgcacatcaccactcctgtcttatttttcatatcttgtgtagagatggggttttgccatgttgcccaggctggtttcaaactcctgggctcaagtgatccgcctacctcggcctcccaagatcctgggattacaggcataagccctgcacctggcctagatcgtaaattctttagtgagctgggggtatttcaatttgcttttatcccctattgtttcatgtatgtaaaatatacacaggcgttaattattgacatgttgattcattgaaattataatggggcttttaatagctatagatatgccatgagcacataaaagacgatttcctgattctttgaccctcttaaagaagtttatgatgcctacttgtcattcttgggtccttagaccttctgtggcaatattaggtcggggatagatgtctaatgatttgcagtcagggagctttgataaccattgtcacatgttagcataaatcagaacccaatcacttttttttttttttttgagatggagtctcattctgtcgcccaggctgcagtgcagtggcgtgatcttggctcactgcaacctctgcctcccgggttcaagtgattcttctgcctcagcctcccaagtagctgggatcacaggcatccaccaccatgcccagctaatttttgtattcttagtagagacagggtttcactgtgttggccaggctggtctcgaactcctgacctcaggcgatcctcccgcctcagcctcccaaagtactgggattacaggtacgagccaccacgtccagccgagaacccaatcacttttgactctgccttcaatatatattgcaaatctaactaccttttactacctctacttcttcccttctagttcatgatgccattatcacttgcccagattattacagtagtctcataattgctctccctgcctctggttttgcctctcccctccagcagtgataggaaataatggaagtttttaagtaagcatggtagtatcactggatctgttctttgacacagctggctagtagtgtttggtagattggaataggggcatagtaaatgtgggttgacatggtatagtaggtagtcaagacagtccaacaatcaatcttaaagacatttcattttcttggtagttaaagaatataggcctaccagtacttgtaattttaattttaattgatttatatcattttacttattaatattcatttgaatcttagtttataatatctataatcatatgctatgctcaaatgtaattgagttactttttagagacaaggtctcgctatgttgcaggtttcaccatgttgtccagggtggtcttgaactcctgcgttcaagcaatcctcctgcttcagcctcccaagtagttggatctacagggatggcatgcaccatcatacccagctctgaactattttttaagtaaaattttttttagatgaagacaagcttgtatacaagagtagttaagacagtgtggtactgactcaaggatgtactaatagacaaaggatagaaaacagacccacacacatacagtcatacagttacagcaaagatgccactgggatatagaggagaaaggatagtattgggatcagtggatattcatatggaaaaaattaactcctaccttataccacacaccaaaattaattctatatgattgtacataaatgtaaaatagaacaataacacctctagaagaaatcgtatgaaaatatcatggtcttggttaggcaaagctttcttacaaagaatttaaaaatgttaacaataaagaaaatatagtctggtccaaatgcagtggtatttacaactaattgatcacagccagttacagatttctttgttccttctccacttccactgctttacttgactagccttaggaaaaaacaatttttcaggaaaaataagttggatgtgtcaaaattgaggacctttccccagaagacattgtgaaagtgaaaaggcaaaatataaagtgggcttaagaattatgagaagttcagcacagaggactagtggaagaaaatatgtttgtacataatttctttccctataaccaatactaagaatagagaaccctatatttaactgaaggcagaaaatattttgaggccatatttgttctcattttatgccatttacttagtaaatgtacataccttatagattcatgcatataatatacagtcctcccttggtatcttcaggggattggtttcaggacccctctcacacatacacaggataccagtattcaagtcccttgcataaaatggtgaagtatttgcatataacctatgcatatactcccatgtactttaaatattaatctctagattctttataatacctgatacaatgtaaatgccatgtaaatagttgctataccatggttttttgtattgtttttattattattattattttttattgttggatttttttcatattttcagttcatagttggttgaatgtggatgcagatacagtgggccaactgtatacatattttgggatcattttagtgggtagtaaaacttggttttccccaactgtttctgttaattcacagccagttatgaaatatgccacatttgtcctgattaaatagtgaaatgtcttagccctttccactgattatattgatagaaaagattaaaaagtggtggataaacctaaccaaaaaaaaaatgttttcataagccactgctgtcagcacttatttgagattttaaaacattttgtagttctttatttttaaatgaccttacattttcaaaagggtttgttaattcaaaaggtctcctatggttaaggcagttcaaatagtagactgagggtagaagagggattgactgtaaataggcatggaggtatcttttgggggtgatgtaaatgttctaaaactggattgtggtgatgtttgcacaaaatttgcacaaaagcattgaattatacactgaaagcatattttatagtgtgtaaatgaatgccttaataaagcttttttttttttttaaggataccattaagataatgaattgtccagccacagattaggagaaaacatttacaattcatgtatctgacaaatgattgtatccagaaatcaataataagacaaatcaatagacaaatagcataatttttaaaaattgggcaaaagacttggacacttcatagagggaaataatctaatggccaaataagcacactaaaagaggatgaacattattaatcattaggaaacacaaattaacatcacagtgagatactgacccatcactcatccacttgaatggttaaaatcaaaaggactactaattgttgacaaggatgcagaacaactggaactctcattctttgctggtgagaccatgcagtgggaccacacatttgaaaaactgtatggtagttttttattttttttttcctggtaaaaattaaccgtacatctaccctatgatccagcaagtcatttacctgagaagaacaaaaacatatatccacaaaaagagttgtgcaagaagattcatagcagcaaacaggcatgttcattaacaagacaatttttcagcacattgtgtttttttttttttttttttttttttttttgagacagagtctcactctgtcaccaggctggagtgcagtggtgcaatctctgctcactgcaacctccacctcccaggttcaagcgattctcctgcctcagcctcccaagtagctgggactagaggcacgcaccacgacacccagctaatttttgtatttgtagtagagatggggtttcaccatgttggccaggatggtctcgatctcttgacctcatgatctgccctcctcggcctcccaaagtgctgggattacaggcatgagccaccgcgcctggcctatgtattcatttaacagtacactactgggcaataaaaataaatgaactactactacccccaactacatggataaatctcaggaacattatgttgaacaagaagagtcagatgcaaaacagtatttgtgttctacattataccattcaaacaaacaaaaacagtctataatagaaatcagaaagtagtttcctttttgttagggggtatagggattgactggtaagagacagtagaaaactttctgggattatagaaatgttctatgtcttgttttggataaccatttaagatccgtacatcgtattttatgtgatcatacctcagtaataagaatgcaaaatgctacaaaagcaagtcaacccaacatctctactaataaatctcaccattttaaaaagaacagtaaatcctacatctctattttgagaaaaaataattataattttatttaatgctatttaacatatgcttatatatgacatataaattgtgaaaagattatttaaacaaattggctaaagaaacttcatgaagaaggtgaatcttttgccttattgcatatgcttttatattgagtaaaaccaaagtgatttcccatggtagcttcttatactctgttctcatactctttcttgtgataaaatggaaactgatgttcttcccatgaaagggtaattatacattaatgtactctttttccctcctgtcctttttttattatgaaatatttcatatatmaaagaatatgtctaacatatgtgtattacaaagtatatcctctgcctccctcctcatttgaagatcctgccaatcctctgcagagctaatgcttattctgactttggggttttcatttcctttcatatatcccttatatatgtagtcctagtaggtgtatacatatgtatatcatgaatagttatatatataataattgcaaatayatcctgtttatttaatgggttatgtttctttaagttccaatacaatattttctaaattagaaaggtattacaattttaaaaaatgtgccaggacaaaattaataccaaattacaagaatggtaaagcttagaacattgtcattgactataaataatagctgcaattctattgttggtttcttttttcactagtccattttgataatatttcttgttgtggccaggcacaatggctcatgcctgaaatcctagcactttgggaggccacggcagatggatcgcttgagctcaggagtttgagaccagcctggacaacatggcaagaccttgtctctatttaaaaaaaaaaaaaaaattgttgtagtgaagcagtgttttctttcccacagaatatcgttcttcatttatttataaaaatatgatttggtatatatgcaaatgtagcttattttatatataaccatactgtaatagtctttgtggtaagcaattcagttaatatgactacaggtttaagatataatgtgaaatttggaatagattttaacttttaaaaaataatttatgttaggctgggcacggtggctcacgcctgtaatcccatcactttgggaggccaaggcaggaagatcacttgagcccaggagttcaagaccagcctgggcaacatagggagaccccgtctctacaaaaaaaagaaaattagccctgcatggcccatgcctgtagtctcagatctccagaggttgaggctgcagtgagccatcaccatgccactgtgctcccacttgagcaacagagcaagaccttgtctcaataataataacaataataatataacttatgttaagggctggtctttctttttctatatttaactgattaaactgattaactgtttgttgtttttttttatgtcataggtgtcagatccagctagcagtgccataagccagaattatagatggaagtgggggagagagagaattgtcagaaaaacttactaagatttctatcctggccaggtatagtggcttatgcctataattccagcattttggaaggccaaggtggaaggatccctggaacccaggagttcgaagctgcagtgatctatgatcatcccattgcactctagcctgggatacagagcaagaccttgtctcgaaaaaaaaaaaaaaaatctaagtggcttcatacagaaagtttaaagttaaatgtatactgttatgaatatcttattaaaatgcaagacaatcagagactgatctaaaagtaatcaaggatgatcatgtcttgggagtatcctgtttctcagttgctctggacagaaagcacctagaaggttgagataattcartgcaaaatcagagatttccccccatgtaatcaacctcagaacttgagttggtcctaacagtagactcaaccccttggaaaagactaggcagagcaattttcctattgactacatctgagacgccattcattcttgtgtcacatgagacatagcatatactttttaggtctctaataatagcagttctctaagaagcaaactgggatgaaagacactattcacttattttcttaaatggggaaggcattaaaaggagtgaaggtttattaatgccacttttaaagatataaatagtagatttttattctaataagtcatacatcaataaaatttgttattgcagctccggggcagcaattacttatatattgacaacttatacatgttttacatgcccatttgctctccttttcactactgaaatgtagttaccatagcaatgaacacatcacatggttcctgtgctagttctaaaatagagaacagcaatatgccatatgagctctgcttattttctacgtaaggactgcatatacaacttgaggctattccataaccttctcagtgcagatagcttatcattgatttagaaagctttcaaagtaaaaagcaattggcagtaatatatttcaagtctctagcttctcttgtactgttatttgccactgagctaaaagaacagtttcactagctttgaccaccagggactctgctgttgtatatttagccatagattgtctatggaatagcagtgccacttagaagattggtgggagaggcatatatagcattcatggacacattttctaagtcttactgagcaattcttaaccaatcttagcttttctcctactgtctcccttaatgtttcaagtttttaaaaatataggactctgttttagaatttgaggaaaggaagatgccaggcacaactggaggcatgctattagttccttttatgtccattattgttgtgtaaggttttaaaatgcattggttatatagcagtttatctatagaaaaggacttcagatttcagtgcctggtggtatcaggccgtatttatgccttactatcacatttagagtgtgttgtaggctgtcagacctccagaaataaagtaggaacatacccctcttactgtgactcttaccagatacttatttgaaacagtccaagcactggcatattagggaatggtgctaactctttctaaccattaataagcaaaataaatttcaatgtgagcttttggctatactatacctatggtcaagtggcactacaaattcaaaattttaaatattctttattgaaactactaggaacaactgttttatatatagtagaggaaaccagggctttattctcttgactgaaacgtgtaagaagtgattcataggtcttcaaacacaaattagtaaatttaggaagctaaaaaggcatatatatttgactactgatgggggcaatatgttgattgtgtaatatttttatctaccctttcatctcagttataatttaaaaaccatttatatactacataaactatgtaatattggatacttctgtgtctatataatttgcaacaaagtagaataaatggccagagatgttattgtaatcttatggttgaatgttatttcttttttctaggtcattgtttaaaatctggacatcatagaaayagataatgcagagagaaaattctttcataattccaccacatctcaatctttgttattagttttaaaatatgtccttctagacatattttattgtaaaaagtatttaaaatactcattttattttattgccgcaagagagagaagggcatttattgtagggcaccaagcaaggaagatgggcagctcatgcttaagacccaacctccctgctggcttacaagcatgggtttttaaaggcaggggtacatttcaggaaagtagaagttacaggcaaaattgttaatcaatacatagaggttatacatgggttggctcaaaaaggagtaaggttttgagtgggggcttacaggtcatcaatggattaggagattctttgatttgcagttggttaaggaagaaaggctttgtctaaaaacttggggtcagcagaaaggagtgttgaggtttggccttaacataggttagttaggataaggaaacctgttaatcattatggggtgctatgtcagggtcaaggtatgagagcaagccacgatgcactgggtcagagtgaccagtttaggaaattgatagcccacaggtgtgactctctccaggcccctcaggaagcaatttagaacaaagagcagcagtcagagttcagtcttcagtttccctttatcaaaggtctatgtgacagcagttgacattttcttttttctgttttcttaaatttatttattaaaagaagtgtctcattctgttgcccaggctggagtgcagtggcacgttcatagctcactgcagtctcgaactcctggcctcaggcaatcctcctgcctcaacctcctgagtagctaggactacaggcacatgccactgtgcccagctcatcattttctatctggtgggtatgctggcatgttggaggaaggacctggcgagaggtgcttggatcatgggggcagttttccccatgctgttctcatgacaggagtaaattctctcaagatctgatagtttaaaagtgtgtggcagtttcctgctcgtgctctctgtctctcctaccactgtgtaagatgcaccttgcttctccttcaccttcagccatgattataagtttcctgaggcctccccagtcatgtggaactatgagtcaactaaacctcttttctttttaagttacccagtctccggtagttatttatggcagtgtgaaaacaggctaatacacttggtttctgaaaagtaatttggctggctttgaagtggggatgggccatgagccaaaggatgcaggcacttctggaagctagaaaggcaagaaaagattatcccttggagcttcaaaagaaatcaaccctgcatgcaccttgattttaccctagtgaggccgggctggacttctgatgcttcagagacaagggttcctccctcatctgtctcaggaagacttaggactaactttaggctttgaagtaaacagaagctgaaacatttgaatgtttgattttcatgatccagaactcaagcctcataggtcccatgcattccctgaacccaataggatgtcacagtctgcataccttcacaccatggcagtctggcttcttccctctcaggcctgcagcctcatgctctgggcttccctggaagctggtgttgtgggggcctgcagttgccaccctgctgtgtgtcagcactgctccctgacgctgttcatccactgacctccattccttggcccagctgcccaggcatggcagactacacgcaacctgggttgtggggaccaggcggagccagcagcactaggacctgatggccaaaacactcattttaatgaaatcatactttaattctgttttgtatcttctcacataaaatagctagatctcttttcctagtagtacaaacttatctatctgccttattttgtataagagtggtattatatgaatacatcattgtttattcttctattgaaagcttttatgttgttttctgggtttttgttattatagttctgtagtaatatgtcttatgtacttttgtgtaaatagttctataggctcaatctccagaattgaactgccaattcttagtaaaggaaaatttaacttttgatacattttaccaaactgccccttcaggggattctaccaaatcatattctctgtttaaatgtctttttaagctttgccaaactgatatatttaaaatggtattttattgtttcaatttgcagttttagaggtaatgttgtaattctatatcttttcatattatagtscatttatattttcctcttctcttaactccttgtttgcctagctttctttttcttttggttggttcaatttttccaactaagttttttcatgttgtttktttttttctttttcctttgtatttgggaaataaatccttacttgtaaatacttcttgcagtttgtccattgactttttttttgagacaggatcttgctttgtcgtgcaggctggagtgcaatggcatgatcacagctcactgtagcctcaaccttgcagccctctggccacaggctcctgagtagctgggactacaagtgcgcaccaccatgcccagataatttttttaaaaaatttttttgtagaaaaaggacctatgttgcccagactagtctcaatctcctgagctcaagtgatcctccctccttggcctcccaaagttctgggattgcaggcatgagccaccatacccagcctgtctgttgattttattttcggtgctttttttgtatatggaactttttctattagtatttagtcatatttgttagtcttgtcctttatcccttctagcctttaccttatttagtaatatcagatgatgtgtttcatatgggtctaatttatgcattcattcacttacagaagctaatcatttgagtcctagtgtaccaagtatcttagatgatgggtcattgctgactgtacaatctaagaagaatcttatttgcaacaatgatgctttagcgtagcagcagaccaaattctctaggatgattagcagctaattctgaatattgctgtaaagtcatagtagcatgtaacatgtacagcaatagtaaaaacatgtaacagtttgttccttcctaaaattttgttaatttagtcttttatgtgtccttatatttataaatattagttttgtggctaaaatgtgtacatttttccaagttatagyattgagaagcatagctagtagcatttcacccaacagaaaaaattcctttagataaaagccaaatcacagttggcctcattctacatactgttctacaaattacaaaatcagtaaatgtttattgggtacctgtttttattgctaagctcttgcaagagaaagagagaggtggtaggatttttttaaggtgcgagctattatcctatttttaaagagctcataatctagtttggaatgtttggcataagtacatccaaaggtaaataataaaacaaatgataattgctcaacaatatgtaaagacccccctctccaaaccaaaacaaaacagaacaacaaaattgtcagtctcttctgtgagcagtattatctgctgaggacatgttactggtcgaagagctttggctgcagtcattcctagaatgcaaaatgaaatcatccaaaaaactgagagtggccagttttactagtcaaatggagtaagtggtcatctgtgagtttgtgaatctgtctgccagaatatatttattttcttgcttattccaccagttactccttcttgttaaagctttcaccgttattaaagagaagtacctcctggaaattttagcctgctagatgttgtcaaacctgatagcacagtgtgataggctaagattctttgttcatttgttttggatagggaaggaaagacacaatgaaaagactaggagtctgaggtgagggaagatgatgaagaatatgaatcaagggatcaggcatcaagataaccgttcatttatttaaatgtagactttatctgtcttgatcaggcatcaatataacctacatttatttaaaagtaaactttatttgtctaatgtatgtgttcctaatccctgaatctattcatttcattgaaattgatgagtactttcaatacaaatagttacaatattttaagatgttcactgtttataacatcattatatgagtccatgttaaaccagagaagcagaaccagtagacaatatagatttagagatttgttacaaggaattggatgatggaagtatggaggctggctaagcgagtccaaagcccagtcaagaggaaagcaggctagaaacccatgggcataagctgtttagagtccctcagctcagggaaagcctaagctctctttcaaagggctcacctaactttgccttgtaattttctataatggattcctagagtttaccaactaatatgacggtctagagttacatttaagtgaaatttgattgtgagattgtattcttaactgtctatatctggtgctcttgagcacgtatacaaccttctcgccttctctaggtccctaaaagtcatttcttaattcaaaaaatatttaaatgcctgctatgtaccaagcacttctcttgatagagtggtgagcatgacaatctagtagaaaagtgagacagggaaacaccaacattactgtggaaaacatagttacaggggaagtagaaggacattagtcatgtttttttcttcatgacccactgcctaacacatagtagatgcttaataaatgccttttaaataaataagaccacatggcatttttaaaggagtaaggacctctttaaaaataagtatatatggggaaggaaagagatgatgagaagactaggagtctgagtcttgctacagaactagggtaactggagctagtagaaaagcaaagaagcttctgatttggggatggattcaagagtatattgggatgggtgcaaacactttcactgattagcagtttacatatttccttcaaggatagtcttactctccttgtcctaacttttaacctttgcttcaaattagtttagcagtttgtactaagaggaattgccagtgaccaagtgaatatgatatacatataaaagaacagagaaaatcaagtctttactatgttgctgtatcactaattcaggcttccagctaaatgccagaacataaattaggtcccttatcaaatctggcacaaaaatatttaggatcctttttaatatagtacatgtgctttcaataaatgcctgctttggcaaaaaataaaaccagtgttttttgtgtcaagtacaagctgttgtactctgtaacttttaaactgtccttgtgaaccaggttgagggtaaaattaaatttggattttgtattcagttttacaatcaacaaataccattttttttctttgtgttgtgttgtcttatgggtgtttgttttattttggtttggttttggtttggttttcacttagaacaaaattcaaaatctactaaatactccctagccacactggcctgttttcagtttgagatttttttatttttaattttttttaaagatgacatcccactgtgttgtccaggctggagtgcggtggctattctcaggcatgatyatagcacaactacatccttgaattcctgggctaaagaggtcctcctgcctcagccactcaagtagctgggactataggcttgcacctccacacctgacttctttctgtttttaagacagttgagctctttcacctgtcccctcaaactgtttgtacatgctcttccctctgccttgacctatttttacatcatgttcagtgttactcacccatcttactctcactaatttattaagtctcaaatattttctcagagattctttmttcacccatgcctccatatctcagttagatctcccttaaaaatctcttctgtgttactagttcctagcatatagtggatgtgtgataagtgaaaggatggactgaaacatagagcacatacaataggtatattctagtcattataaaatgtcctcaaggaactttcttaaatctgagttccaaagggccatgttattttgtaaataatattcttacttttactttagggaacaaaatcagcatttttaaatgaaatagatttaaaaatataggcatgtacattgtataaatgcatgtatacatatgtctaaatatggcaagttgcaaagtaacatgaataccatgattgctgtcataaaccttgaaagccactgtgttagtggatactgttgtataataatctccaaataagcacgtctagaaaacaacctgttttacttatcaatttccccaaacatctctctggtgactgcgtctttggcttcttttttatttatttatttattttttattattatactttaagttttagggtacatgtgcacaatgtgcaggttagttacctatgtatacatgtgccatgctggtgcgctgcacccactaactcgtcatctagcattaggtatatctcccaatgctatccctcccccctcccccaaccccacaacagtccccagagtgtgatgttccccttcctgtgtccatgtgttctcattgttcaattcccacctatgagtgagaatatgcggtgtttggttttttgttcttgggatagtttactgagaatgatgcgtctttggcttctaagagttctttgctgagagtaaagagccagaatctcagaaatcccccagaaagacgatttaagttaaatgcacccatcaagctttgaaggaaggcggcttaaaaaaagaaaaacactatattacattctacttttaattttcaaaacctgaaaaccttctcaaatccaggaaaactaatggtatttccatctattctctttgatagcccacaattcctatgattttcttagcatcccataatacattttgcttttatccttttactgtttttcttcctagaattttctttcaaggtccaacacagaaatcctttttctcaacaaacctttcctgactaaccctgtttccttttttaaaattctttgcattttctcaacagtttttgatatttattttttaacgtttgtatacaatactataatacagtcagttatttataactttattttgtgttagaagtaggttttttgtgtgtttgcattcttcctaattttacatgtgcaaaaagttactttaatcttatttttcttaaatgaaataatccaattttaaatccctttcctggagaattaaatataagtcattttgggggtgctttccttcacctcccccagaatctcacacaaaataaaacattcagagaattaatcgcccctgccccaccccaccctaatcttctgtccatgttggctgtcctgagttgtccactgttaaaccacataatcccttatagttcagtggctctgttgcttcttaggacatgaacatcttggccaaggcttcaatagctttctgtgttggatattttctcctggcatctccagatagactttttactcttttctttccctattctgtgcccaaaggccctgagaaaattgctaagtattagtaacatggagaaaaaagggatatagtttctgggactgtaaattattcaaaggatagttttaaagctctgggaaagtttggtgaaagttaaaaacgtgttcagagaggaggagttggagcctagtcaagtcacaaatcttctaattcagccaagctctagtagcactcctgaaacattactactatatccttaacatgtgcttttttagttcatgaaacaatattggcataactgttcccctaacaacttaatgagaaagttaaagattttaacaactcaagattgctgcctatgatacttatgatttttaaacaagttgtcatatcaataataataataaaaaaaccataaacctagctgggcatggtggctgacgcctgtaatcccagcactttgggaggctgaggcgggcagatcacctgaggttgggagttcgacaccatcctgaccaacatggagaaactccatctctactaaaaatacaaaattagctgggcatggtggcgcatgcctgtaatcccagctactggggaggctgaggcaggagaatcgcttgaacccaggaggcagaggttgcagtgagccgagatcatgccattgcactccagcctgggcaacaagagcgaaactccgtctcaaaaaaaaaaaaaaaaaaaaaaaccatgaaccttcctttaggaaatagagcaatgtagtataaccccacttgcaattttatttttcagattaatgaatatgattaaaattaagatggaataaaaattaaaacaattaaataaaatacaaattggttgtataataaagacaaaattgttatcttgagacacatgttgcatctttccatatgttctaaaattccttaggaacttggcacaagtgctgctgaaataatttctgactgataagtggcagatgccttatcttttattgtggtattaattctaaatcccatcaaataagacaatgcatgatacaaaggataaatttataagcatttgcctcccaatttagacacagaatcattatcatagtacattcactttcaacttgtttctatgttctttctctccttcacatctggcctcttcatgtttttattttctctctctctcttttttttttttttttttttttgtggagacagtctcactctgtcacccaggctagagtgcagtggcacgatcacagctcactgcagcctccaactcctgggctcaagtaatcctcccacctcagcctcctgagtagctgggaccacagacatgcaccaccacacccggctatgtttttgatgtcttgtagagacagggtctcactatgtgagaggctggtcttgcactcatgggctcaggcagtccttcctcagtctcccaacgtgctgggattacatgcgtgagccaccatacctgggcctgttttctctttcttttcattctaaccataatcacttatctatttatggtttttgtttctatttctgaatacatttaaatgccagttataaaatcagaaattcttatttgtgcttaaacatagtaagatttagcagtagtttgaacttcaacatgattattaaatgtggattttaatactagtgatgattcacattttccaacttttatactttacaatttgtttttcttgatgagagtttaggtatctatgaatgaggagaaaagttaattgaattttggcttctagaaacaagtaattaatcttttcctgttaccttttaaaaagatactttactttttatagaaagatagcagtagaaaagaacaggtatttaaatctactcactgacttagaccaattatttcataatggaatctctacttctgtgaatatgtgttttgcttaacgagacctcctaaaaactcatttttatggtcattgaattttagagttagaaaagactttagaaagtgttattagcctctcattttttaaaaacagtttgtatcttgcccaaagtcacactaggggtaaagtaagaggcaaaggaagaactggaattcaagtttctagattccaagtccaggactctttctttttatctcattattttatgaaacatggagagcaagctgattgttcatttaagttcattacactgtatcttggaatttgtcatttctatgcttcactatttaaattaaaatattttatgtttatcacctgttttttgatctgccatgtaagaattttcacttattgtcttccctttaacattgagtctgcatactgctgctaaataatctttctacagtatagtcctaattatgtccctcaaaaaccataatatatctcaccccttctatcagccacatagttaaataaattaaatccaatcatttaacccattgcagactaaatctgcctttcaaatcttagtactttccactcctctgctcatattttatgggccaggcaaatggactacttacttgctattctcaggacacacgtctcatttttcataccactctatcctttcttatacatataacaactttgcctaaaattgtgcccatttgttgagactttgatcaaatttcacatttcccatttcttttgttctctctctctctgttttttttgttttttttgtttttttttttttttttgagatggagtctcgctctgtcgcccaggctggagtgcagtggcgcgatctcagctcactgcaacctccgcctcccagattcacgccattctcctgcctcagcctcctgagtagttaggactacaggcgcctgccaccacgcccagctaatttttttgtatttttagtagaggcagagtttcaccgagttagccaggatggtctcaatctcctgacctcgtaatccgcccgcctcagcttcccaaagtgctgggattacaggcctgagccaccgcgccaggccctattctctctctttttaattccaattacagtgtagtacaagcttgtccaaactatgacccatgggccacatgcagccctggatggctttgaatgcagcctaacacaaattcataaactttgttaaaagattatgaggtgggtgttgctgggtgtgtgtgtgtgtttagctcatcagctgttgttagtgtttgtacattttatgtgtggcccaagacaattctttttcttttaattgtgaccaaaggaagccaaaagattggacatcctttatgtattatattctgactttaaatattgctttccccttaatttttttttcattgtcatctcctcactttattgcaagtacagtcagcatcaatgttgagaactttttctcctaggaggtacaggatttggctctgatacggtgttgcctccacagttgctcagaatctaggctccatctgttacaggaaaggggtcctaatccagaacccaagagaaagttcttggatcttgcacaagaaagaattcagggcaagtccacagtgcaaagcaaaagcaagtttattaagaaagtaagagaataaaagaatggctactccatagacagagcagccctgaggactgctggttgcccatttctatggttatttcttttttttttttttacatgttctattttttaataaaaatatttatttggtcttatgaatacagaattattttatttttatttcaaatgcctaggtattataattctgtataatagttatttgtactttttatatttttatcttttttttattatactttaagttttagggtacatgtgcacaacgtgcaggttagttacatatgtatacgtgtgccatgttggtgtgctgcacccagtgactcgtcatttaacattaggtatatctccaaatgctatccctcccccctcccccaaccccacaacaggccccggtgtgtgatgttccccttcctgtgtccatgtgttctcattgttcaattcccacctatgagtgagaacatgcattgtttggctttttgtccttgcagtagtttgctgagaatgatggtctccagcttcatccatgtccctacaaaagacatgaactcatcattttttatggctgcatagtattccatggtgtacatgtgccacgttttcttaatccagtctatcattgttggacatttgggttggttccaagtctttgctattgtgaatagtgccgcaataaacatacgtgtgcatgtgtctttatggcagcatgatttataatcccttgggtatatacccagtagtgggattgctgggtcaaatggtatttctagttctagatccctgaggaatcgccacactgacttccacaatggttgaactagtttacagtcccaccaacagtgtgaaagtgtttctatttctccacatcctctccagcacctgctgtttcctgactttttaatgatcgccattctaactggtgtgagatggtatctcattgtggttttgatttgcatttctctgatggccaatgatgatgagcattttttcatgtgtcttttggctgcaaaaatgtcttcttttgagaagtgtctgttcatatccttcgcccactttttgatgaggctgtttttttcttgtgaatttgttggagttcattgtagattctggatattagccctttgtcagatgagcagattgcaaaaattttctcctattctgtaggttgcctgttcactctgatggtagtttcttttgctgtgcagaagctctttagcttaatcagatcccatttgtcaattttgacttttgttgccattgcttttggtgtcttagatttgaagtccttgcccatgcctatgtcctgaatggtattgcctaggttttcttctagggtttttatggttttaggtctaacatttaagtctttaatccatcttgaattaatttttgtataaggtgtaaggaagggatccagtttcagctttctacttatggctagccagttttcccagcaccatttattaaatagggaatcctttccccattgcttgtttttgtcaggtttgtcaaagatcagatagttgtagatatgcggcgttatttctgagggctctgttctgttccattgatctatatctctgttttggtaccagtaccatgctgttttggttactatagccttgtagtatagtttgaagtcaggtagcgtgatgcctccagctttgttcttttggcttaggattgacttggcgatgcgggctcttttttgattccatatgaactttaaagtagttttttccaattctgtgaagaaagtcattggcagtttgatggggatggcattgaatctataaattaccttgggcaatatggccattttcacaatattgattcttcctacccatgagcatggaatgttcttccatttgtttgtatcctcttttatttcattgagcagtggtttgtagttctccttgaagaggtccctccttgaagaggtccttcacatcccttgtaagttggattcctaggtattttattctctttgaagcaattgtgaatgggatttcactcatgatttggctctgtttgtctgttattggtgtataagaatgcttgtgatttttgcatattgattttgtatcctgagactttgctgaagttgcttatcagcttaaggagattttgggctgagacgatggggttttctagatatacaatcatgtcatctcaaacagggacaatttgacttcctcttttcctaattgaataccctttatttccttctcctgcctgattgccctggccagaacttccaacactatgttgaataggagtggtgagagagggcatccctgtcttgtgcccattttcaaagggaatgcttccagtttttgcccattcagtatgatactggctatgggtttgtcatagatagctgttattattttgagatacgtcccatcaatacctaatttattgagagtttttagcatgaagagttgttgaattttatcaaaggccttttctgcatctattgagataatcatgtggtttttgtctttggttctgtttatatgctggattacatttattgatttgcgtatattgaaccagctttgcatcccagggatgaagcccacttgatcatggtggataagctttttgatgtgctgctggattcggtttgccagtattttattgaggatttttgcattgatgttcatcaaggatattggtctaaaattctctttttttgttgtgtctctgccaggctttggtatcaggatgatgctggcctcataaaatgagttagggaggattccctctttttctattgattggaatagtttcagaaggaatggtaccagctcctccttgtacctctggtagaattcagctgtgaatccatctggtcctggactctttttggttggtaagctattgattattgccacaatttcagagcctgttattcgtctattcagagagtcaacttcttcctggtttagtcttgggagggtgtatgtgtcgagggatttattcatttcttctagattttctagtttatttgcgtagaggtgtttatagtattctctgatggtagtttgtatttctgtgggatcggtggtgatatccccttattttttattgcgtctatttgattcttctctctttttttctttattagtcttgctagcggtctatcaattttgttgatcctttcaaaaaagcagctcctggattcattaattttttgaagggttttttgtgtctctatttccttcagttctgctctgattttagttatttcttgccttctgctagcttttgaatgtgtttgctcttgcttttctagttcttttaattgtgatgttagttttgagcctatgtgtgtctctgcacgtgagatgggtttcctgaatacagcacactgatgggtcttgactctttatccagtttgccagtcggtgtcttttaattggagcatttagcccatttacatttaaggttaatattgttatgtgtgaatttgatcctgtcattatgatgttagctggttattttgctcgttagttgatgcagtttcttcctagcctcgatggtctttacaatttggcatgattttgcagtggctggtaccggttgttcctttccatgtttagtgcttccttcaggagctcttttagggcaggcctgatggtgacaaaatctctcagcatttgcttgtctgtaaagtattttatttctccttcacttatgaagcttagtttggctggatatgaaattctgtgttgaaaattcttttctttaagaatgttgaatattggcccccactctcttctggcttttagagtttttgccgagagatctgctgttagtctgatgggcttccctttgtgggtaacccgacctttctctctggctgcccttaacattttttccttcatttcaactttggtgaatctgacagttatgtgtcttggagttgctcttctcgaggagtatctttgtggcattctctgtgtttgctgaatctgaatgttggctgccttgctagattggggaagttctcctggataatatcctgcagagtgttttccaacttggttccattctccccgtcactttcaggtacacaaatcagacgtagatttggtcttttcacttagtcccatatttcttggaggctttgtttgtttctttttattcttttttctctaaacttcccttctcgcttcatttcattcatttcatcttccatcactgataccctttcttccagttgatcgaatcggctcctgaggcttctgcattcttcacgtagttctcgagccttggctttcagctccatcagctcctttaagcacttctctatattggttattctagttatatattcatctaaatttttttcaaagttttcaacttctttgcctttggtttgaatttcctcctgtagctcggagtagtttgatcatctgaagccttcttctctcaactcgtcaaagtcattctccatccagctttgttccgttgctgctgaggagctgcgttcctttggaggaggagaggcgctctgctttttagagtttccagtttttctgctctgttttttccccatctttgtggttttatctacttttggtctttgatgatggtgatgtacagaygggtttttggtgtggatgtcctttctgtttgttagttttccttctaacagacaggaccctcagctgcaggtctgttggagtttgctagaggtccactccagaccctgtttgcctgggtatcagcagcggtggctgcagaacagcagattttcgtgaaccacaaatgctgctgtctgattgttcctctggaatttttgtctcagaggagtgcccggccgtgtgaggtgtcagtctgcccctactgggggatgcctcccagttaggctgctcaggggtcagcggtcagggacccacttgaggaggcagtctgcccgttctcagatctccatctgcgtgctgggagaaccactgctctcttcaaagctgtcagatagggacatttaagtctgcagaggttactgctgtctttttgtttgtctgtgccctgcccccagaggtggagcctacagaggcaggcaggcctccttgagctgtggtgagctccacccagttggagcttcctggctgctttgtttacccaagcaagcctcggcaatggcgggcgcccctcccccagcctcgctgctgccttgcagtttgatctcagactgctgtgctagcaatcagcgagactccatgggcgtaggaccctccgagccaggtgcgggatataatctcctggtgcgccattttttaagccygttggaaaagcgcagtattgaggtgggaatgacccgatcttccaggtgccgtctgtcacccctttctttgactaggaaagggaactccctgaccccttgygcttcccgagtgaggcaatgcctcgccctgctttggctcacgcacagtgcgctgcacccactgtcctgcgcccactgtctggcactccctagtgagatgaacccggtaccccaaatggaaatgcagaaatcacacgttttctgcgtcgctcacactgggagctgtagactggagctgttcccatttggccatcttggctccgctactttctttctttttttttttttttttttgagaaagattctcactcagccaccaggctggagtacagtggtgcgatctcagctcaccgcaacctccatccacctccgacattgaagcgattctcctgcctcagcctcccaagtagctgggactacaggcgcatgccaccacgccctgttaatttttgtatttttagtagagacggggtttcaccttgttggccaggatggtctcgctctcttgacctcgtgatctgcctgcctcagcctcccaaagtgctgggattacaggcatgagccactgtgcctggccattcttgctactttcatagcaaaacatttggctttggctttgctattctgctttattgtactctttgatatccagtatctaccagtaatgtctggactgcatacatcgttgaaaatacaactgtaattaaagatttaaatgcaatattctttcaggaaaatctctttccctgattttgtttgatattggaaatgaaacaataccataatccttcaggataacttcccacagcaggacaactgcaggaatggcacaaaatatgaattgcataaatactcttatagaacacatcagactagcactttcccaagtttttagtcagatctttgctaccatccctgaaactgttaatgcatatgagtagaaaaattttttacctttgtaagcaaagattctactactagaataatcaaattaactcattctaatgcacatttacttaattcatactatgtgtgaggcagttttaggatgtgatagaaaactttgttttgaagaagctgataaactaggtgggggggaaacagagtacaaataaattataatgcaacataagaaatagcataatagaagaatattcagaccactaaagtcagtcaactctgatccccaaaattaagtatgaaccacaaaaaaatcaagtcagtgtcaatctaatgcagatttatttgagggcttctcttttcttctttgcttaatgtaggtgagtgctttatccttgctatttggtaaatcagcaaggatttattatctattctttgcagagtagtatgttagatgctttgaggatactaaatgaaaaagagtttctgcaccaagaatgtataatctagtagaggagataagctatctatacaaataactgtgtctgcagtctgcacataattgttataaaagaagcctttacaacttgagccaaattcttttacaatgcagaaagccactcctggaggtagagaaaggagagaacatgaacaattcaagaagacttctgttatgcaaaagatggctgaactaaccctggagggatgggtaggattttgacaagagtggttgaaggtattctaattcacttagtacctacatgtgcgaggcagcatgaaggcaaaaaagcctggggcatgttcagagaatagcaagtattctagtttgagtggcacctggtacgtatataagggaatagtaaaagatctggctggaaaggaaaagtaggggcaggttacgaaggacctctgaaagtcagactgtggaactggaacttttatcaggaagcagtagttagttttttcaagcaaaagctaattagagttgatatttaggaggatgaatctaacagttgtgtgcaaggatgccttcaaactgagtgagactagtactggagactggttaagagactacaacaataacctgagtaagaattaatacaggcctgacctagttttgagtgagtaggattggaaacaagagttttaggtattataggatttatgcatataaaatggacttgacagaacttgaagaaagagaaagtgtcaaaaggacacagaaagtgaggcaggatatcttacaatgttaaaggaaaggaataatagaagttaccccccaccccagagaaaaaaaagtaaagagaaaagattggaaagttaaaaactgaacttttagagaaagactgcatttagggaatgtagcaaataagataagcaacagaaaagtgagagaatgggaataaagatatgcaacagaaaagaagggaagagagttcctaggaaagggtggggaaattcaaattctaaaatatcgatgaagtctcatttttcatgtattaaattatccagtggagttggaagatccaaaagagagcaattaaatatgctagagtgcatggggaaaattgacaaaagacctaaaagaaaaatatttaaccacaaaatgaaaagtaataggagatgctaagaaattttggatgggagttaaaattaaatctctgaaagaataaaagggaattaatactcaatttatatcttaaataaatatttytaaatgttacactatgcagaaatccttcttccctggaaaaaatgagatcaagtcctattcaaaaaggtcaagaagaaagactgaggttggtgacccgtgagaaaagtttctgagataagtgtaggtggaatttgtagtattatttatcataagtcagatggctgttaacaaaaagttaattttacatctcatctgttagcccagtcgctttataatgttcggtacaacagaaatgccactactttgtaaccacctaaatgctgtattaccttcaatttccattgtgttgttgatacccaagcagaactcattctttgtcatggagactacagaataccacaagcaggcactaaggttggataatgtgttatctcacattctgaaaggagggtctacatggtagatacatttcttgattctgttttgggataattggctcctaagataattggctatttcattattaaatgcagtatgaactttgcagaagtattcagtatctcttaaaacctgtttcttttccatatagcagtggtacctactttcaatttagtatttattcaccatctactacatgctccacttagtgttttgtattatttctctgtgtgtgtgtgtgtgtgtgtgtgtgtgtgtgtgtgtgtgtgtgtgtagtctaacttgtacatttggccaatttctttttcaagcatgttagatttttctctctgacttctttgtagatgtggggtagttttgttttttacttaagagacctgtattgattatttctatggctgtccttgctaattcccactggccattgtgaaaaatcttgtctatggtgtatttgtttctaagacagccacattacaatacactctgtacataattactatgaatcagctggcaagaaagaagaaaataatactggttattggtaatatttgttgattttatatgttagctttattaaagatttttttttcttatcttttttctttcaactattgctacctctgaagaggcttttggtagtatttagatgggttgtgctatccataggtaaaaattctgacctgggggatattacctttatttttcactagatgtaggaaagtagatgctgctctgtttttactccattttgttacattaaaaaaaaattacaatgtagtcctataagtttctttttttattttatccagtactattttagactgtgaatattactggaatttctagttctattccctcttctccctctaaaaatcaaaagtgccaaagagtagtagaccttttgtgatatgttctagtcaaaatagctaaaaactagcgctctctctttaaagttcatattcatctagaacatctcacaccttactcttaccactttactcacagtagtttaaaaaataaaactgtaccctgtatatttgttcatttttgtgttttatgtagagtttccattttgtttttactttttttcaagagtgaattttgtaaaacttccagagtagagtaagttacggccattagagtagccctggaggatgagacttatagtggcaatgattatcacaccttgacaacttgggaagggccatgggatgtggatgtggaaaatatataaaaggacattggttcacatttgaacaaagtggaaggaattattagaaaagcacttaacaagggtgctgatctctccccatctgaggtcttctttcttcttttcatctaattttaagcactgatcagtgaattctttctcattattttacataagcaggtatctaaacttataaaaaattgattatttatcttgtcttttagtgcctttttattaatataagttatttggtttttaaattgtgttgccaatgaatgaaggaagtcctgtcaaaagatatacattttacttatcttaaggctaacagccaccatgtccagcctagcaaacattttttttaatgaaagtccaagtagtatggtctctgttaagctactctacttcaactctgtctgtggtagcataaaagcaaccatagataatatggaaacaaatagtcatttgctgtattccaataagactttataaaaacaggtggcaggatgaatttgtcctataggctgtaggttgctgatcctagcataatgtattgattatacattatggtagagccctctgttggttggaagagaggaccagggaaaaaaaagtgaagatgtattagctatacagaactttctagttggtaagacaaaaagcaagaaaattacagtaatatagaatatgtaaaataaaggaggattcagaactgagtaggtaattcttcagagcatgtcaaatgtagattatggtaaagtagaatgtttatggtttaatacatcaagaactatatccttcataaaataaaatgtagctggacatggtggctacatcttagccaccatatttttacatgtacatgtttggtacaggcttatggtggcatgtaattccaacattttgggaggccgaggcaggtggatcacctgagatcaggagttcaagaccagcctggccaacatggcaaaaccccatctctactgaaaatacagaaattagccgggtgtggtggcgtgtgtctgtagtcccagcttctagggagactgaggcatgagaatcgcttgaaccggggaggcagaggttgcagtgagctgagatcatgccactgcactccagcctgggcaacagagtgagaccctgtcttaaaaaaaaaaaaaaagtgaagaacaaggtaagacacatttaatatatctgatcaagtggtcttgtccaaaaaatgtcctgatacatttttttaaactaataaatggaggattgcagacttactgaatatggcaggatcctttagcatgtaatactttaaaatggatccacactgaacttctgctggatgtactggagtaagagtggccagatttatcctccctcctcaaacaatgcaaaaaccagacaaggtatataacataagagtttttagacactagacaatactgggcagtgatccctgagagaaaatgaatgaggcatccctacaatttccatagcattctgcctagatagcttccagtctgtagtctgcaggaaggagatccaaaacagaaagaacccagtggcccaactgaatggagacaaagccaaggtggctagaatttgcatgagacagtgcgagagaagacagagctccacagagatagagcacacacactggatatctgcagagggctccccttgatttttaagccaagtactgaaccacataagtatgctaggaaactacttagggacagggataaagccactggaaaggaataagtggaacatttcctgaactcagataagattaataatagtttatagccccaataatcacagtggaaaagcctctaataaattggacatcttttttagtactcaaaagaatattacatcagttggggacaatattagctctagattaagagctgctctcatctcacctagtaaagcttctaaataagcttgtaaagaatcaagttgtttttgagtaaccaactgaatttcagagtaaagttagggccattagagtagccctgaaaatatataatgagaaacaaaatatttgatatggtttggctgtgtccccatccaaatctcaccttgaattcccacgtgttgtgggacccagtgggaggtaattgaatcatgggagcaagtctttcccatcctattctcatggtagtgtataagtctcatgagatctgatggttttaaaaagaggagttcctggccaggcacggtggctcacacctgtaatcccagcattttgggagtccaaggcaggtggatcacttgaggtcaggaattcaaaaccagcttgaccaacatggtgaaaccccatctctattaaaaatacaaaattagccaggcatggtggcacacgcctgtaatcccagctacttgagaggctgaggcaggagaattgcttgaacccagaaggcagaggttacagtgagctgagatcatgccattgcacttcagcctgggcaacaagagcaaaactccatctaaaaaaaaaaaaaaaaggagttaccctgcacaagctctctctctttgcctgctgtcatccatgtaagatgtgacgtgctcctccttgccttctgccatgattgtgaggcttccccagccacatggaactctaagtccaaataaacctctttcttttgtaaactgcccagtcttgggtatgtctttatcagcagcatgaaaatggactaatacaatattctacacctaaaacataaaattcataatgtctgttatccaatcaaaaattacctttcattacctgagaaaggcattgttaaaaaataaataagtaagccaggcacagtgacaaatgcctgtagtttctagctacttgagaggtggaaacaagaagatagcttgagcccaggattttgaggccagcctgtgcaacacagcaagaccctatctcagtcaatcaataataaatmcacacacacacacacacacacacacacacacacgtatatataaccattcatgcgaagaagcaggaaaatacaacccataatgaggagaaatattaatagaaatggatttagaaatgatacagatgttaggattcgttgacaaagatgttaaaacagcatttctaaatatattatgtatttcaagaaggtaaataaaaacataatcctattaaagagtaatgtgggaaatgtaaaaaaagacctaatttctagaaataaaaaataccatgtctgaggtgaaaagttcactgggtaagatgtggcactacagaagaaaagattaaggatcttgaagacatagcaatagcaattgttcaaartgaaacacctagagggaaaaaaagactggaaaaacaagcagtgtcactgtgagctgtgagacaactttagatgatcaaatatataaagactacggatggggcagggagacagaaaaaatatttgaagacataagggctgaaatttttccaaatttgataataactgtaaacccacaaatccaaaaagctcaacaaaccaaaagcagaagaaacactgaaaagctacaccaaggaacataatcaaattgcataagatcagtaataaagaaaaaaaacttaaagtagctaggtttctaaaaacaacaacaacaacaacaaaaatgcattacatacagagaaacaaagataagaatagcagcagtctcctcaacagaaacaatgcaagctagaccttggaacacagaaggaaagagaatattaacccagaattctagacccagtgaaaatacctttcaaaaacaaaagcagaatactttttcagacgtataaaacctgaaagagttcatcagcaggagaccattcagaaagcctcagatctaaatgctgcctgtaacaattacctgctgtatggccttggacatacttgaatctctctgaaccttcaaattttcatctgtaagataaaaataatgctaatttttaggggtttcgtgagaatccaatgatagaaaggaaaagaactgacattcattgaatgtcttctttataccaaccacgtattatctcattaaaaatggaaataacctgcctgggcaacatggcaaaaccctgtctctacaaaaaaatacaaaaattagctgagcatggtggtgcatacctgtagtgccaactgtttgggaggctgaggtgagcctgggaggttgaggctaaagtaagctgtgatcctgccactgtattccatcctgggcaacagagtgagacccaatctcaaaaaaaaaataaaaaataaaaatggaaataaaattcccaataatagggctactatcctaacatttttcttatgctagcctctttcttcttgttctttaatactaaaaacttgggttgttctgaaagaaattagtctaagtagcttgtctgtcttacgttttgatgaagcactttttcctaacttaatttgttctttagttaccagattaaatatgcttaaaagtgggaatgaacaactctccttgctagaatagacaagtcagttaatcactttgtgaaacagttaagtttcttgtaaactgcactttatttttttgcctgtgttttggctgcttaatttttttcagttatgtttattgaggtataatttatatactgtttatctaatttttattataaacctattggatagaggcatgagtgtctttatagctrtgcattgccccatagagtttttggcactcaataaaatgttaaataatatttttattcagcattctgtagacgggaagcatatggtaacaaatgtcagagcacaggttgaaaatctccaaaaagttatatgatatattctttggaaaagctagtagagatacttttgtgaatgaaatttctcttaaaaggggttcccagactcacattttatgcaacaaatttctccagccttcagttactttatttacaaattaaagtttttccttatcagaaataatgcataagttaaaatagtataatactaacgtggtatcataagraagtatataaatggtttgatagataacataaagtaaaggtaactcatagtttgaaggacagcatgagaaaatatttagaagctttagcagtataagtctttatgttgtgatatattgtatgaaaagaaatacacagtggatagttctttattgttaaatttcagcatgacttagttatgtcactgctacagctgttgcagacattctagtggtaggagactttgactcaatattgtttttctcacctgaggattctagcactatttaatactcttattttagtgtcagaaacaatcattgcttcagaataacagaagacattgtgaattaaaacttcaaataaatttcatgcaaaggataatatctcccggttaatctgtgttgaagaaatggttgaccataatcaggtatacaaagccatttagatagcatatatctaaattttctttccagaatttgcttaccctctgatttgctgaccacacttgctttgaagttttggtttttgttgtcttgctatgttgcccaggcatgtctcaaattcctggacacaagcaatcctcccacctcagcctcccaaaatgttgggattacaggcatgagccactgcacctggccactttgaagtttttattaacataatttgaatgtgaaattacctgagtttttcttgttaacctcatgtataaaatgtgggatagggaatccaggcactgcttacttagcttggtgcctctggctctcataagacttttaataaaggtgtcaaccaggtttgtagtcatcttgctgctcagctaggggaggatcttcttccaagcccactcatgtccggtcacagccctcagatcctcactggttattgatcatgcaccactccatagtcctcacaacattgcaacttatttctcctagagcgagggctcagagagagaaggcttgtgatcaagaagatgaacaaaacataccatcacttttgtcatatatttgttaaagcaagtcactaggtctagagcacattcaaggggaggagaatgtacaaggatttgaataccaggttcaaggatcattgaaaaccattttgaagactgcctcctacacatataatccacagatgggacagatcattaaagtactctaggtgctctgacactcatttgtttatcctgagatcttaacaagaacttgaattcaataggcaaaatgatttcagtttcacataaagtatttcatttattcctagcaacaatgcaacgaaataggtatggttaaccccaatgttattgatgaagaaattgatgtactgagtgactggctcaagattacatagcaaataatttgtaaaactgggaccttagtgtaggccttttgattctagaccctgtactctttccattggctataattgcttcctaccagtactatgttgcacttaaagccattcaaggagaatattatacctctaaatttatatacaattatatgaatttttattatacagagatttttatacatatatgtagagaaagacagacacccccctgtcttaatctctaacctataccactccgtttaggagttatagtattattgagtcaaagtctaatatcattataaggcctgtaacagctgtagcaatgacacacatgtacacagatgctagcagcctaaaactacacttaggaggtaaatgtttgttgcatggagagatgaagaagcaaagtaagaaaacagacctggtctggtggctccattcccccttggcttgtcagtatacagaaatcattgtgtttctatataactagtaacaaataattggaattgcagtgagtatgggcaagttatggttttagtttaatattgattatagataattctactttataagtaagaacttgtgttatcagatgaaatatagagaaagttttctcctccatagttgtctttcatatacgcaaacatgcacttgagtttctttcctttcctgcataatctgaggattgtgctttttaatagtggcttgctgatccctttaaatagctcttaatgtaagtattccatagttttcattaatctgattaacatagtttttccctaacctccattcaaaaactatatttggttgttgttttaccctggttgctgaagcagcaagcctactgcaaaacctaagtggtgtggtatagatgagagtctaagactttaattatatgtcattttattcacaacactcaattccaggaaggaaaaaatgggtctgtttttgtaaaggacatattatgtgagtatcattcattgtaaaccaaaaatgatactgtattatagcatagacaacaatgagaactgattctgaaaatgtgacctgactgagaaactgagtaatagtgaaagttatcaaaatggaaaaaaagcgttaatgtgaaatccagccttctcagaaatactctttcctggcctgtttagttttgcttttgttgcttgtcatgcatgaatgaaagtgctgtactctcaggggagcaggaaagcctctgtgtcggttgtttatttccttaatccctcctcctttgtgatttttgatgtcagatctaaaatggaaagcctgtaaatataatgattatcacacggataatcacctgcattaggaaccgccctgcttttctattctaacccgagctgttctccacatgtcacatccactctgtggttggattttaacctgactgcttcattagatttgtgaaactcagtacgaggcgccctggggcagcacagatggggacttgcttgttttcttttctcacttttactgcaaaggcacactaaaaagtccttttcaatttagtgcgatcagttcacttggaattatctctgatatttggaacctgtcttgctcttctgcccaccaactatgcctattctttcttccttactttctgacctaatgtcttttctttctgcctctgcatgtcatgaatctgacaactaaaattctgcttacaattcttactgggtcaaactgttcccccgtgttgttttgtttgttttgctgacagggaaaaataaatgttgttccatcattgtacctacaaacaccttcagatcagaggttagctgtgggaaagtctgcagtgatatgagccagctgccttctctaatggagtgacttggggcaccagtccaagatcagaggaaggtgggaggaagtcagaagataagatcattttaagccacagaacaacaagcttagcttttctagtgatagggcacagctcagcaaacctgtgtgagggggcactaagacaaaaaattgagttgactttttttaagtacatctttcctcagtcagaaatatgttgatgcttgaaatagtttacagacatggaagtgtcctagggcctggtttccttaaaagataatgatttgacatttatatatgtgtcttcttgcagttagtcagctccataccataacagatcacagttaatttttaaaaataatttttttgggctgggcatagtaactcatacctgtaatcccagaactttggaaggccaaggcaggtggatcacctgaggtcaggagttcgagaccagcctgatcaatatggtgaaacccccatctctgctaaaaatacaaaattagctgggcatggtggcacacacctgtagttccagctactcgggaggctgaggcaggagaatacctttaacccaggaggcggaggttgcaatgagctgagatcgcaccactgcactccagccagggctacaagagcaaagctctgtctcaaaaaaaaaaaaaaatatatatgtatatatatacacacacacatatttatatacacatatatatacatatacacacacataaattttttacagttaatttcttatatttgagcaaaactggacattaaaaaaattttactgtatgtgaattttgagcatttatggcttagtgcaattttagtcctacacattcttcctttgaactttgtcttacagtcccctggggttctctcatgtctctgatgaagttccatataaataagtggttctagtatagcttttttgttgtctttttcatataagaatttgcttggttcagagtgacagcttgggaagcactacatcaatagcttttgaaccttttcctattccttgatatcaccgccagcaaatgttactgactatgtgatgtacaaagttctaaccttgcttgcacaaattgaccagttgtcaagatcaatatttatttgcttatttttgtctacatgaactaagggtaacttggtcaggcttatgtttctctagtaaatagcgtaaggagttgtactttcaacttaacacttcctgttgacttcagtgtttagctgtaatcatacattttgacctttctaaatcctcaaaatggttctctaacctatatgttattagtacattggaccataggtgcatacatgtatttttttcccaatgttttcccaaatttctgctgaagacactgactgtactttctgccttacatggcttgatgctacagtcgttttagttgagttggatctgctcactactcaggctcaaatcccatccttctattaatatctcttggcaaagataattttggaagaatgtgagttaagatgtagagactcttgacagttgtctgcagttttttttttttttcattttcaagagggaagtagagttgaaaagtaatattgcctcccttttctatctgtcctaaaattaaagtataagcacaaagagtgaagaaagggaaaggatttgattacacatatgtatttttgtcatttagtaacctgttataagagccttagggtatataataatcattagattgtgtccttaagatatttaaaatctagaagaactttgcatattaaaattttttaaccatacatatttttaatgctcaactgtttttaccctgtcatcttatattaaagaggatttttggactgtttattataaaaaatttcaaacaaaaaaggagacattggacccctacatagcacatacatctagatttaacacttgttaacattttgccacttttgcttcattttaatttttttctgcagtattctaaaataaattacatatatcatgacatttcatttctaaatacctcaggattcatcttaagaattaaggacttttaaaatcaaactgataattcctaatattacctaattttcatttcagattcaaatttctccccttgtcccaaaaatgtcttttatagctggtttgtataaaccaattaaggtttatacattgttcttggtcattttcccttttctactttacattacattgacttgttaaaaacattaagctagttgtcctacagaatgtcctaccctatgaatgttttcagttgctttctctgtgtatactttaacttgttcccctatcctctgtatttcttatagactgcaagttactggactaaagttttgattaattcatattaaagtatttaggttagartactttataggtgatggtgtgaacttcacactgcatcacaacagaaggcaaagaatatttggtgatcccactattagtgatgataagtgatagcatcgatcactgggttaaagtgatgacagcttgatccttccattataaagttatgctttgctcccgtgaccagcatataatctgagatactttgattccatggaaatacccagttccctatcatcctttttacccaatgagtttaacatctactgaggatccttgcctgcataaatttcgttatgaggattgcaaaaagatgatttttctgaatttatacatttattagcaggcattcttctctacataagagctttttgagaggtattgttttaattaaaaacacaaccaccagcatattccttggattgtctttctttgctgaggtcagaacacctgaactcactgtggcagctacagtaaaaacatgtactacatcttctttattccaacttgtgaagtgtgttgacattaggctgcctttttttattattattattccaagggaaaaaagaaatctttattgctgtaagaataaaaattgaactatgtgggtatattgagataattgtgtaaagaagaagactgaatgagtttcaaaaaatggattatttcttcattaccgagcactttataattaactgttcttttttttytttatttcaggaagctgccacttttgctagagagcaaggctttgaggtgagttaacccacaattgcacactaaacagatcctaaaggttttttctagctgataatgaagttcttttggacagtgattgatgtgctattatactctcagagcctcgcagcagttgccatggaaacttggcagtcgtcatggtttctttgttctgccagcacagtgttatgacgcactctgctaggtctgcacccaacatcgcctacagatgttatttattgaattttgaaaagcctcttgggaagccaagaggttgggcacggtttcaagctgcctctgcagatatggggcctgtcagtttgttcagttaaaaagctacctcattagctgcattacatttcataaggattcactgctaaagcagtggtggaacaagactaaataatgaaatataatgtcgtttaaataatttcagccctatcacatgtagattatcattatgcaaattaatttctaaaaggttgtacttaacagttgttaggaactgattaatttaaatcctgcttttataaacttactctttgaacctatcttttcttctctctccctctttttttctggggagacggaggtagcataaaatatacatacattttctgaaataaaatatcaataattggatttaatttctaggtcctaattctgtttttctgatataagtgttatcctgtcaagattcaaaactccatgtggttgttgttggcaaaactgagataaccgtgttttttatctgtataatacccctcttccaactgattgttagaaaacactgactaatatgaacccaggttaactgacagagaattaactaagttggagttgtttatgactatgatatttattgagtgaactatgtagaatgctgtgttcttacagcaacttaaagtgttacagggtagtaatttttaaaaatttaatctaaccacagccgaaatgtaggaactttctttttatttgcatattcagtattgtctatcaaacagggaagaggtgagtggtgattgaatagtatcagtaaggactagtaagctcactttgaactctagagaaagatattatatgagtttgtgaaactctttttaaatgtagtaaaggcagattatcaagcagcaaagtaatacatgttcatgttattcatgtcatcagacttgacaaacgagacatagagcttcctcttcatagaggaaagacaaggaacatgtgatacagatattctgttctgaagatcctataaaagaactactccagagtagggaaacttgcttctttgtactcaattattaggagctgtgatagtttcttacaagtttgcttttttatgctttaccatattatagtaaatctaggtttaagtcacatttagaaaaaggatttccaagtggtgggtttttttctaatttaagtttcacattttaatttcccaaactggcaattatatgtaggacaaaatgtaatcaygggaatattcaattaaaaagtcaaatgttttgatcatgagaatataaataaaaattttcaggaattttttaaagttttactgattttaagttttaatattacaaaaattatattatctgttgatacatcagaattctccatagaagaaaactttcagaacatacatttgtatcctgtcagtttactgtgttaccataaaaaatgtatttttggttctataaaataaccaattttgcagatacttagaaatataatttgttatataacatgatcatgatcctgtagtatctacatagcagtttttaaaaaatagtttattaagcctgattaatacttttatttcccccttgagctacttgcttttcatgtgcctggtttacattcagtcatagcaacaaactactttttctattttccattaactagcactatattcacctttccattagttcttacttactgattcttgaattgtttttgccataaatctgccataattgattacagcatataagcaaaatgataatgattataatcacataccttattacctcctgacatagcaaaactgctctgtcagtgatattgacagtgatatgttagactaaataaagcacatagtgtcttgatgtgtctcttcgtagattcccaaaaccatcacaagcattgcagaatatatttgaaccatgagtagggtaccctcaaatagatatttttaatcaaatgtaatccatgtatggaacactatctagagaaattcaatgattttataatgtcactaaagtttcctaggtcattagacagaaatggcagagcataggtttgaaacttggtattcttaaggaataaaacaaaaataaatcactttatcttaatagttttctgtgtgaaaatgcattaatactcttggctagtgtgacaaactagacaaaaatctgcattttatcccttctaactttaattttgactctaaatttggagcatgaatgagaagaaagaagtgaaaagattaaaagaaaggaaaggtgagtattttttccttccatcagtgccgctgtcctaccctcattttctcctataaatcccaatcagttccaaaagccactgagtattgccactagtgatctggctgctgacagaccaatccaagcgcctctaaaaataaccagtgtttattcgtcaggaaatattctcagtggcattttttttttaattgattattattctggttagcttctctgcaaattttacttttgtaaaaaaaaaaatctttaaactgaattcggcagttttcagtgagaagcagcagcttaggagagcactggagaatgagataaaaactggagctgggcagaacacaaagcataagagaggatttttttatatatataggtgatggaaaattgcatagtgcctgatttaaatgacagacctgctaagaatttaaaatgacaattcttggggtaaaaagttttataaggccttttattattctagaaaatcagttcagactggagtgtgtttttaaatctagcttttcttgagccgaactgattaaatgttcgtatttttagaacataaataaaaataaggtgctcaaaagcatgtttcattataaagccttttttaaactattgaaaattgatttaaataaagtgaagaaaatacctcaaaacctaaatatatatattctctatcttttcattgtctctgcaactgagtaaatgacaaatgatgaagagaattcataccttctctattggatcatttatttccttttactccaagtaataaattttagattttttttaaattttagatctctaagaataatacttctgctcataggggaaacaaagcaatccttttcgcctttttcacttcctccatagcccctgactacccagaagatcctagacttgtagtctttctctgaccaatgaggattctttcatcttacaccactgaaagagaaaagtatggaattgtgctatccaatacagcatctactagccacatgtggctatttaaattaggattaattaaaattaaataaaatttaaaattcatcacttcttggccttttggctaagatcaaatgtaaaattttaaattcagtccttcagtcatactaggcacatattgagtactctatagactatgtagctaatgactactttattggataatgcaggatagaacatatgcatcatcacagaaagtttcattgatcagcatggatagaaagtctacagagaatgtattcaggcagtgttgattaccaaagaattaccttaggtgacttttaggttcctgtgttcttcacaaatataaatagtgcaatgaatgatcactcagagtttcagagtttctgaaaataagaccctaaatcaggccctgctggctaagagagtgcagtgttgtttttgtaggtgcctgaaccccaaaagaggacaattttagaacagttcagttaagggaaagcaataagctagtcttctaattctcttcatttaatcatttatttattcaacaaatatttactgagttcttactatgtacataccactttgatagaccccaagacaaggtggaagtgaccagagagtgtaccatgaaagagcatgtgggaagggttcccattttagctatgatggctatggaatgaccctaaaaatatgaatatctagcaatgacaaaaaaaaagcgacacaaacagcaaaacaaatttcaaacagagagaacaggactataaaagtctctgaacgagagagaacttaatgtactatgtactccaggaactgacagaaggccagtgtgactggaatggagttagtggggacagcatatgagatcaatctggcactgacacatcatataaacagcataactattaaaggagtttctatttggaaaacaaaacaaaatggtatggctagatgactcaatgtgtggaaacactacagttggttttctacagaactaggtagactgtgacaggattgcttaacctttgtataaccagctggttaaaaatagaataaagattttctttatccagtctatcattgatgggcatttgggttggttccaagcctttgctattgtgaatagtgctgcagcaaacatatatgggcatgtgtctttatatcagaatgatttataatcctatgggtatatatccagtaatggtattgctgggtcaaatggtatttcttgttctagatcctttaggaatccagttcatgttctttgcatggacatggatgaagctagaaactatcattctcagcaaactaacacaggaacagaaagccaaacactgcatgttctcactcgtaagtgggaattgaacaatgagaacacatggacacagggagggcaacatcatacaccggggcctgttgtggggtggggggttggggagggatatcatcaggagaaataactaatgtagatgacaggttgatggctgcagcaaaccaccatggcacgcgtatacctctgtaacaaagctgcatgttctgcacaggtatcccagaaattaaagtatgattaaaaaaaatttctagtaatagtaacactactagtaattcaaatgaagtgtgtgtaacagaagaaataaaaaaaaaattaaaatgctacatctgaaaatacctatttcatacaaagcaaggaggtaaagaagggatagaacatatttttttaaaatatgacatatggaaaacaaatagcaaatggcagatattaattcaactgcattaataataatgttaatctggagtaaataatatgataaaaaggcagaaattctcagactagataaaaaaactgaggtctaactatatgctgtctgaaagagatgtatcttcaattcaaagatacaaataggtaaaaaaaaaaaaaaagaatgaagagagtatgttctttgatttggaagacaatgtgatcaccaatgacaataaaaccatatttctacatttataaaatgctcacagtttataaaacctttcccaacatatcagtaatacattcatacttgcacaaaccttgagagataggtagggcatgtattgccatatcagttcaacagattaaaaaaataggctatatggccgggtgtggtggctcccacgcctgtaatcccagcactttgggaggccaaggtgggtggatcacctgacatcaggagttcgagaccagcctggccaacatggtgaaaccccatctccccttaaaatacaaaaaaatagccaggtatggtggcagatgcctataatcccagctacttgggaggctgaggcaggagaattgcttgaaccaggatgtggaggttgcagtgagctgaaattgcaccattgcacaccagcctgggcaacaagagccaaactccatctcaaaaaaaaaaaaaaaaaaaaaggctctatgactttttcaaagtcatatagctaatacattatgtagccagaaccagagctcagctctctatgtctggtgctctttactataaagcacacagctttctctcacacattctaacatgttggaagaggagattagatttcaaaatgactttgagaaatgaaaaatacctttttttttttttttttaagaggagaggcaccccaacagagcaccagaggattcagaaaccatttggacagatgggagctagcgaccgccgacacgataagtagggagaaggaaacacaacacggtaataaaacatatatgaacccccaccacaccgtgggttgaggagaagggaacgaccgcacaaagcaaaggccgaaaaccacccccaaacagcaatagaataaataaaaagaaatccaacaatacagatcacaataactacactagacctccgcacaaatacgagaatctgggcctatgacggaccgtgcggagacgaacccatccaagctagtccccaccgatttgcgcgctggtaaggcaagccacagcctgagatnnnnnnnnnnnnnnnnnnnnattcagccaggcacggtgactcacgcctgtaatcccagcactttgagaggccaaggcggacagatcacctgaggtcaggaattcgagaccagcctggccaacatggtgagaccccgtctctactaaaaatacaaaaattagttgggtgtggtggcgggcacctgtaatcccagctactcagaagcctgaggcaggagaatcacttgaacccaggaggcagaggttgcagtgagccaagatcgcaccattgcactccagcctgggcaacaagagcgaaattccatctcaaaaaaaaaaaaaaaaaaaccactgaaattcgctggagtaaaaatatgagccaaattaattaagaaaaaatagcaaacttaaacacaagatcaggaatgacttgtgaatgtggtaggaaaatggtttaggatgaacatgctatagttttgtgataaaaaaaaacaacaaaaagcacattgctagcatttatagaagcactataataatggttaagtgtattatccttggagtcagactgtgggtgctagtctgttctccactacttgtatttatgaccttaggcacattacttaacgtctctgactcagtttcttcatctataaaatggcatattgtattagtacctactgcctagagtagttcagatttaatgagtactttattttattgattggttgattgattgttttgagacagcctcactctgttgccctgactgaaatgcaatgatacggtctcagctcactgcaacctctgcctgctgggctcaagcaatctgtagattcaatgcaatccctatcaaaattccaatgtcattctctctctctctctcttttttttttttgagacagggtctggctctgttgcccacgctggagtgcagtggcgtgatctcagctccctgaaacctctgtctcccaggctcaagccatcctcccacctcagcctcctaagtagctgggactataggcgcatgccaccacacctagcaaatttttgtatttttttgtagagatgaagttttactacgttgcccaggctagtctcaaactcctaggctcaagcgattcacccgcctccgcctcccagtgtgctgggattacaggcatgagccaccacgccttaccttaatgaatactttagagctttatacatggcttttagtttcttcatctataaaatagggataataatagtacctactgactagagaagttaagatttaatgagcactttagagctatgtacatggctcacagctcaattttatgagctttcaactcatacttcttactcctccctgtcttcatcttcttcgttatagatactataattgaatgttccatattcaaaactcttgaagccctttctagcgattttggggcaacctaagtatgtaaccattttagagagtattaaaatgagagtaattagaggaaataaattaatatttaagttcttagcatgtgctaaaattgcattaagctatttcacttacctcatcttctttcatcctcacaatttttaactttttattttaaaataactttagtcttagaaaaattacaaaaatagtacagaattcccacatacccttcacccagtttaccctaatattaacatcttacataaccaaagtataatgaataacagaaaattaacattaaactacaataactgaactatatacaggctttattctggtttcaaccgttttttctctagtttcctttttctgttccagaatcgaatcccacattgcatatttgtcatgtctccttagtctcttctaatctgtgacagttcctcactcttgttgttcatgaactttatacttttgaaaattattggtcagtcattttgtagaatgtccttccatttgagtttgtctgatgttttctcatgtacattgagattaggcatttttggcaggaaaaccacagaagtgatgttcctttcttggtgcatcatatcagggaggtacacagtgtcacagattcttattgctggtgatgctaaacctttatcactaggtttaggtggtgtttgctagtttatcctctgtaattcccattgtatttaataaatatcttggaggagatactactttggggctatggaaacattctattttatccactaattttagcatcactaaactaatctatctggcttaaggtgatgtctgtcaattttctctactataacattatgatttttccttttgtaatgaatatcttagggggacatactttgagactgtaaatatcctgttttctttaatttttgcccactaatcttagcatacttatccctcaaaatcttttaatgtgaacattttcttagttttgtagatgaggaaatggatcttagagaggtttattaacttgccccaaatcatacaaatagtaaatccaagcctgtcatattctaaaagtccttgtaatttcattgtttgttaagatgtgtgagcttaagtgtaagggagaagaacctattggggacagaggagaggaattactgtagaaggagaaataaagttttacatacatctgggaagaattatgttttgtacttggaaagtttattttgtcctttaattgccattttatgaggtttaatttgagacataagaaacatttctttgattaaattaccaaagctctcaacaaaatatgtcttctcacagggttggtagaaagcaaccatggaatcttattcctttttttttttttttttttttttttttgagatggcgtcttgctctgtcaccaggctgcagtgcagtggcatgatctctgcacactgcaacctctgcctcctgggttcaagcgattctcctgcctcagccctcccaagtagctaggactacagacacgtgccaccatgcccaactaatttttgtatttttagtaaagacgggatttcaccatgttagccaggatggtcttcatctctcgacctcgtgatctgccctcctcggcctcccaaagtgctgggattacaggcgtgagccactataaccagccagaatcttattcttaatttattccttatatcaccttgaagaaagactttcttttaaagaacatctagtacattcataagattctgctttcaagatgatgaagtgaatgtgtttttctcttatctttattaaatatgagctgtacttaatcacaagcaaaaatcctatagtagtaaaatatatttgtgctaaggaaattgccaaaatatacatgagtcattttaattatatgtgtacacttatttaggtgagtgaagacattgcatggcattttttggtcctttcagctgttactagtcatttctaaaagtctgtctcctgaaactgagggaatttcttctcatcttatcagagttcagacttagttctgttctaaaataagcaaccgaaagcgaaatagtcagcatgtttgaagtcagcagcactgtcctactacaaatggctattcttttcagaaacaactgtcctctagaagtcatcctgttaggtatattagaagcttagcttcatatattatctggaatttattaaatattgagtgaacaaacaatataaaaatatttcaccacaaattgtcatccctttaaaaatgccagtttctggtgacgtttgtaacgattgcaaaccattgtgacttgtctgctttgcttgcctaaatgttctctctcatatattctatttgttctcttatatatactttatttatgccactcagctatatttccgctctgataggtgtttctttctctataactatttgaaactttgcatagtgatagaataaactagttttgttagcaaagcccaaaactatggacagttttaaaagcccactgaatacagacatggattttcaaattatccaaaatggttgaaaagatgattctaaaacctctgcctttagctcaaggttaggtttcaagatttcagaaaacttcaataaagatttcagtaaaactttatggcctatgtggtgtgaaaaacagcatcagagtttgacaattagtttgtcattttttaaactttatcttttttaaagaaaattaagtctttgtaggaaaggattagcatttctttctctcaaatcagtcctttgaaaaattgacattataagaactgtattttttccaaagtcagcataattatgttctgtaaacctctaaaataattaaattttcctctttataaaaacctctctttaattgggaatttgaaaactgcctggatatttgctgatacttagtcattgttaataatttttgaagtatgataatagttttgtggttatgtttatcattacctttcaaagatatatactaaaacatttatagatgaaattatgtatagttcttggagtttactttagaataatttgaaaagcaagtggatgaggatataggtgaaataagattcatcatacattttaaatttgtgtagatcattgatgggttccttggaagtcactgtgctattctatttacttttgtatatggttaaagaaatttttaatgtctcttaatagatatgcaggtctcttattttgatcaatagaagctaaattgttaatctactaataaagttttgttttattttattggtcatgagaattttttccttccttctattaatagactaaagacattaaagagatagccaaaaagacacaagccctgccaaagatgaactcaaagaggcagcgaatcgtgatcttcacccaagggagagatgacactataatggctacaggtacatgtgggaaatgtgtgatgaatctagtattatggagattaatcaattacaaaaaaaaattctgtattctttctattataatatatacaatatacatatacaatatatataaaatgaaatattttattttaataaatatttctaccctgtatctcagtagaaaagatttcatgttcaagaagatagtttattaacatttagttaaataaaccactttgatataatttatttacttagttatcttggggattttgtcaatcaagaaatatctttcctgaaaaaaagaatacatttcatttataaaatacctgcactagagtaaaataaatttactcaattatgaacaaataaaatccagaactaagttacattttccatttttccttcaagaagaaaatctcattttttgttttatttcaccatctattttatagcactcataaaacaggaatttcatctagtaagcaaacatgttattgattaaaatgattaatagtgttaatatggagctacccactattaaaaatataaatgttttaattctgtctgtaccattcagattaaaaccaatcagttgattagttattgtaaactggagcaatttagtattacctatgtgtttgttcagtactctgctgaacactgaaatataaaataggaaccttaaagatctaactgggaattaatattcataaaatataagtacaaagtaaaatataattatagttcttatctattggtgctaactatatggattgtattgactcaggagatcagtaaatcttgaaaaaagatgttatagtgaatatgaagtacatttgtgttgaattaaatataaagcctgaaataggccaaagatgaaattactgtcaagatattttctttcttttttaaaataaattttattctttatatttgaggtttataacatgatgttataggatacatagatatatatagatcaactttcttatttcagaatggtcraaagcaagattcagagatttgtttcaaaaaatatttgcttcaaagtagttcagtgagtggtagataaagtgagggtataaatgaaatgagactggtaatgaattaattgttgaagctagacagtggatatatgggggcatcattatgctattatctccacttgtggatatgttttaaattatccataattaaaactttaaaaaaagaaagaaaagtttttttttttaaatttcaaacaagattcagagatgttgagtggctttcccaagatacattgatatccttgctaatccttaaattctaggaaggattaaaagaaaggaggacaagtgggcacagtggctcacacctgtaaccctagcaccttgggaagtcaaggtgggaggattgcttgatcccaggagttggagaccagccttggtaacagcaagacttcatctctacaaaaaaaaatgraaaaaaaaaaaaaattagctgagagagtagtggcacatgcccatagtcctggctacttgggaggctgatgcaagaagatcacttgagcccagaagttcgaggctgtgttgagctatgatctctccactgcaccccagcatggatgacagaccaagaccctgtctccaaaaaaaaaaaaaaaaaaaaaaaagaacggagggcaatggagtcaaagaggatcaagtaagcaaaggcacaagtactagcaatcttttattgtgatggcaagaagaaccaccttgttaatttgtacaagagagaaaagaaaccatgaaaagatatccctgcactgatacaaactatctgaattgctttcttcctatagtataaggattattcctgtcttagcagtggacagtttagaaaagtgaaaaacatacaggcttcttataggaattgtartactaccttcagatttacaaaatattctttggttgctctttgtggagacattcattttaagtctttgtatattctagatatacatactgtacaagtgtcttccttattgtgaatttgcagttttcccaaaattgaaaattaacctccccattctgtgactgtatttccttgtgaactcattttattctttattaaatctattaagccattcttaggaatgcttacaagctggaatttatttgaggaaagacactggctaatctttgctgttcctaccatatgaaaatgaacttaaatcaaaggatgcactatatctgcaatgcatgataaatacaagatggatagagaatctgttcagtggtgtcagctacaaaagcaaacatgataaatgttaatgcagttttgagccctgggataagctattcagtgcacaagtgtagctgaatctctttgctatgttgttattcattgcagccaaataaatgtcaataataaaagagaattaaagattttcatttcccagaggcagtcctctaatacggcttgatctttcatttcatttgtaattcgttctcatgtcaggatgcaatcattcgccaggctctgggtgtcatgttaagccatttaataatgattaagaacataaaaatgcttggcctgtggggcaattcacaaaagagatgccaatttgttattgttttccctcctttcctcttgaatatggatcagctttttcccacctcctagcattaaaatactaatggaagatagggagggaaagtgtcccttaatttaccataagtgacattccagaatggcacaaggcagtgctaacacacatattaaaagactaattaggaatcattgtgccttaaacctatttttttttaatgatactttaagttctgggatacatgtccagaatgtgcatgtttgttacatagttatacacatgccatggtggtttcctgcacctatcaacccatcatctacattaggcatttctcctaatgctatccctccctgagctcccccaccccccgacaggccctggtgtgtgatgttgccctccttgtgtccgtgtgttctcattgttcaattcccacttatgagtgagaacatgcagtgtttggttttctgttcctgtgttagtttgctgagaatgatggtttccagcttcatccatgtccctgcaaaggacgtgaattcatccttgttatggctgcatagtattccatggtgtatatgtgccacattttctttagccagtctatcattgatgggcatttgggttgactttgctattgtgaatagtgctgcaataaacatatgtgtgtatgtgtctttatagtagaatgatttataatcctttgggtatatacccagtaatgagattgctggatcaaatggtatttcctgttctagatcctkgaggaatcgccacactgttttccacaatggttgaactaatttacacttccaccaacagtgtaaaagcattcctgttcctccacatcctcaccagcatttgttgttttatgactttttaatgatcaccattctaactgacatgagatggtatctcattgtggttttgatttgcatttctctaatgaccagggatgatgagctttttttcatgtgtttgttggccgcataaatatctccttttgagaagtgtctgttcatatcctttgcccactttttgatgtggttgtttgttcgttttttgtaaatttgtttaagttctttgtagattctggatattagccctttgtcagatggacagattgcaaaaattttctcccattctgtaggttgcccgttcactctgatgatagtttcatttgctgtgcagaagctctttagtttaattggatcccatttgtcagttttgacttttgttcccattacttttggtgttttagtcatgaagtctttgcccatgcctatgtcctgaatggtattacctaggttttcttctagggtttttatggttttatgttttatgttttaagtctttaatccatcttgagttaatttttgtataaggtgtaaggaaggggtccagtttcagttttctctatatggctagtcagttttcccagcaccatttattaaatagggattcttttcccccattgcttgttttttgtcagatttgtcaaagatcagatcgttgtagatgtgtggcattatttctgaggcctctgttctgttccattgatctatatatctgttttcataccagtaccatgctgttttggttactgtaggcttatagtatagtttgaagtcaggttagcatgatgccyccagctttgttctttttgcttaggattgtcttggctatacgggctcttttttggttccatatgaaatttaattttctctaattctgtgaagaaagtcaatggtagcttgatggggaaagcattgaatctgtaaattactttgggtagtatgaccattttcacgatattcttcctatccgtgagcatggaatggttttccatttgtttgtgtcctctcttatttccttgagcaatggtttgtagttcttgaagaggtccttcacatcccttgtaagttgtattcctaggtattttattctctttgtagcaattgtgaatgagagttcactcatgatttggctctctgtttgtctattattggtgtataggaatgcttgtgatttttgcacattgattttgtatcctgagactttgctgaagttgcttatcagcttaaggagattttgggctgagatgctggggttttctaaatatacagtcatgtcatctgcagacagagacaatttgacttcctctcttcctatttgaataccctttatttctttctcttgcctgattgccctggtcagaacttccaataccatgttgaataggagtggcgagagagtgcatccttgtcttgtgccggttttcaaaggcaatccttccagcttttgcccattcagcgtgatattggctgtgggtttgtcataaatagttcgtattattttaagatatgttccatcaatacctagttttttgagagtttttagcatgacggagtgttgaattttatcgaaggccttttctgcatctattgaggtaatcatgtggcttttgttattggttctgtttatgtgatggattacgtttcttaatttgcgtatgttgaaccagccttgcatcccagggatgaagccgacttgatcatgatagataagctttttgatgtgcttctggattcagtttgccagaattttattgaggacttttgcatcaatgttcatcagggatattggcctgaaattttctttttttgttgtctctgccaggttttgctgtcaggatgatgctggcctcataaaataaattagagaggagtccctctttttctattgtttggaatagtttcagaaggaatagtaccagctcctctttgtacctctgatagaattcagttgtgaatccgtctgctcctgggctttttttggttgataggctattaattactgcctcaatttcagaacttgttattggtctatttagggattcaacttcttcctggtttagtcttgggagggtgtatgtgtccagtaatgtatccatttcttctagattttctagtttatttgtgtagagatgtttataatatccactgatggtagtttatatttctgtgggatcagtggtgatctcccctttatcattttttattgtgtctatttgattcttctctcttttcttctttattagtctagctagcagtctatctattttgttaatctttgcaaaaaaccagctcctggattcattgatttttggaagggttttttgtgtctaactccttcacctctgctctgatcttagttatttcttgccttctgctagcttttgaatgtgtttgctcttgcttctctagttcttttaattgtgatgttaggatgtcgattttagatctttcccgctttctcctgtgggcatttagtgctataaatgtccttcttaacactgctttagctgtgtcccagagattcgttgggtctctgttctcattggttttaaagaacttatttatttctgccttaatttcattatttacccagtagtcattcaggagcagattgttcagtttccatgcagttgtgtggttctgagtgagtttcttagtcctgagttctaatgtgattgcactgtggtctgagagactgtttgttatgatttccattattttgcatgtgctgaggagtgttttacttccaattatgtggtcaattttagaataagcgtgatgtggtgctgagaagaatgtatattctgttgatttggggtggagagttctgtagatgtctattaggtctgcttggccagagctgagttcaagtcctgaatatcgttgttaatttttggtctcgttgatctaatattgacagtggggtgttaaaatctcccactattattgtgtgggagtctaggtctctttgtaggtctctaagaacttgctttatgaatctgggtgctcctgtattgggtgcatatatatttaggatagttagctcttcttgttgaattgatccctttaccattatgtaatgcccttgtttgtcttttttgatctttgttggtttaaagtctgttttatcggagactaggattacaacccctgctttttttttgctttccacttgctttgtaaatattcctccatccctttattttgaacctacgtgtgtctttgcacatgagatgagtctcctgaatatagcacaccaatgggccttgactctttatccaattccccagtctgtgtttttcaattggggcatttagcccatttacatttaaggttaatatattatgcatgaatttgatcctgtcattatgatgctagctggttattttgcccgttagttgatgtggtttcttcatagtcttgatggtctttacaatttggtatgtttttgcagtggctggtaccagtttttcctttccatatttagtgcttccttcaggagctcttgtaaggcaggcctggtggtgacaaaatctctcagcatttgcttgtctttaaaggattttatttctcctttgcttatgaagcttagtgtggctggatatgaaattctgggttcaaaattcttttctttaagaatgttgaatgttggtcctcactctcttctggcttatagggtttctgcagagagatcagctgttagtctgatgggcttccctttgtgggtaacccaacctttctctctggctgcccttaatactttttccttcatttcaaccttggtgaatctgacaattatgtgttttggggttgctcttctcaaggagtatctttgtggtgttctctgtatttcctgaatttgaatgttggcctgtcttgctagattggggaagctttcttggataatattctgaagagtgttttccaacttggttccattctccccatcactttcaggtacaccaatcaaatgtaggtttggtcttttcatatagtcccatatttcttggaggtttgttagttcctttccattcttttttctctaatcttgtcatgatgctttatttcattaagttgatcttcaatctctgatatcctttcttctgcttgatcaatttggttattatatttgtgtatgcttcacgaagtgttcgttctgtgtttttcagctctatcaggtcatttatgttcttctctaaactggttattctagttagcaattcctctaaccttttttcaaggttcttagcttccttgcattgggttagaacatggtcctttagctcggcggaatttgttattacccaccttctgaagcctacttctgtcaatttgtcaaactagttctctgtgcagttttgttcccttgctggtgaggagttgtgatcctttggaggagaagaggcattctggtttctggaattttcagcctttttgcactggtttttccttatcttcgtggatttatctacctttggtctttgatgctggtgaccttcggatggggtttttgtgtggacatcctttttgttgatgttggtgctattcctttctgtttgttagttttccttctaacagatgcctctgctgcaggtctgctggagttttctggaggtccactccagaccctgtttgcctgggtatcaccagcagaggctgcagaacagcaaagattactgcctgttccttcctctggaagctttgtcccagaggggcacccgccagatgccagctggagctctcctgtatgaggggtctgtcgacccttgctgggaggcatctcccagtcaggaggcatgggggtcagggacccagaggcaatctgtctgttaggagagctcgagcactgtgctgggagatttgctgctctcttcagagctggtaggcaggaaagtttaagtgccgaagctgtgcccacagctgttccttcccccaggtgctctgtcccagagagatgggagttttatctataagcccctgactggggctgctgcctttctttcatagatgccctgcccagagaggaggaatctagagaggcggtctggctacagtggcttttccaagctgcagtgggctccacccagttcaaactttttttgcgaactttgtttgcatctttgtttacactgttaggggaaaaccgcctactcaagcctcrgtaatggcagtcgccccttcccccaccaagcttgagcatcccaggtcgacttcagactgctgtgctggcagcgagaatttcaagccagtggatcttagcttgctgggctccgtcggggcaggatccgctgagctagaccacttggctccctggctttatccccctttccaggggagtgaacagttctgtctcgctggcgttccacacgccactgtggtatgaacaaaaactcctgcagctagcttggtgtctgcccaaacagcagcccagttttgtgcttgaaacccagggccctggtggtgtaggtacccgaagaaatctcctggtctgcgagttgtgaagaccatgggaaaagtgtagttatctgggctggagtgcaccatttctcatggcacagtccctcatggcttcccttgactaggggagggagttctcgaccccttgcacttccccggtaaggtgacgccccaccctgcttccgctcgccctttgtgggctgcacccactgtctaatcagtcccaatgagatgagccaggactctcagttggaaatgtagaaattacccgccttctgcgttgatctcgctgggaggtgcagaccggagctgttcctattcagccatcttgccagccacccaaacctatttttaaatgatcacactgttaagtttgcagtacttagcaataatgtatcaaaatgtttccttggagttttattctacagacctatctccttttgagatatgatatacataaactactttgtcttattttataaatttaattctttaaattgcctgtaaatctaaagtattttccgctcaccctgttttatgggtcatacctctttcagattgagtttccatctaccctagaggttctgtcacataccaatcattgtttcagtccttgcaggttaattgagtttcaaaaaaattttcaagggagtgctgggcactgaagaatattaagagtaacaggctgggcaattccacagcagagtatatgtccaaaataattgaagcaggaacctaaacagatatatgcccacccatcttcatagcagcattattcacaataaccaaaaggtagaagcaatcaaagtgtccatcagcagatgaacagataaataaaatgtgatatatacatacaaaggaatattattcagctttaaaaaagaaggaaatcctaacatgcactacaacatggatgaaccttgaagacattatgctaagtgaaataagccagtcacaatgggataattactgtgtgattccatttatgtgacatacctagagtagttagctttatagacaaagtagaatgatgttagccaggggctgggggagggctgaatggaaagttattgtttaattggtaaaaagtttcagttttgcaggatgaaaaagttgtaaagatgggtagtgataattgcacaataatatgaatgtacaatggcactgagctgtatattcaacaatgcttaaaatgttacattttatgtatatttttattttttaagcatatttttcaatttaaaaaaaattaaacataacctaaagagtaagatgctgggggtgaaggcagaaaagatgactgtccattttgatcctctttataaatgttgaatgaatctgttgaataacatggcagtaaggtgaaggaaatcatttctgtgtttataaactggaaaaactaacagtgttctttacctgttggagagcaactactaatgagatcttcatacaataaaaccttattatattaagcatggtagtaaaaaagtaaatatatatatgtatgtaaatacatatatagtgctttatagaaagtttaaacttccccaagtttctatactaaataaatcaccaaaaattggagaaagcaatacaacttttgttctgaattggaaataatgtgtttccaattaaataggtccactgaaaaataaactgtagatttttctgtttcgtttgttttaagaccaggcctygctctgtcacccaagctggagtacaatgacacaatcatggctcactgcaacctcaaccgggctcaagcgatcctcccttcccagcctcctaagtagccgggactacaggtgcctaccaccctgcccagctaatttttttgtattttttctttggtggagactggattttgccatattgcccatgctagtctcaaactcctgagctcaagtaatctgccttcctaggcctccctcctaaaatgctaggattacgggtgtgagccaccacacctggcctaaattgtagacttttctgaacactcagaattcttatttgaattgtaatttttcacaaagggagaaaatatattaagtcagatgttttcaactggaagactggtgctatcacatcaaaatcacctagtgagtttttggtaaatacagtcctaccttttttttttttttttaattttagaattgggggagggtgtgatactttttcagggttgttacatggatatattacataaggctggggtttgggcttctattgaacccatcacccaaacagtgaatataatacccaataggtagtttttcaactcacccccacccacttcctgcctccccctttatgtccatgtatacccattgtttacctcccacttataagtgagattgtggagcatatggttttctgtttctgggttaattcactttggataatgtcctctggctgcatctatgctgctgcaaaggacattatttccttctttgttatggctgcatagtattacatggtgtatatgtaccacactttctttatccaatccgctgttgatggacacttaggttgattccatgactttgccattatgaatagtgctgtaataaacataagaatgcaggtatctttttgatagaacaatttcttttactttgggtagatacccagtagtggggttgttggattgaatggtaatcctgtttttagttctttgagaaagttccaaactgctttccacaggggccaaactaacttacattcccaccaacagtatgtgtttccttttctctgtatcctcgccaatgtgtaatttttttactttttaataatagctgtgctaactagtattatgatatctcattgtggttttaatttgcatttctctgattattagtgatgtggaacatttttcatatgtttgttggctgcttgtatgttcccatttttaaaaattktattgatttatttgtattttatagagaaagtgtcttgctatgttgctcaggctggtctcatacttcctgaggctcaagcagttctcctgcctcagccttccaaagtgctgagattacagacatgagtcaccatgcctagctgtatgtcttattttgagaagcatttgttcatgtcccttgcctactttttaatggagtaatttgggtttttcttgttaatttgtttaggttccttatagattctggatattagtcctttattggttgcatagttagcaaatattttctcctaatctgtaggctgtctgtttattttgttgatagttacttttgttgtgcagaaactctttagttaagttacaatggtcaatttttatttttgttgcatttgcttttgaggtcttagtcataaattctttgcctaggcctatgtgcagaatagtttctcctaggttttttctaggatttttatagtttgaggttttatgtgtaagtctttaatctatcttgagttaatttttgtatatggtgagaggtaggggtccaatttcattattctgcatatggctagccagttttcccaatatcatttattgaattgagtgtcctttcatcactatttatttttgttgactttgtttaagatcagttggttgtaggtttgtgggtttacttctgggttctctattttgttccattgatctatgtgtctatttttgtgccaataccattgctattttggttactataccctagtagtatagtttgaagtcaggtaatgtgatgcttctggcttcgttttttgcttaggattgctttggctattcagctaccctgccttcttaaaagcacctttctttcaatctgatacaaccctgtgaggagtattagaaaatacaacttcaaggagatgtttgagaatgcgggcagtacagtctggggcaaggggagtgtaggattatgtatggttgaaaatgttccctttggtgatatagcaatgctgtctatcctccacctgtcactttgagaatcactggattaggtgatttaataatgctgcaagttccgtaatctgctggaaaaacgaaaacagaactttttaacagctaagggtctagttcttcaataactcaggccttgggaaatgcttcttttttcgatccttcaaaatccatccacacttacaggcaatctacagtttactttaaatagtctcctacttttgaggtgcttataatttaacatagttacatcccaatgccctttgtcattttattttaagtaaatggggttattgacgttacttgtcttcatgttcctgagtccttaaagaaacgtgttacctcatctgctagttaagttttcatgttctatgaaaacactcaatgctgcccattactctgtaagaaaaggtcagtgtgatttgcaattctggtagacgtaaagttcagaaaatgtgcgttagaaaatgcaaactctaaaggaaaacaatctcagcattggaagaataatgtcagcacatgatcccaactcaaaatattaatataaatcattttgaaaatgtctctactacagccaaatcaattttaaatgataaccttgttggcttagattggtgatggtaaagatagaataaactaagtggcattcttttaaaatgtcttgtatggcattcatagaaaaaagttcttaccaggtaagatcttagagaaaatatatttctcacctatgaatgtaagttactaagttattagctcatggtccatttttagattattgtaatcacaaaagataaactcctttaattaattggtcaaaamtaatttagaataacatgtggacctgtcacatttttgacaaagtagtatctttgggatgtggttcatttagttcagtgatctcaagcctgaagaaatgagacttctttcaactcccacctttttattgaaaaggatcctgctagaaggcaaaataagaggcaacctatcctaagcagatataagccctattatagcactgatttctggagggatgtttaagtcagatttgttgagatatagattacatatagtaaaatccacaaatatgttactaaataacatgtaacaaccaccacagactatagaccaccttgtacagtttgtattgaagtataatgtgcatacaaaattgatacaacttttcattaagtggatggacctgtgtagctataaccagatcaggaaatacaatacttatagcacttaagaagcttctccttgtgccccctcctaatctttatccccactgaaggtaaccattgtcttagcttctactactgacagttagctttgcctgtttttgaaatggaaccactcagtatgtagacttttgtctgctctatctccatccatttttgtgcactttcttactttttgacaacataagatcccccgggctcacgttgtattttctccacttcagtcctataatcaactatttctccaagraaccctggttccctttattgaagaatggtttttagaaacctgtaactgtgctctagatatgctctttgttccttgagtgtctttgcttctaggccctcttagcaaacagaacttggcaatatatgtatgtataataacctatgtatactcactcatctatatttatttctgtatctatatgtttatatatttttaaaacatgaagtcatactgataaattttatttcagtccagcagcacaaggctcattctagccttcattcttccttttgtacaacttcttcctttgacattgaaaattctggctctcattatctaaaatgtatttacttatttgttttatcctaaagtagttttgaattgcttgcccatacccttgtatgagaaagagatttaccctttagagtataatatttgcttacagttctttttttctgtagcccaatagtgtccagtcaatatatagttatccaaagtaaattagctcttttatttcatccactcattatggttacattattcatttgtaatacaggtagggtcacttgttaagagtattccattttggtttcttttcacatcctgattggggttttattttctcaataaaattcactttttgtagtgtcaagttctgtgggttttgacaracacataagatcatgtaaccaccaccatagttatgataccaaagagttacatttttcagctccggatttgcaaggatggtaccaatataaactcccccaattttatgagacggcactaattgttccacatctctaccaatatttgctactatccatctttttaattttagccattctggtgagtatgtaatagacctcataatgattttgattggaatttttctgatgtgtagtgagatggagctccttttcatctgcttactggtatttgtttttttgtgtgtagttttgttttgttttgtttttttgagatggagcctcactctgtcgcccaggctggagtgcagtggcgggatctcggctcactgcaatctccacctcctgggttcaagcgattcccttgcctcagcctccctagtagttgggactacaggtgcccaccatcacgcctggctcatttttttatttttagtagtgacggggtttcaccatgttggccaggctggtcttgaactcctgacctcaagtgatccacctgcctcggcctcccaaagtgctggggttacaggcgtgagccatcgtgcctggccttgcttactggcatttggatatcatctttgattgtattgttgttgggttcttttgcccatattgagttgtcttattgatttagaaatctttttacagcctgtatgccagtcttttgttagataaatgtattgtagatatctcctgctactctgtggcttgccttttcactctcttcatggtatcttttgataaacaaaagttcttgattttaatatagggcaattcataatgttttccccttatgattaatgcttcttatattccattaaagaaaatcatggcagatctcaaacttgtgaagatactcttctgttgtttttttctaaaacttctattcttttacttttttcaactagcacaattcatctaagattaatttatatatatatataaggtgtaggatagggagaatgattcatttattttgcccatatgaataaccaattgacctggcatcattcattgacaggaatatcctttccctaactgcattacattgacacctttgtcatgtttcagatgaccttatatgggtgagtctttttttaggctatttcattgtcctcattctctatcctttaccaattgcacactctcatgataacttaggtttataatcagtctttttatctggcaatgtcagtcttctgagtttgttcttcaagattatcctggcttttcttggctctttgcatttctacttaaattctagaactggcctgttaattgtcaccaaaggaattttttaaaaattccttactagagttttttcagattatattgaatctgcaagtcaatttggagaaaacttatttctttacagtattttgtcttccaatccatattttcctctatttatgcagtctttaatttttctcaggatgtttttttcttttcagtgtaaaggtcttgtatatgtatcttttgtaagattcttaggttttcgatgctatctatttttaaatggcatccttttaggtttctgtttctatttgttttttactggtatatagatttctaaataatgatctttttcacatattaactgcaataacatatcagataattattttggattttctatgcatataattataccatctgtgaataaaaataatttgcatttctgcttttccaattctcatacagtactttttttcttactacactagttagcacggtaagacatgtagaatacaagtaaattgaaatggttatagtgagcacctttgtcttattcccgatatcagttgaaaaaccatcaatattttatcaaaaaggataatgtttgctatagtctctttgtagatactctatcagataaaggaaatttctttccattaatagtttgctaagagtttttgttttgttcttaagagattttttaaaaatcatgaatagttgttgtatttcatcagataatgtttttgcatgtaaaattactatatgattttttcccttttttcttttaatgtgtgaattacagattgattatggaaagatatttcacctttgcattcttggaataatgccaacattgacatatctttttaatgtcttattggatttgatgtgatgttattttgttttctgtttgtttttttgagagagggtctcgtcttgtcacccaggctggagtgcagtggtgctctccaggctcactgcagcctccacctcctgggctcaagcagtcctcccacttcagcctcccaagtagctaggattacaggcacrtaccaccacgctaattttttaaattttttgaagagacgaggtctcactgtcttgcccagactgatcttgaactcctgggctcaagcaattcacccaccttgggctcccatagtgcggggattacaggtgtgagccaccatgccagccttgctttatgtattttaaagctatcttaactaagtgtatataaatttataattctcacgtcttcctgatgcattgaaccttttaccttatgaaatgtccttcttaatctctaatgatgcatcttgccttaatatctatgccagctttctattggttagtgtttacatgatatcttttttcattcctttattttcaacctttctgtgttcttdtatgacttttgttgttttttaattaattctgacaatcttcatattttaatcagcctgtttatatttaatataagttactaatgtatttgtgttcatatcttacatcttactctttttgttctgtcttacatgtgtatcttcttttttctctcctttcctgctgtttttggattgatcaagtatttttttctttttcttctcatttagcttctcggtcttgccctgttgcccagactggagtgcagtggtgtgatctcagctcactgcagcctccaccttccagtttcaagtaattctcatgcctcagcctcctgagtagctgggattacaggcatgcgccatcatacccagctagtttttgtgtttttattagagacagttttgccatgttggccaggctggtcactaactcctgacttcaagtgatccgcccgcctcggcctcccaaagtgctgggattacaggagtgagccatcgtgcccagcctgaattctcagtttttgtttgtctgaaagtttccttttgcctttcaatgtgtatagttctctatgttgggagttatactttttgagttctttataaatggctttccattatcttttggattctcttatttttgttgagaagtcagctgttactcttattctgctcttttatatataatatttttattttctctagctgctttttagaatttgtcaaactttaactttatccttagttctggttttccttttatttatcctgctgggatttttagtgcttcttgaatctgtgattgatgactttcatcagatttggaaaattctcagccattatctctttagatactagaactgtttatacttgggaatctagttatacatatactaggtcttttcattgtatcccatatgccttttatgctctttgtgtgtgtgtgtgtgtgtgtgtgtgtgtgtgtgtgtgtgtgtgtgttttaccccttttcctccccgagcttcaggctgtatattttgcactgacctggcatttagttccctgattctctcttctgctttgtcccatctgcatttcaaaacatccagtgaggctgggtccagtggctcatgcctgtaatcccagcactttgggaggccaaggcaggcagatcacttgaggccaggagttcaagaccagcctggccaacatggtgaaaccctgactctaccaaaaatagaaaaattacctgggcatggtggcaggtgcctgtactcccagctacttgggagactgaggcaggagaattgcttgaacccaggaggcagaggttgcagtgagccaagatcgcaccactgcacacgagcctgggagacagagcaagtctctgtctcaaaaaaaaaaaaaatctagtggatgctttatttcaatagtcccttttttattttctaaagtatctgattatttcttattcatcctagttctgtagtataatcctctaccttgtcatctatttttttctaacatattaatcatagtagtaataaattctgtgtctgaaaactacaatatctcagtcatttgtaggtctggtttttaaagattttttttaatttccacataataattgcaaatatttatggggtacatagtgatgggtttggtgttttaagagagggtcttgctctgtcaccgaggccagaaggccagagtgcagtggcgtgatcacagctcactgcaacccgtatcttgcaggctcaagagattttcccaactcggcctcctgagtagctgggactacaggcacatgccaccacacctggctaattttttttatttttattagagatgaggtctcgctgtgttgcccaggctggtctcaaactcctgagcttaaacgatcctctcaccttggcctctcaaattgctgggattatgggcgtgagccacaacaccctgcccatcgtgatgttttgatacatataatgtatggtgatcagagcagagcaattagcatatccatcatctcaaacatttatcatttctttgtattgtgaacattcaatatcctccttctcactatttgaaactatgtaatatattattgttaactgtagttatcctacattgctgtagaacactagaatttattcctcctatctagctctaattttgtatacttttaaaaatctctccctattgcctcctccttcttacccttcccagcctctaatatcctctgttctactttttacttctgtgagatcaactttttttagcttccacgtacgagtgagaatacatagtgtttaactttgtgttcctggcttatttcatgtaacataatgtcttacagttccatccatgttatggtgaatgacaggatttcattcttctttatagataagtagtattcgatcatgtatatataccacactttctttatccatttatctgttgttggacatttgggttgatttcatgtcttggctatagtgaataatgctgtagtaaacatgggggtgcaaatgtctctttaacgtactartttcctttcctttggagaaatacccaatagtgggattgctggatcatatggtagttctgtttgtttcttttctctgcatcctcaccagcatctgctttttttttctctttttaatgatagccattcttactggagtgagatgatacctcactggttttgatttgcattttcctgatgattagtgataatgagcttttttcccatttttttggccatttatatatcttcttttgagaaatgcctgttcaggtcatttgcccttttttaaaacagagtagagttttttgtttttatttgtttgtttgtttttttactgttgagatgtttaagttccttgtatattctggatattaattccctatctgattagatgagtaagttgtatgtatttttttctattccataggttatcttttcactctgttgattgtttcctttgctatacagaagcttttcagtttgacataatcccatttgtttatttttgcttttgttgcctgtgcttataaaaggttgtactcataaaacattttcccagaccaatgtcttgaagtgtttcccttatgtttccttctagtagttttattgttttgggtcttacatttaatccattttgagttgatttttacagagggtgagagctaggagtctagttccattcttatgcatatgactagatgcatatttagttttcccagcatcatttattgaagaaactgtgctttctccagtgactattcttggtgcttttgtcaaaaatcagttgactgtagatacgtggattaatttctgagttctctattctgttccattggtctttgtgtctgtttttatgccaataacatgctgttttggttactatagctttgtcatatattttgaagtctgatagtatgatacctccagctttgttcttcttgctcaggatgttttttaccatttagggtcttttctgattccacagaaattttagaatattttttctatttctgtgaagaatgtcattcgtattttgataagggttgtattgaattggcggatcactttgggtagtatataggtctgtttttttgtttttgttcggtttggtttctatttccttttggggcttgtttcttggtttgcctgataattttttatcaaatgttaaacattgtccataataaattatagagcttctgttagtgtagagtccaattagatctaggactaagccacctcaaggttgggttatagtttttgtaagacccagtctacctctcatttgcttccacttctataccatggccctcctggaatctcagctgaaatcctggtgtttttatgagatccctactcattaatgggttctgaactccaaattttatctgttttgtgtaccatacaactagcacaatcaccactctgccttatggatgccttatacttggtgtcttggcctcttgtcctgcttcctgacaagtgtggcaaataccttgagtagagtatttcctctcctgagtttcaggcctactttattgttttcccctcctcttcaggatcatgaccctcagttctgtctgtcttgacagtcccaaactcgaatttttgtcttaccacccactagagattgcaaaaagttatgttggcttctctgcctcttagtagtagtccattgcccagattctcagcctcttacccgacacaggaatttgcaaataccctagggagaaaacgactttttgaatgtcagtttagctctttaagatcctcttctctctgagaccttctcttgtcaaattttgactaccttgtcagctctctcatcccttctttatttaaaaaaaaaaattaagcttttctgcctttttatggtctgggaattggtttactacaagctatggcattagagcctaaccaataggtcccttattgaatacatttttttattattaaatagaaaaatacatagcccgagaaagttaagtgggcttatctgtgtattaaggaatactgtttttaggaatgtgacttaggaatactgttcttcataccgcactttgggaactgctggattaggtcactttcccaaggtctcagaattagaaacaaaagcagctagattagaacccagcctcggcctggtgcggtggctcatgcctgtaatcctagcactttgggaggccaaggcgggagggtcacctaaggtcgggaattcaagaccagcctgaccaacctggagaaaccctgtctctactaaaaatacaaaataagccaggtgtggtggtgcatgcctgtaatcccagctactcgggaggctgaggcaggagaatcgttagaacccgggaggcggaggttgcggtgagccgagatcacactattgcactctagcctggacaacaagagtgaaactccgtctcaaaaacaaaaaacaaaaaacaaaaaaaraacccggcttcttgaatcccagactagtccaatctgttccataccatgttaactcattggcttacatctgtggttttcaaccagaaacaactttcccccttcctttcagttatgacaactggctggtatggaagagttgggtcttccactggcattttgtgggtaaaagccagggatgctgctatatatactataatgcacaagacagccaatccacaataaagaattatctggcccaaattattaattgcctcaagattagaaaagccctgtcttamagtatccctcaaaatttatatatttaaaggatcactggctgattcctctttacacttaatcataaggtcaacaccaataggctttagtaggataaagcatctttatcctactaaactacatccagaggccctttgacccaagaaaatgtccatatatgatctagtccgtacttgcttaactgtgtttctcaaagcttttgccaaatatgctccaattctaagacttctctttagttagaatttgttagagctggaaaactttctggtgtagaattgtgcgtgcatatcttgtaaatgcattttgtatgcatgaatggatatctagatgatagtgacatttacctacacatttatagattttatttatatatatacacatatatacataatatatatgtattctaggcatatatatatatatacacacacattagtctaaatggttcttagaaaatttattcattttggtttataactctaatcaatttctataatcaaaagctcttgaaaatgtaatacaaatagatatttaattaaagaggtatattaccaaatgtttttcagaataattattgtttgtaccagtgagtatttctttcagaaattcaattagactctaaaattcatttttcagagcattacaacttggcggcaaaattttcttttggctgaaacactgcatgcaagcttttggctcagaaaaaaatctttggaagtatagctgaaaagtctgattcagataactgaatggctaaaattttccttgtttaaaaggaataaactggttacacgtgaaatattaaaaactgtatttaaatggatagttaactattgccttatttcttttaagtcttaaccaagctggcttatcctatttcaactgctctagaactcacatcatttttgattcattgattttttttttttttttagtatcccaatagaagccatcatttctaaggttccaccccaactttgctgagccttggcccagaaaatttgtttagcttttctctgctgttgttaagctattttaaattttaaatttttgtgtttttaaacctttctgtgtttttaaagcctttctggtttaataaacaattctaaaatctcaagaaaatatccaaattcttttgttaataatttggcacttagccatctattcaatttatttatcatggtaaattttgcttatacttaattatttcctctagtcctagaactccaccccttaccataataaaggggcagtttataaaacaggtgtttttgtaagtaatttacatggtttagtatgcaaaaagtacaataatagagctgtttagctgtcagtacttgtgaggaagtaagcagttttttcgttattaggatgaccatataacttattagaaaaactcagatgcttttgagagtgaaagagtggggtgctattaataatactaggacagttctgggcaaaccagcccatatggtcacactaatcattatagatatttaaacaaaaatatttggtaaaatgaatttgtgtattggttgaggtttttggctgtgtttatttctaacatttcttccagtgaaaagattcttgatcatgtgctaagtatatgccaggtaatatagaacttaaaaaaaacatgagaacctctaatctcaagcaggacaagttggagaggcaagatacttatagataatgcagtaatgtaacagcacaaataaattcaattcattatggttttattgagtgcctactgtatgtcaagaattgtggttataaagatgaacaaaacaaaaactccttttcttgaaatctagaagagacatacttaaataatatgatgtgaaaaatgatattattttcatgaactaatttttatagaacaaatggaacaagaagttggggaaagcttttcaaagcaagtgatgtatgaactaggccttgaggaatccttacaattttggcaagttgagattacaaaggtattcaaagttaatgaggtaataaaagcaaaaggcagagtccttcatatgatttgttacaagaaatggcagaagggagatatggggcaaccatctctgaaatggtaattgtgatgggatttaaatgctatgctgggcaatacattattaagtgcttaaagtatatatatatatagagaagacatcctttggactgagaaacattttgtgatcagtttaccgtaattccataaaagaaaggaatcacacttccatttgtttataaagccctgtttcagagggatcaacaaatactaaagatgaaaatcctttttttaattaaatgctaaagaataaaagctgcaataatccctctaaaaagtattagtgatgaacaatcccatggggttatagtgagacaaatgtgatagggttagaaaaattgtagagaaaaattatggtaaaagcactagggaaatgccttagaaaattaataaagattggcttggtttaaagacggtaaataaagactaatgcaaaaggctaatgaattcagtcatggagaaagtttatactatagtgtttgctaaaagaattaccactagatgggattttattaagcatttttttattcaaagaaaaagggtaactcattaataaaatgtgtagttgatactaaataaataaatcaactagtgtagttgatactaaattaggagatagtgtagttgatactaaataaataaatcaactagtgtagttgataataaattaggaagatactgtagctgatactaaattctagaaattctggtaatagactctagaaatagatgtttgaaataggtgtttaaaataatattttaaagaaaatcatattcaccccattttaaatccacatagaagcagcagttaacattaaaaacttgtgtccacttccaggagatagtcatggtttaagggtccagaaatcaatggtagaatcacctgaaatttagaacagtagaaatatgtcttcactaaagagtctaaattttttttttttttttttggaggagtcttgctctgtccccaggctggagtgcaatggcacgatctcagcccactgcaacctccacctcctgagttcaagcgattctcctgcctcagcctcttccaagtagctggaactacaggtgtgtgtcaccatgcctggctaattttttgtatttttagtagagatggggttttaccatgtttactaagctggtcttcaactcttgacctcaagtgatccacctgcctcagcctcccaaagtgctgggattacaggcatgagccactgcgcctggcccaagagtctaaatttataggatgtatatgattaaaagtgacttttgtgaacatttaaataaatatttgtgactgaattttctatggaacatttttccttcagtggcttgcattttaatgaaggaattattttaaaattaccttattccctcccaatgttgtttaaatatctagagggtatctagggcttaaggaagattggatgtggaacaatgagtggaggcctagagaacaagggtagtttcctgcaacagttatatggatccctagcaaggttcatatttctgtctatactgctggttaatctgaatattcccataaattgtggaacataatccatggccttggttttctgtttcttgtagtaagatttatcattttatttctaccataaattagagatcattacatgattactatgaaggatctacattgctatttgttatgatcaaataaacagtatttttgcagttgactattcagggatctgttaaagcatttagaccttaggccctcatagcatatatatataagctttttggagacttggctctcactactttgagaatttggcacacagggtaatcaaaaaaaaaagctttcttggctcttgcctgtaatcccagcattttgggaggctaaggcagaaggatcccttgagctcaggagttcaagaccagcctgagaaacatagcgagacctcatctctactaaaaaataaatagtaaaaaattatcccagcacagtgatgcgcacctgtagtcccagctaatcaggaggctgaggtgggaggatcacttgatccagggagtttgaggctgcagtgagctatgattgtgcacactccagcctgggtgacagagtgagaccctgtctaaagaaaaaaagctttctttcgaaatggcctcaggtttatcgatttttaatttaacattgctctacagatttattttgttgagtttttttttttttaagtactaagagtgttttgggcaggggaaagaaattcacagtgtttttttgttgttgtattttgttttgttttctgagacggagtctcgctctgtcacccaggctggagtgtgcagtggcacgatctcggctcactgcaacctccgccccctgggttaaagcaatcctcccacctcaacctccccagaagctaggattacaggtatacatcacctcacctggctaattttttttggtattgttagcagagatggggtttcaccgtgttggccaggctgatcccaaactcctgacctcaagtgatccacctgccttggcctaccaaagtgctcggattataggtgtgagccaccacacctggcctaccacaatgttttttaactgaacagttggctgcagtaagcttttagaagcctacacgttggtatttgagcatacgaggtggatcataatggggatcattaggtttctttgacaggtgatattaagaacccaacccagcatgccacttgtaaaccatctatacatagagacatttgtcaccattgacagttgtgacatttaatctgggatctatttgcaactcagcttcctatgtattactatgtatttaacagtctcaattcaggctcaaagcatcagcttttttcttctagtttttctaggttttacttaacaaaggaaaatagaaatatctgtttactattgaggtgatcatttctcctcagatgagtcatgccagtcacgattcttggatgttgacctcttgtgctgtttttgtagttcacaagccaaagctgcactaaataggattatggaaattagattaatggtccaggaatgaggcatagggctccnnnnnnnnnnnnnnnnnnnnnnnnnnnnnnnnnnnnnnnnnnnnnnnnnnnnnnnnnnnnnnnnnnnnnnnnnnnnnnnnnnnnnnnnnnnnnnnnnnnnnnnnnnnnnnnnnnnnnnnnnnnnnnnnnnnnnnnnnnnnnnnnnnnnnnnnnnnnnnnnnnnnnnnnnnnnnnnnnnnnnnnnnnnnnnnnnnnnnnnnnnnnnnnnnnnnnnnnnnnnnnnnnnnnnnnnnnnnnnnnnnnnnnnnnnnnnnnnnnnnnnnnnnnnnnnnnnnnnnnnnnnnnnnnnnnnnnnnnnnnnnnactaatctaactccaaaggggtacaacaacctcatcacttctaatatgaatacaaccaagatattgtgtgagctgagagtggcagaagaaaactggaaaaagctctctcttagatagccagtgtcacttggagaagtctattcttatgtaaaaggagttatattggtcttctaagaagaaaggttgtcaggaactggcaagcactaaaatgcctaaccaacaccttggagttagagcagtctagttttagaaggcagagactaggagggataatcagtcatagctaaagatagggaatctagaccaaagctcattccagttcctaggattagtgcagaatacaatttattaagctagaacagaagctttgcagtcacaattagatcatcacaacgtacatctggatgtcagaaataattctgcaccctactcttttttttttaagttaaagagactgtctcccaggctggagtagagtggagtgatcttagctcacttcatcctggaacacttgggctcaaacaatcctcctgcctcagcctcccatatagctgggactacaggcacacgccaccatgctggctaatttttttctattcttttagagacagggtcttgctgtgttgtccaggctgatttcaaattcctggcctcaagtgattctcctgctttggcctcctgagtcactgggattgcagggcaccctattcttgatttttattcttcccttgtcaggactagcttagaactgttaccccaactgtataagtaagtgcatccttaactatcaagacccaagaaagatatgagcagagcaaaatgaggagctcacgcaagcaaaattaagacttgaaatgtcagcagataaggtatctgaacatgtctatgacaggaagccagttgcaacttaactactgcagtgctaaattaaaccactgctatgtataccatatttgaagtaataattggatacaaaggtatatggcccttacttcaaagagcttatacttgtgaagtgtacactagaagacagtatgtagaaattttaccaaatttttatcaatttacagtatgaattttaccaaaaaattcactatagaaataatgcatgacttcacatcacactggtgatcagagaaacaatgtattttaaaagtgacatatgaactggtttgtgaaatacaaatgaaattttgatgcaaaatataactagaaatgaccttagatatcagctggtacatcttagaaattcgagaaaaattaagacccactactagtgggataaatgttggtgtacagtttttcttggtgacagcttgagaatacatatcaaaagccttaaaatatgcatatcctttgactcagtaactttacttacaaattaatcctatggaataatttaacatatgcacagatttacatgcaagaatgttcttcatagcattggtcttaaattttttaatttttttaacttctcattttgcagcaaaaaaaaagttgtaaaaatagtagatattttccatatatccttcatccagctttcccaaacattagcattttatataaccagagtacatatatcaaaaccaaggagttaataaataggtagaatttttgtcaaataaataaataaaattttaaaaccagcaaactactatagatgtgatactattattgaagctacagacctttttcagatgttcccaattatcccacttttttttttttttggtccaggatacaatctaggattctactctgtgcttaataggtaatcatattcttttattctgttactatctggcataattcttcagtctttttttctcctccttaacattaacacttttgaagagtactggccagttattttatagaatgtctctcaatttttgtttgactgatgtttccctgtgataaaattcagattatgcatttttggcaagaataccacagaaataatattatgctcttctcagtgaatcatattcaaagacgtgatactaattagcctcgatagtagtgatgttgactctgattcactttacttggttaaagtggtgcctgccagttctctccattgtaaagttagtattttttctttcttattgaataaatatctcatggggaggtacttcaagatacgtcttccatacatacatggattaatcttgcctgaaataattattactgtggtattagccaaagaattatattttatttttattattccttataaacttctcaattcaaaattatacacttattaatagagaagagctttcccctttttttgtttattaatttacwtatgtcatatggactcatgaatattttattctattatttaaaatatattactatcactatttattgtgtttctcaaattgtcgtagatttgaccattggaagtgccctcaagttggttcttatgaacttccaatgtactacagttattttctgacttccttacattctgcgaccacaagatctccaggttcagcttgtgttttccttgccccagccatgaaataggaatttctccaagaagccctggtttcttttattgtacactaagaatttatacacacatctatatctgtgtctatatttaacctgtgtgcgtgtgtgtgtgtgtgtatgtgtgtgatatatatatgatttatttattttttttttttgagaaggagtttcactcttgttgcccaggctggagtgcaatggcgcaacctcagctcactgcaacctctgcctgctgggtccaagcaattctcctgcctcagcctcccatgcccagctaattttttgttttgtttttttttttttagtagagatggggtttctccatgttggtcaggaatggtctcaaactcctgacctcaggtgatccacccgcctcagcctcctaaagtgctgggattacagacgtgagccactgtgcctggccctgtgtatatatttttaaaacatgagtacacagtagtatcacctattgcaatccaataccacagagttcaggactggcttagagctgttaccccagctctgtaagtgcagcctgaaccatcaagaccagggaaacatataagcagagcaaaatgaggagctcacacaaccacacatcctggttaattttaattaagttttttaaatatatagaaaattaccatggttctaaaagtcaagaactattcacaaagatagagtaaaagaagtgtcacttccctgacattactttttcgccattcttgttttagcgttcttcccaccctgttcccacctacctcttgtaggtaaccaatctcagttttttacttatcttttctgtatttcttctttttttttctaacagcttcactcagatataattcacacaccatacaatttccttatttaaagtatacaattctttttttttgtatattcataggttgtgcaaccgtgaccacgatcaattttagaacattttcatcatcccagaaactgtctctctccagcttcacccatcttctcccaaccttaagcaacgattaatctactttctgcctctatgcatttgccttttctggaaattgcatataaatggactcttacaatatgtggttttctgtgttaggcttctttcacttaacataatgttttcaaggttcatccacattatagcatgtgtcagttttttacttctttttattgccatgtaacattctattgcatggtttattcatttcctagggctgccataacaaattaccacaaagtgagtggcttaaaagaacaaaaatttattatttcacagttctgaaggctagaagtccaaaataaaaggtatcagcagggccttgtaccctctgaaaactctaggaaattgttccttgtctcttcctagctactgggctcctggaaatcaattcttggcattccttggcttgtagctatatcacttcagtatttgcctctgtcttcgcatggccttcttccctgtgtatatctttctgtgcccactccttttattttaaagacaccaataattggatataaggcctaatctaatctagtgtgacctcatcttaactaattaatctgcaaagactttatttccaaacaaggtcacattctaaggttccagatggacatgaattcaggggcaacactatttagctttctacatatagagatacaacattttatttacctattcttcagttaatggaatttcattcctgtatttatttatgcccagatgagcagatacatgagcattttcttatttctccttcctttttatttgaaaagtggcatactgttgatatgtttgttttttccttttttcagtttataatatattctggaagttttttcatatcacttcacagagctctagctcattctaatctaaatattcagccatagagaatttattaatatatacataagatggaaattgatttagtattttaatttttatgaacatggaatgatgtrtacaatatattggggatgttttcttctataggttttttaatctgtgttttcaaggtattatattcacacagtatgaaattcctccttctagatgttacccatctaatcagccctttcccagagtgaaccaatgcttccactgaatgtcagctatacacattgttccacaccttgcctttttgcttaatatatcttagagattgttccatttttttatagctgtataatatttcattttcttgtcacatcatactttattttactaatcctcttttggtacacatcttggtatttctagtcttttgctacaacaaatataacagcactatttgcaatgaccaaaataattggaaacaaccccaaaggtccataaagagtaaactgaatatattatatatttatgtgatagcatacataatgaagagagaatgaatggattaccactcaactcaacaatatcaatgaatataacaaacataatgtggaacaaagtcagacccaaaagagtgtatacagaattccaaactaaatagggtaggaatagctcatgtcagaacagcccttcttcaggtagcaattataactcttaacaaaatattacaaaaccaactacctggagacactggagaagaatgaaaatcaggcagaaactgaaggagagtctatacttggaggaggagaatggccttgagtacatttcctatttttatgactctttctctagggccagcccaagttggcaccaagtagcatgcctaaaagttggtagaaaacacgcagtcttactggcttgaagatccagaggaagagtttaggtaaaaagtgagtgaggaaatttcagaaaggagaaaaaccatacagaggtagccctaaattctacatacagaccttatccaaatctctggatgacccctcaattacgcatatgcagagtggattcctagcagcccagctaaggctaaaagaacttaataaagatgtctcattgtccattgctggggtgcagagtttggaatttcattctagccaagtttacttgtctccttaaaaaaacaataataatcccctccttagaaacatttgagtagactgtacaacagaggtcagcatttttatttattttttttttttgagacgagtctcgccctgcctyccaggctggagtgcagtggagtgcagtggcgcgatctcggctcactacaagctccgcctccccagttcacgccattctcccgcctcagcctcccaagtagctgggactacaggctcccgccaccatgcccagctaattttgtttttctatttttagtggagacggggtttcaccgtgttagccaggatggtctygatctcctgacctcgggatccgcccggcctcccaaagtgctgggattacaggcgtgagccaccatgcccggctggcatttttttcttaaaggaccagagagtaaatattttaggttcacagggtactctttcagtaatttaaatatgacaaggagcaaacttgaatataggtatgtagaaattatcaagtgtggaaaatgaagagaaaaaaaacaatgaacatggccgggtgcagtggctcacacctgtaatcccagcacttttggaagccagggtgggtggatttcctgaagtcaggagttcgagaccagtctggccaacatggtgaaaccccgtctctactaaaaatacaaaaattagctgggtgcagtggcacacgcctatagtcccagctacttggtagggtgaggcaggagaatcactagaacctgggaggtagaggttgcaatgagccgagataatgccactgcactccagcccaagtggacagagcaagactccatctcagaaaaaaaacccacaaaaacagagaacagagcttccttgacctttaggacaacagcaaaaggcctaaaatgttcataattggagtctcaaaaggaaaggagctagagaatgaggcaagataaatatttgatgaataatggctgtaaggtttcccacttctggtgaaagacatgaacttacagatttgggaagccctgtgaaccacaggcagaataaatacaaagaaaaccacacctaaacatttaattagactactactgaaaccaaaagatgaagagaagatattgaagagcaaagtagcacattgcatagaatgggaaattatatgaacaactacagattccttacagtggagatcaaaagaaagtggaacatctttgaagtgctgaaacaaaactgtcaacccagaattctatctccagcaatattttccttcagtgatgaaggtgatattaaaacattgttatataaacataagagtatatactatgtgattccatttgtataaagtcaatggaaacaggcctcaagttacttttgatgrggattagtaattgcaaggaggggagggaatttttcaccataatgaaccactccataaattagtaacataaaaaacagcagttttattttctcatgattctccagtcaaggctaggctcagccgagtagttctacttgtcttgacagtggtcacttgttggctacattaaggtagtacgttggctgcaggctagactcattagggatgttcagaactctctatttagtctaaaggccaacatttccagagtcagacttccaatttgtactcttctctgtatgtgtcatacctcaattaaaagcccactttcagactaggtgcagtggctcacacctgtaatcccaatactttgggtggccaaggtagaagaattgtatgaggccagggattggagaccaacctgggcaacacagcaagaccccatctctaccaaaaaaaaaaaaaaaaattagctgggcgcagtggcacatgcctgtagtcctagctactcagaaggctgaggcaaggaggttcgtggagcccaggagttcaaggcagcaacagtcagccgtgatcacaccattacactccagccttggcaacagagtgagaccctatctcaaaaaaaaaaagtctactttcaaagggcaatagataattatttttttaattacaatctaacaaaaatagaataatctaatataaatagaaactacaaaatgttccagaaaatgtaagtattcctgtgtgactagtgtagaattaatataagaaacattaataggtgataaagtaaaaaagataacttagggttagattacactgagatttgagtgcttggctacagagctgggtcttatttgaagggaagtgggaaactattgaagggttttgagcagaggaatgatatgttcaaaacagtggtttaggaatataatcccatgctagtgtacaaattagactagaggagggagagactattatcaaacggatcaatttggaaacaatttagataagcaccaataggaattgaattaaaataatagcaagctaatgaaaaaaagggaataaaatgtattaattctacatctacacagattgagagcctactatgttctatgtacttggtaaaggactgtatatatttttgtctttatagtcaaggaattcacaacatatgaaatgtagaagtatgaaaaaataacaatttgttgtaataagaactataatagatgaatatttaaggtgttaaggacacaagaagaggaagcagccaataatacagaggagtctaagacatgctttagataagatttaaccttacatgagtagttacagtttaccaaacaaagaaggcaaagaacaacattctagccagaagaaacagcacataaaaagtcacaggcaaagaagagtagagcatggtgaattgggggacatagttcactatatctacatgtgcaagctaagcataggtacagaagctagaaagataaggatcacatcactaagggcaaaagacatgaaaaatttggtgactatatgagatgaaacaagatttagtgactttataagaagacaaggatgaccttaatattttgaatttaagtgactagaaggataatgataaacccaatagtaagaattgtataacttatagacacttttcatctgagtggacattaaatacctaggagttctttttatatgtgtgtgaagaatagcactagatgtgtttcatcaatgaaattctgaatataaaataatcatcataggttcttaaagccagtcaacaaccaagaattgatactgaccactggcacagtttttttcaaaaatgacaaactttaaaagaaaaaaaaatgccttgaatgaatgtttttcttaactcagaagaaaagaaaaatctttaactacatatagcttacctgaagaaaaaacagaattgcagaattgctgtgaatgttctaaagacctggttctatataatcaagttaattcctctttcatgtgttttaaaatattgttgatccaagaaccaaccatcagctatgctggaagtctataattatgcattgatatatgagaaggctatcattctctacagacgactggtaccatccttagcagaatacttgaggctgcttttggtttagggaatctgtagctcagagattttcctagaaagtaacctctgttgttcaaattagatagccatttgtggagacaaaacccactgggtataggtagtattacctgaatcactaaaagataattgattagaaatccaaatcaaaccttgagactgctgagtctagatgagtggctgcctagggatagagggcaggaaggggtgggaccttacaaagacacatgaagaaacttttagaattgatatgtttgttgttttgattgtggtgatggcttcatgagtaatacctattcaaacttttccagttgtacacttaaatagtgcagtttattgtatgtcaatcatgcttcgataaagatgttagcaaaggaaatgactttcatcttagaatggtcagataaactgttttaagtgctacaccattatccatataaagaagagatggccatttaaaaatatttatacaagacttgaagcaatgtaggtaacctgaggtataataaattgagtgtcttgatatttagagtcctgatgtaatacactttattaagatatagatttgtaaatttatgctaattctggatgattatttttcttgagttggtttctatggactgaatgttaaagtgggttttaagcaggttttatataatatatcaataccacattagcttgattttttttattgcgagagatgcagaaagatcaatatcttacatgctctatatcaccataaatactttcaataaagcttttttggcctggtagggtgactcacacctgtaacctcaacactttgagaggctaaggctggagaatcacttgaggccaggagttcaagaccagcctgggaacatagtgagaccctgcaaaaaaaatatggaaattagccaggcatggtggcacacgcctgtagtcttggctacccaggaggctgaggcaggtgatcacatgagctgaggagctcgaggttacagtgagctatgatcataccacttgcaatgtagcctgggcaatagagtgaaaccatgtctcattcaatcaaacttatttgaaccttcgtacatttttgcttttattaatgagcttttcttttaaaatcagacttttaatggctttctggcagtgtcatcctggttgtggttgagactaatatgagctctagtttgtgttttttgttattgtttttgtttgtttttttgagacagggtctctctctgttgccaaggctggagtacagtggcacaattacagctcactgcaaccccttcttcctcccagactcaagtgatcctcccacctcagccttccgagtagctgggactataggtgcacaccaccacacctggccaatttttaaatttttttgtagagacagggtttcatcatattgcccaggctggtcttgaactactggactcaggtgatccacccacctcaacttcccaaagtgctgggattataagcatgaaccaccatgctcagctgagctctaattactgaagattaattctataggttgaacctggatatgttagaagacataggggactttcataaagaagttcaaattagaatatgtgagataggagaattttttaaaagaattgttatttgatacttagggtgtagtcatatactcttaatattgctagagtgtaaattggtaaaagttttcatatccttttatacagcaatttcagctcttggaatttaaataatcaaaagtctgggagcatctacatgtgaagacattcatgtcacttttatgtataatagtgtagcaacttgaaactatatatattatgttacatgaaaaataaactaacacagtgggttcattcactttgtgaaacttcatcacttatttgaggactttgagtataaacaaatcagaatataaaattacctgctattacgaagtagcaagagaggctgggcacagtggttcacacctgtaatcccaacactttgggaggccgaggggggcagatcacttgaggtcaggagttccagaccagcctggccaacacaataaaacccatctccactaaaattacaaaaattagccgggcgtggtggcatgtacctgtaatcccagctacatggcagactgaggcaggagaatcgcttgatcccaggaggcagaggttgcggtgagccgagatctcgctactgcactccagcctgggtgacagagcgagcaagagcaggcgagcaagcgagactccatctcaaaacaaaaaacaaaacaaaaacaaagtagcaagagtgagtatgccagtgtgctgggggtaagatgatttaratactctgtattttccatgtcttattttcatactttaaaaaacatatcagttgtttctaaaagaacatattccttttagttacaaacatatacattcagcaaccctaaagtagcatagactactactggctgaagctctggggttttattagtacagtgatgacttaattaacaaatcctctttgaacaaagcctcttcactcaagactggccttggtgcagtaggcatgagagaaggaccagttttctctgagctagatcggtagcagcagggactaatgaggcagggccttgaaagtggctctctctcagatctaactcctcagggactggctaaagctgaagctgagggtactggtgcactcctgggacctacacagcctggttacccaggtgttgaaaaaacagtttctgtgccaacaccatatgtggcttttaagagactcggcaggactcttgctttaggcagagcattccttgtgtggaatgagtaagctggaaaataacaaagagggaatcccatgtgctaggaagcttcctcttgtcttctgtgtgctccgtgtactgctttttcrattctctgggccttattttgttcaactataaagtraaaggagtagctaaaaaatctctaatatatctttcagttctaatagactacatgtttaaatcaggaatcggcaaactttttataaagggtcaaatagtaattattttctgctttgcagggcatactacctccattgcaagtgctcaactctccctctgtagcgtgaaaacagctgtatataaacaaatgggtgtggctgtatkccaataaaactctatttataaaaataggcagctagccagatttggcccacaggccatattttaacaagcccaggtctagatgttaatgtaatgggaatgtcatattaagagaattatttgatgaataggatataattcttatttcatagagaccattctctcagactttttatttttaaagcgtaggcaaatataaaatattatttcactgtcaggatgtaataccatgggaaaaagattaaaaatactctggcaccaaactgttgtagtaaattatctgaaatagagcctttgacttcccaattaaggaagaaaatggtgtctgcaacacctgtgactgggttattttaagtcttcaaaagttaggggcctagtagaagagagtctcaagggcttgttcattttctttctcatcaaatgggccaaatcatgcttttcatagtagaaggtaggctgtggaccctttactattttatttttaaatatttctcttggctaggcataatggcccatgcctaaaatcccaggctgaggcagaaggatcccttgagcccaggagtttgagaccaccctgggcaacatagcaagaccccgtctctactaaaaaaaataactttttaaaaattaaaaataaataaataattttttggtggtccagaaaggggcagctgccatgctttgcaggtttcagatccccatctatcttgggttgggtttctatcttggtcttaagttatcagtattctaatatggagataagtctgccttcactttggagacctttgttagttcttccatgtcaggcttcagctagtatagtttgtctaatgcatttatataaaacttgtttccaacaatgaaaaagcaattacaggttgggatatgtaattcaggcccattactacataaaaggatcagcacagtggtactttatctgactagggaagtctaaaatattcttgttggccagcttgctttcacataagcactgttcgggatcttttctaagttgcagaacatgaattccttattggcctatcccactagccacagctgtgagcacaacagaactgacacatacctggtaattataccttatctaaagtgaacagggccaccttcccagcatagtgacagctatagcccttaatctaatgcagtggttctcaaagtatagactcactgggggtgccctttctgaggctctttcaaggaatctcttctatgaaatcaaaactacttcacagtaattcaaatatattatttgcctttttgactctcaatgacagtagagttttccagagactacataatgtatgatatcacaacagattgaatactgaagcaaatgttaagaatccagctgacttctgttaaccagatattaaagagattagcaaaaacttaaatgtcatactctctactaatatttttgtttggaatatatagttattcttatgaaaatatgttaaaatgtaggtttattcagaaattttctgagatcattttattttctaatacagtaaatattaataaatatgactcacacaaaatctatttggagtcctcaatttttttttcttttttttcctggcttacattttttgatgcactcaatttttttttttttttttttaatttaaaaagagacagggtctcactatgttgcccaggctggtttcaaacttctgggctcaagcaatcctcctgccttggcttcccaaagtactggtattacaggtatgagccagtgcacctgacctcaataattttttargagaaaaagtttgagaacccctcctctaatgtaatacccttagttgcaatactctgatctcatggttactgatatcatctttaccatattccctcttataaaatatttactaaaattatccccagagataacccttgttaacaatttagtgattacttctagacatctttctactgagtgcttgcattcacacataatatatatacttttacatttattggatcatactgtggtctttcaaaacttattctcctgagtttaatttttctacctgatcactctctgaattcttataaaatcttaagttcytttttttttttttttttttttttaagacagggtctcactcagtcactatcacccaggctggagtgcagtagcatgatcatagctcactgtagcctcaaactcctgggttcaaaggatcctcttacctcagcctcctaagtagctaggactacaggtgtgtgccaccatatctggctaactttttttatttttagtggagacaggcatctcactatgttgctcaggctggtctcaaattcctggcctcaagcaatccacccacctcagcctcctaaagtgctgggattacaggcatgactcaccatgcttagcctaaatcctaaggtcttaaaattgaaagggacagaggggtcatcttatctcattcccaactcaagtcagaaaccctctctaaaacattcacaacctgagaggtccatttaatttggttttataaaccctaaattgttagaaactttttccttctcttggacataaatttgccttcttgatcacttttacccataggttctagttctactttgggaaactatatagaatgcatcttatctgtcttcactgggcttcattgtgggtattttcttctgttctatcttccagttcactaattcttttttaagttgtgtctaagcttctattaaaactatccactaaatttttactttcaatttccatttaaacctgttgtattctagtcctctgttaaaattctcgattttatctttaactcttgctatttcaaagtttctgtttgttaagttcaatatctggaactgctttattaagctgtaatttctgctggttttaatttcctgcttgcctctttgtattactgtttattttttattgtgggtgatatgttgtatttgcaaaattgcttatagaaataatttgaagtataggatgattcatgtttgcttttggcaggcatggggacattggcacactatatttatcttcatctaagtttaaagatttagatgattagaggctaagctacaatcccttgtctaggtctttctactgcctgttcacacacccttaatccttttgattcccaccctgagataaggagattttaactaggcccattactcttgacagactgggttccagactttgtcctcctagcatcaaacaccagactcacttctctgggtttctatcatcctctgtattatagcctggtaattcttcattcttttgttaggacttcaatgccttcaaacagattttttaaaaatatgtccagatgttctaattcttgataagacagttggtctgaattacctaggctgccattagtacctgcaacctactttaatccgtattaatatttttctgtccttctggattgcttgggaaactgttaaagagcaggaataaccctgaccaggcatctgtaccacattcaaccagatgctctgtaagagctcctcttgaaggtttaatctgatattaatcagataggaagtacagttcttatgaacagattcagtcttcccacagggatgagttcagttaagaggggcaatggatacggtgtacagtggccccattttcctttatgtttatattctagtcttgtaataaaactaatgctcagaatgaaaggtctcaatttaggatttaaaccaagtataaacaaaaagttaaaacaagctattgttcaaactttgacttaagtgaaagaattggtttttttatttgtttgtttatttttgaggcagggtcttgctctgccacccaggctggagttcagggatgcaatcatagatcactgtaacctcgaactcctgggctggagcagtgctcccgcctcaggctcctgagtagctaggagaacaagtgacaccacacccagctaattttttaatttttttgtagagatggggctttgtatgttgcccaagctggtcttaccttctggcctcaagtgatcctcttgccttggcctcccaaaagtgctggaattgcagacatgagccaccatacccggcctggttttattttaaaaaacacttttgctgcccttctgtaaaatgttaattatatgtatgcacattttcttttatctggtgcttctctaaattcctttagcccacgtcttatccaactagtcatgtgggaatttcctctttggggaattaaatatttaatattaacttctaggtagtacagagcagcccactgtgtttcacttttgtattattcctttgttagcactaagttttctgtatcagcttgtctagaatttttgtttcaaaattgtattcttctaatttatttgcagtttttctcttctaattgtttaattgtccatcccctaccccctgccccaaggcaaatgtactgtcttttatccatatgtgcccataaattctaaactcaaagatttctggttctcccttatatttatggtatttttctacttctctgttcagtatatttttgcaagtgtttcagttttcttcagtgtttgaggttctctagtgtgtcatttcattttcatgcatcagagtaattcctaccattcttatatggagtctcttacctgatgattttttaattagtaaagtgcaatattgaacaacattgaagattttatttcttaatctaaaacataatatttatttaataatgaaatggaaatataggttttgtgaaagggagaaaggtgtttctctaaatattatacctgtgtcaaaaagctgcaagtgctactaccactgttttgtgacccctgaatgatttctgctttctttatattaatacttactctaatagtaattgaactcccaaaaagatcacaaagtccccaattgctagctttataaatacattgatgtgtaccttgtttgatgagataaaagcttcagtaagtgatatccccacctgtgtggttaatttcaaaatattgtttgtctaatacattgttgtcagtgacaactgaacaagaacttttagaagcagttggctgtccattaatggcagatttcaaggctatgcaaattgtgccagttcagccctgcattttttcgatattatcatatcaattgagtcagttcagagtagacaaagcaaggttatgggaaccacctagagcatcatgcaccatttaacatcaatgcagcatacatgaacatctgcaacttcgatcttattaacagaggatagaatggaaggcagtaaacagctttcttcatcacttaattgcaaaatagtatttcctaatgtttgcattgtttatcaacacgaacttcatcaataattgtataattatggttgcctagatcacagtgccctcatgcatcttgtcacttattatagagtggtctgagtttaatttgaatttgaacacatgatacaaggataataatacaagttccttgaaatgtgagttgcataatacaaaaattttgtgtagtaggagaatggcaagttatgattcttcagtcactttggggattaacacaaggaaaaacaggactgaaaggcagtgaaagatgaggggaagccactagttagattcaaacatagacccattggacatgagagtaggttatgttccttagaattaatcatgagtaattcgatgtttgctttaggcccaaattgagctgaattaaaacaggattattatgcttaggtcttcccttcagtctctgtagttaaagagagaaaatggcagaaaactacaaatatagtgaggaaaaagctatggtggccaaagttaaaaataccacatgctgaggaaagccttgacatagctgctcagccttcattgctgttgcttttgaagcctgataatgccacactactcctaattagcaaatgttagtattacagtaagcaatcaagtgcagtcttcaggctttgtggcagcagtttcgcagtgcaaaatattgaagaaaaaatgaaggaaaacaatataagctcagccacagttattggtgtggtcagtgggagttgtctcacaagagagcaggaaaaggaaaatgtgaaaaacagtgggtgcatttaaagcatgtaagacaagagctggctagtctgaaaagtttgtctattttaatcatgaaaatctcacatttttacttaaatccattttatatttaaggaaaaatctaaggcttgttcatgaaattacacttgaaatattttaatttgtggttagagtctcctccccatctcaaattaaaaggtattaaattgtatattgagtgagctccgtttgtactcagctcttcccaattaataaacatagtcatttccttaaaaaaaaaaaactctagagttagaatgttttctctcactaattagtctgtatttatgcctttaataattatctgttcattttctagcagcaaatgtttgttctcagattaaattggagraggaaggaaaaaaaagatagctacccacagtatagtatccacagacgatatagagttatgtccctctttgtgtggttcttgagtataatagacataacagaagctttcttaatatgatagttaatctattattttctgtatttgggggatgctaagaactggtttactagaggtaatagtttgatctgtagttatttatgttaaaatacttttttaaaaggtaattacagcttctactataaacttgaaaaagttggtctaactctgtgccgaatgagcggggagatattactatatacatacatataagtgtatatgcctcttacctgaatacctcagggagcacacttttctgaaccagggttttgtaataaatgtgtgtactactaattctgacacatgtatagttctcctttaaataacttgtatgcaaacgttattcagaaacgtcttctaggagctatttatcaaaactgctataataataactttgtcctaatgagtttcagtctctgtttagggagtaatcgataaactacaaattaatgttccataattcacattataatgcacatataattattttgagatgaggcaaaccctatgcatttaatttacagctataattaagtaagctcatttgatactaattaagtaagtctaaaaggatcataggtttgtgtatttaattatcaaggtacaatcagcaactaattccttgaaaagctttcctatcttcagttcaacactgatctcagcccacactacaatttatcttcttgcatcttcaatagattaaaatgcattgtgaattgtggagaatctacttggtaagttagcttctttatttaaaaagtatatatatgtatatatatatacacatacataggcttaagaatacagaaattctataatctggcaaaactgtccttaagaagtgaaggagaaattaagacatttccagataaaagataaagaggtttattgccaatagacctgtcctacaagaaatgctaaaagggaatgcttcaggattaaatgaaagaatgctagacagtaactgaaagccatatgaagaaataaagaactcctgtaaaggtatctatataagtaaatataaaaaccagtattgctggtttgtaactcttctttcattcatgaaaggaaaatgcctaggccrggcgccgtggctcacacctgtaatcccagcactttgggaggccaaggcaggcagatcatgaggtcaggagatcaagaccatcctggccaaaatggtgaaaccccatctctactaaaaatacaaaaattcgctgggcgtggtggcacacgcctgtagtccctgctactcgggaggctgaggcaggagaatcgcttgaacctgggaggcggaggttgcagtgagccgagatcacaccaccgcacttcagcctggtgacaaagcgagactccatctcaaaaaaaaagaagaaaagtgcctaaaacaataattatatgttaatggaaagacatgtaaaatatgtaatttataacaacaacataaagagggaaacagagctgtataagagcaaggttttttatactgtccaggctaagttggtaacaattcaaactagattgttatgaatttaggattttaattgtaattgccatagtaaccactaagaaaataagaaataggtcagggcgcagtggctcacacctataatcccagtgctttgggaggccaaggcaggcggattacgacgtcaggagatcaagaccatcctggccaacatggtgaaaccctgtctctactaaaaatacaaaaattagctgggcgtggtggcacgcagcctgtagtcccagctacttgggaggctgaggcaggagaatcacttgaaccccggaggtaggggcaggagaatcacttgaacctgggaggcggagtttgcagtgagtcaagatcgcactactgcactccagcctggatgacagaccgagactccatctcaaaaaacaaaaaaagaaataaaataagaaataatgaagttttctctagttttgttaaagtagtatataaaaattagattattagaaaatacacttaatygctagcttagaagtcttttaaattctactgtcagccgggcacagtgtctcacccctgtatttccaacactttaggaggccaaggtgggaggatcacttgggcccaggagttcaagaccagcctctgtaacatagggagaccctgtctacaaaaaattaaaacaattagccaggtatgatggcaagcacctgtcatcctaggtactcaggaggctgaggtgggaggaccacttgagactgaaagattgaggctgcagtgagtcttgattgcaccactgtactccaacctgggygacagagtgagaytctatatcaaaaaaaaaaaaacaaattctgtcagtcaatcaactaatattcaagtatttaatatagtaggcttcctgctaagtttcaacaattgtctccatttcttcccactaaattttttaatgtatagtcaagaaggaagagctatctgatgtctagagtgacattctagtgttgggaaatgctagataagatgttcacattttcagatttcccagccacatttaagctcaaaaaatatgaatacttgtccccatgactttcctgaaggtctaaaagatatttctgtctccatcccttcaaaaccaagatacctgattgtgaggagtagaagacccctatatggtccagtgtatgttctcttcaatctcaaagcgtgtttagagtattgccattgctatcagaaatgtgaactttcccctcagatcctagattttcagattaagctaatcttagaacatgggctttcctccttccttatcagaggccactgtggtaaaatattatagaaagtaattgttggccagtcgcagtggcttatgcctgtagtcccaacactctgggaggctgaggcgggcagatcatttgaggtctggagtttgagaccaccctggccaacatggtgaaaccctgtctctactaaaaatacaaaaattagccgggtgtcatggccggcgtttgtggtcccagctactcgggaagctgaggcaggagaatcacttgaacccaggaggtggaggctgccaagatctcgccactgcactccagcttgcgtgacagagtgagactctgtctcaaaaaaagtaataataataattgctaatacctaatgttgcgctttacagctcacrtagaacatttacttatattatctaaaatgaggtattaaaatagatgaacaaactgatatctgggctgggagggagttgttgcttcttttatttctttggggtactactagcacagcctgtcagtacattaaaaatagagactttttggcattactttgttttttccaagattaactagcacaacacaaatttcttgtgcctaggtgtaaccagtgttgagacttcacataccacacacaattaatgacatcaaccttgcagtactgacagcgatatcatgcccagtttgtatatggtgtctgggtcatctgaggaagttaaaatagtattgtgatctgtgaacaggccaagtctagcaggtgccatttgcatagactagaatataaatagtatcctctaaagctatatgatgtaatgtccctaaaatgaattatctcccatcttctttcattctcagaaacaaaaatactgattcttgtattgtttgatggaaaactattagttgttcaacataaccagcaaagtataaagacttgacacctaatggcttctgttttctctgagagttagaattagtatgtagcttaagaagagctgtaggcatttagaatgatatttggggtggtggtggggaaatggaggcatcagctagggatagtttagaaccagttctaaattgagtggaattgccaaaattcggtatggtattggataacaaatatggcctattttgacacagggtcttaattttttttttaataggcttgtgccattcttcttaatctaataggcattggcaatccctaattacggagaactggtttgtctagtgacatcccaaacataggaagaatgtttccttctttaaaattttttgatagacacttgagtcaaatgaagaaatcccagatgaaaaattttagaaaggacattctactctcctgtagaatgggaaaattgtcccattcagctagttgtaagccaaaggagaaaacttaaggggttgtattatgcagctacatttttgaactgataacagttacccttccctgtcctttcctgcctaaacagatcctgatgctgcaaaccaacatttctttctttttttttatcactgttgatgaaggttatttaaaacagaatcagtgatatgttagcaaatattttatgactggctttcaggaaaaaagaacatagattcatagcaattgtgtcatggtttaaatactcccaccatcaatgtgaggtcactgaatgtagatttgagaagagctttgtatatgcagaattaattctcattagccaatctgagcaggctccagcacaccactgacagttaaaagaggtggatgactgatgtgagtaaccacatgaatgaatgtcaaaaacattatgctaaaaaaaatgtgctgaggtaagaagccagatataaaagaacatatactgtatgattacatttatttgaatttagaacaggcactattaatttacagtgatagaaatcagatcagtagctttttggtttttgttttattgagaaggaatttggctatgaagggatatgaaggaactttctttctttctttttttttttttttgagacagagtatagatcttgtcactatgctagtagcgccatcttggctcaactgcaacctctgcctcctcagttcaagcaattctcctgcctcagcctcccgagtacctgggattacaggtgcccaccaccacgcccaactaatatttttgtatttttagtggagacagggttccaccatgttggccaggctggtctcgaactcttgacctcaggtgatccacccaccttggcctcccaaagtgctgagataacaggtatgagccagcacacctggccaggaactttcttagatgaaaatattcatagcagcattacccaatagaactttctacagaactatcaacataacaattgtattttcaatctctgcttaggaaaaataaccaaacagcaatttaaagatagcctgtaggccaggtgtggtggctcatacctgtaatcccagcattttgggaggccaaggtgggcagatcacttgaggtctggagttcaagaccagcctggccaacatggtgaaactccgtctctgctcaaaatcaaaaattagccggctgtagtggtgggcgcctataatccaagctacttgggaggctgaggcaggagaatcacttgaacctgggaggcagaggttgcagtgaactgagatcgcaccactgcactccagcctgggcgatacggcgagacttagtatcaaaaagaaaaaaaaaaagcctaatagtaagatggaacccagtatgctagtatatatttaacagtcagctcatagcaaaccaagccctagtttgttgtgttttctaatttctatggtgtaaatactctcaccatgactcaccattcaaactaccaagatgaaggcattgaatggtgagttggaaagagaaatgtacgatcaattcataagctggtgtgaactcagtttctgaactgcttctacccgtcactattattgacggactgaattttcttggttttagtttagttctttagattattcaatctttcccagagctgtgtctttgcccagagactttattgaacctcagagatgtctggctaggctgtagctcaactttagatcctttaacagaaggaagaacacgagggctgagtgcggtggctcaggcctgtaatcctagcactttgggaggctgaggtgggcagatcacttgaggtcaggagttcaagaccagcctggccaacatgatgaaaccctatatctactaaaaatacaaaaactagttgggcttggtggtgggcacttttaatcccagctacacrggagggtaaggcaggagaattgcttgaacccaggaggcagaggttgcagtgagccgagatcatgccattgctgtccagcctgggtgacagagcaagactccatctcaaaaataataataataaggaataacatgcgtatgatccttaaaatatttctgcaactttttttttcccctggtgctgcagcttctattcgtaaagaatggtgaggaacacaaccaagctttaaaatcagtgtacttgagaggttttgttgttgttgtttttacaggtaattaaccatatgttacacattttaatctgcttttaagtgcaagagagattggcaaatgacttaataaagaaatgacttctgcttaaattggataaaatggttgtttactggtgtttattgctgtattccaagtagacaagtaatctgtgaatccagtttagtttattggacaataaatggtactcagaacttttatcagtgtttgattgtcaggatgcccattgaaattgacttcatacttagggaactttaattttattgtacagtatgcactgttaaaaaaaatatccttgtctttcagtataaacctatgacattgccttgtggcattatcatccctgagatgctttcttgctctaagatttcttctatgtcataaagaaaaaaggaacttttggttccttcatatctaatgcagttttttcttttgtaaactctaaatattttccattgccaccatcaacaattcaaataacaatcttactgatggaaagtccatgattagaaatagctgcttcttcaaaaataaagaactttgtatgtacctatccattttgaaaatcttaaccattgtgctcagaaggagagatatgattttaagaagggtcacatttagaataccaataatgtcctactcctgaaataattgggaccaggccgctaaaaagaaagcacctgatgtttggcctttcagtattttctataactatgacgccttggtccaaattatctaataaatgcttcttcctattctcccgccctaagagtccatggtctctttataaagaagaatcatatacatacagatattacttgaatttatatggcatcctcatgaggtgaatcccacctatgtcacttaggattcatttgattgccctggtttgatccaattcaagtattaattcaggccaggtgcaatggcacatgcctataatcccagcactttgggaggccgaggtgggcagatcacttcagttcaggagttcgaggctagcctggccaacatggggaaacccccgtctctactaaagatacaaaaattagccgggtgtggtggcaggcacctgtagttccagcaacttgggaggctgaggcaggaggattgcttgaacccgggaggcagaggttgcagtgagtaagccaagattgtgccactgcactccagcctgggtgacaagagtgagaccctgtctcaatagaaaaaaaaaaaaaaggccaatatgggcccagggcctgccattcagacttccgcttgtggcagagaccaagggatggcagcaggttagtcgcaggtgaagtcataacaagcggtgtggagccgcacctgggcaacatgtcggaaggaaatgcagtgagcgaacccagcactctgcaagggccccgacccctcctgactggggcccaggagctcagcaggcagcgactggcaccccttcaccccgggccgccttcccttcatccgctctgggaaccttaccctgggggttgaggttgggggtcaagaagaaaaccttcaccccaaatatcatcagtcagaagaacccaaggaagaagtaaccgtcaagaaggagaaacatgaaagggacagagatggacagagacaggtgcatggacagggatgaggccacccagaagtgatccagtctcactccatctttgagaagggcccagctgaaatgatgaagaaaaaaggaactggaataagaaagtgaatgtgtcagacatgggaccttctcatatcgtccacatcaaaaaagagaagaaagagttggacgaagacacgaaacatctcaccatgctgtagaaggacgatttcattgatgaccctgggctgaggaatgacactcgcaacatgcctgtgcagctgccactggctcactcagggtggctttttaaggaagaaaacaatgaaccagatgttaaaccttggctggctggccccaagaaagaggtgggggtacctactgtgaaactgaaagaggagctacaagatgaggaggaggccaagataaaggctccttccagagcagccaggaagacccccgggcctcccgaaggacatatccgtggcagagctgcccagggagctgagcctcaccaaggaggaggaattgctgttcctccagttkccagacaccctccctggccacccacctatccaggacatcaagcccatcaaggcagaggtacagggcaaggacagagaggtggtactcatcaagcaggagaacgaccaggaagccaggctggcaaagaatgcttctaccctagctgacctgacagagggtcaggttggcaagctgcccatctgcaagtccgaaagggtgcaactcctcctgggcaaggtgactctggacgtgaccatgggaaccgcctgctctttcctgcaggagctggtgtctgtgggccttggagagagtaggactggggagatgatagacctgggacatgtgaagcacaaacttctgtgttcccccgattttgaatccctcttggatcacaaacactggtaaaatgatcagatggaggaggatggcggctgctgtctgctccagacattttgttctcgaatctctgcaacccaggagaggccagttgagcccacccactccagcctttggcagccattgtcccagtttcccccagggcccacagggcttcctcccacagcagctgtgaatggcacagttaccttcccacagtgtgaagatggtacatccttgctgctggggacttgtccatgctatttgtttttgtatttatattttgtattttgtcttaatctcttcaactgactgcatcctcccaagggaggagggaggatctgtgggaaggtgcaggcttttggtggctgttgggccgtcaggcagcaagtgtgaggactgcagcttttgctggtgctcccttcttcctcccagaggcagtataggagagagagcaaggattgagtctgagacttaagcatggggtcccaactcatcagttcctggttctgtatccttgcgcaaactacctaacctttctgagcctcctgttcctcatctgacaaaaatggggatgatacctacttcacagggttgacgtgaggattacatgggatattatagatgaaaactccttgcacaaggccagaaccagtagccactcaataaatgttaatttccttttaagtaaataaataaataatcaaatgttaattcaaagtcccacatgagagcgttctgtgttttgtggtgtttgttttgttttgttttagagacagggtctcattctttcacctaggctggggtgcggtggcacaatcacagctcactgcatcctcgaattcctggactcaaaggatcctcctgcctcagcctcctgagtagctggaactatagacatgtgctaccatacctagctagtttttttttttttttaatctgtagactgcctctgtggacagtttttcaaattttttgtagaaacagggccatgctttgttgcccagactggtcttgagctcctggcctcgagtgttcctcccaccttggctgagacgacaggtgtgagccactgcacgtggtcagccttctatctttaaacaggatctgaatctagattcatcaactcataaatatgttctcatttttaaatgatggaatgatggaaagtgaaarcaccaatcaaatcatattttcattatttccagaatgtgttcagcacagttaggtctggaaaggtttttgggaaaggttgtgcaaggttgaatttattcactgttgaaatagcacctctaaatttcaagcaattgtatgatttacttttatacaagtgtcagaaatgctaaattattaaatcccaatggcaggatcactgacaactagaaacttgagtttatttgcttccgtggtttactaaactaagctagagaaatatagtacagttatttactacttaagatcagccagaaaatgtatagtgagttcatactgtactagattctgggagataatcaaatgtaaaacatataccagtctcaaggaagttaaaatctagtaggaataatcactatattcagcaataattgttaattgagcacctactctgtactagatacagtactaagagctgggaataagattaagtcataattcctacctataaggagttcaaagtttagttgagaagacatttgtaaagaagtaattgtaactatgatagataccttcctggaagtatgtgaaggttataagtgatggcataaaagagaataatcagttctgcttggaggccaaggactatagccaagaagacatgccttatttggaactaagagtgaaagacaatttgaaatgtagacttgatacatacacaagaataaaagatcatggcacatttgggacatcatgagtatgaccaaagagtaactgactaaagttactcttttggtcagggaaagataaagtttgaacaataggctggattcatatcctagagttaagagttcattcaatagagaaccattgaagagtttttaacaggggaataacatcagatttgtattcatgaaaaagtactctgtttattcatcatatatttattgagcccctataatrtaccaggcatagytctggatgctagcaatcatcagaaaaaaatattgccttttctatagctcctcttacctaggcagccaagttttgygccctgagccctagctcctttcctgtgctcagctgagtgaatcagggttaggaacataaccaaaggtagacagtccatagatggtcagtgagctatgagctaaaacagcagaggaaatcagttttttgtctgtctgwttttgatgtaggatctccctctgtcacccaggctggagtgcagtggtgctatcatggctcactacagccccaacctcctgggctcaagcaatccacccaccttagttagcctcccaagtaactgggactacaggcacgcacccccatgcccggctggcttttaattttttttgtagagacagcttgttgtgcaggctggtctcaaactcctgggctcaagcgattctcctgtctcagcctcccaaggctctgggattacaggcataaatcaccatgcctggctggaaaccagttcttcagataagagagtgcagcatgtaacatttaaagaagtagagaccaggttgacatgaacagctttatagtaagattaaagtgatatgcttcatttagtgaacctattaaagataacagaaacctcgttaattcattatacacacacacacacacacatatatacacgtgcatatatatatgtgtatatatatagtcaggtgcagtggcccacacttgtaatcccagtacttcgggaagccaaggtgggaggatcacttgagcctagaagtttgaaaccagcctaggcaacatagggaggcccatctctataaaaaaaataaaaataaattagctgggcatggtggcgcatgcctgtggtcccagctacttggaaggctgaggcaggaagatcacttcagcccagagctcaaggctgcagtgagctgtgatggcaccactgcaccccagcctgggtgacagagagagatcctgtctctaaaaaatttcttaaatgcagtcacacacactaaacaaaggggaaataaggttttagagcagtaattccatctatcattgttttcttggtcatttttccatggaaaactatttttgtattcaaagtcaacactcattctcttatatgtttacattcagaactgaagaccttaactggaattaacttaaaacatttgtagaaaatcagatgcaaacatgaacaaactaagagattttaccacaaacaatgatgtagaggcaggtagtctgcaaggtcagaaccatgccttcagaagcagcaattttaagtgagacctgaatctcctatactcaaaggtcttgcattagtcaggattctctagagggatagaactaataggatagatatgtatctatataaatgggagtttattaagtagtattaactcacacaatcacaaggtcccacaatagaccacctacaagctaggagcaaggaagacagtccgagtctcaaagctgaagaaagtctgacgttccagggcaggaagcatccagcgcaggagaaagttgtaggctgggagggtaagccagtctggccttctcatgtttttctgcctgctttatattctctggcagctgattagatggtgcccaccaagattaagggtgggtctgccttccccagcccactgactttggcaacaccctcacagacacacccaggatcaatactttgcatccttcaatccaatcaagttgaccctcagtattaaccatcacaagtttcatttcaagattaataatatccttgtccatttaatcataaaaaggaatgcttattatgtgccaacttttccaagtgctttatatgtattaactaatttactcctcasaaaaatcctgtaagtacctgcaaatgctattattgttccttttttctttctttctgagacaacatctggctctatcacccaggctggagtgcagcagcactatctcggctcactgcaatttccgcctcctggactcaaaccatcctcccacctcagcctcccgaatagctggggctacaggaatgcaccaccacacctggctagtttttttgtatttttttgtagagatggagtttcgccatgctacccaggctggtctcgaacttattagctgaaacaatctgcccatctcagcctcccaaaatgctggggttacagacacgagccaccgtgtctagcctcctattttaaatatgagaaaattggcctggcacagtggctcatgcctgtaatcccaacactttgggaggccaagttgggaggattacttgagcctaggagtttgagaccagcctgggcaacatgacgaaaactcttctctacaaagaatcagctgggcatggtggcatgcgcctgtaatcccagctacctgggagtctgagataggaggatcacttgagccagggaagttgaggttgcagtgagccgagattgcaccactgcactccagccagggtgacaaagtgagaccctgtctcaaaaaaaaaaaaaaaaaaaagaggccaggcgcagtggctcatgcctgtaatcccagcactttgggaggccaaggcaggtggatcatgaggtcaggggttcgagaccagcctggccaatatggtgaaaccccatccctactaaaaatacaaaaattagctgggcgtggtggcacgcacctgctgtcccagctactcaggaggctgaggcagaagaatcgcttgaactcaggaggcggaggttgcagtgagctgagattgtgtaactgcactccagcctgggtgacagagcaagactctgtctcaaagaaaaaaaaaaggaaaaaggagaatttaatctgattaccagattgtaaatggcaaatctggaatgtgaacccaagcagtctgacttaygcacttaaccacagttatactccctctactctctatggagaatttatcaacttaatttagtcaaatttggttatcagtaccaggcttaagggaatttaaatgtcagttaactgctgtgtaacaatgaatcaaaatctatttattccatcatcacctttttttcaggaaaatagtagcaacattacttgaatgacaactttgggatcatattttactacttctctttcattcatttgtcccaaattcctgcctttgccatgggactctaggcagttgacaaactctgtgagcctcagagtcatcatttataaaataaggttagtgataccttactcwtgtgagaattagatgagataaagtatacaaagcatttgatgcagtgctttttcactcagataactaccgttgcattccattgcctgatgtatcaaatccaaacttttgcgtggctttcaaagtctccctagaaatggctagatcccacccatcttgatttatttcttgccttacttgatatataaactttcttctgtctctattcctcttgggacatacacacctttcttttcctctctttttcattatccacatgtttaagacctagtttaagttcagtcttctccgtgaaagcatctccagttaaactatattgttctttcccttttttgaactcctgttgcagttataatagatgttacattgtgtgatatttcacaaattctttgatatatgctaggtttctctttccatctagattctaagctccttgagaagatagatcatgtcttaatatttttcctgtatctcccccagaggatctaacagagtatcataactattgttctatgagatctaatgagctcacagctattgttcaacaaatacttattacctgattgaagaaaataagctcctaaaaatacctgataatattatataggtctttatattgtcagggtgtttttataacactgttaatacttaatccatataatagtcacagaaaataggtagaacagatattatcttcattttttaggtaataacactgagtttaaattacattgtggcttgcccaaggattcttggtaagtagcgttattgaccccaccctcaacccctgccattccagtccattgtccgttctctatcaggctgccaaaataattttcttttgagacagggtgttgctctgtcatgcaggctggagagcagtggcacaatcatagctcactgcatcctcaaccacctgggctcaagcgatcctcccacctcagcctactgagtagctgggaatatagatgtgcaccaccacatccagctaatttttccattttgggtagagatgaagttttgccatgtctcccagtctggtctcaaactcctgggctcaaccagtcctcccgcctcagcctcccaaagtgctgggattatagacatgagccactgtgcccagcaatattttcatatcaaagatgagattgcatcactcccttatttaaaactttccaacagtttcccattttacatagaatgaaatcctgcaaaacccccacattcagtatactccaggtacagtggccttctttagcttcagcagtcttagtttgccaagcttgttgctagtctggggcctctgcacttgaatgttctacccctggaacttcacatggcttgttccttcttacccttgaaatctcaactcaaatatcacctcctcagtgaggaagtaatacctatgtaaattaactcccctcccttgtcacacttcatcatatcatcctgttttattttctgtatggcacctattaatatctcaaattaggccgggcatggtagcgcatgcctgtaatcccagcactttgggaggccaaggtgggtggatcatggatcacttgagctcacgatttcaaggcaagcctggccgacatgatgaaaccctatctctactaaaagtacaaaaagttagctgggcatagtggtgcacgcctgtaatcccagctaagagtagctgaggcacaagaatagcctgaacccaggaggtggaggttgaagtgagccaagaccacaccactgtaccccagcctatgcaacagagcaagatgctatctcaaaaaaaaaaaataatatatatatatatatatatgtatctcaaattagcttgtttatatatttgttacttgtgtattgtctatccccactagaatgttggcctcataaaagcagagtttttatcctattcacatctgtattcccagtccctaataaagtacctgacacatggtagagtcttaataaatatttattaaataaaatagctaagcccgaactagactaaaactatggcttttttgctcctaatcaagtgtacttcccatgaacatttaatttttcctactttttgtggaagcacttatacctttggaactacagtaagaattgatgttcagaataatgacattaagatgtgctgtaggattctctattatcaaagaaaaattttattcagttcaataaactaaactaattaaagcagggatgtcatggcatattattatattaacacatttagaaagatttccaaataaaaagactttctgctttttctttagttaactagaaaattaaattaactcagagctctttatgcctcaaaagtccttgttaattaggattgttctataaatctctattattagcagagttcatcatcttttttattgccctgtttattagggcagtctaagcagggtgtctttgctcatatcctgatatgtgtgtcctagtgaaaagaaaagcatttccggattctcattttttccctattccttgatataggcatatttcatgctgttagtrtaacaatttagtttccttctatcagttctctccataaagctggaatgatattattgacctatgaagcaaaataattaaatttaaggtctgtttaaaagcattaatgctttgtgacgttgtttatgataatagaagattgaaaatagcctaaaagtccatcagtaaaggattggttaaataaattatactatatccatgtagtggactattatgcagcaataaaaaataatgaggacattctctgtttaccaatatagaaagatatccaagattttaaaatatgatccagagtagcctagatagtatgatacctttttttgtgtgggtgaggggaggaaaaaattaagaatgtagtttattgtatatgcatagaaaaattctagaaggatatataagaaagcaataacagtgataaccagattgggaagtagaaggagcagaaaccagctgaagggcagagatgaggagagggagattttatagcatagcttttcatatgttttatatttttgaatcatacgaatacattacctactcaaaaagttaaattaaaaacaagcacaactaaaagtaatatgtggccaggcatggtgcctcacgcctgtaatcccagcactttgggaggccaaggtggatggatcacttgaggtcaggagttcaagaccagtctggccaacatgatgaaactccgtctctactaaaaatacaaaaattagccgggcatggtggtacacacctgtagtcccagctactcaggaggctgaggaaggatatcgcttgaacctgggaggtgaaggttgcagtgagccaggatcgcaccactgcactccagcctgggcgacgcagcgaaactccatctcaaagaaaaaaaagtaatatgtgattctggactgaattctataccagatgaaaaatattgctataaaatacattaggacaattaagaaaattgaactgtggactatagattagattaaaatgttgttttctgtgtttatcaactataacctggctaacagaatatcatcactcttaggaaatacacacygaagtattaaggggtaaaaggcataatatataccacaaatgctaaataaaactttgaaagaataaataatgttatatatatgggaggaatgatcaactaaatgtggcaaaatgttaaaaaatggtaaatctggataaatgttgcatagaaattgtctgtatttttctgggaacttttctgttaatttaaaattatttctaaatagttttttaaaagaaacaaacaaaaacattttaatactatggatattaccttattataagcaatggcataagaatgtgaagggttctggtttttacgtagtcatacttttcactttctggagaagtttttaccatcacttttctgtttcttccatgcctattgatgctgggtcagaggcagtggcaggggtagtgactgaattttaccttgaggttgaaaaacaccaggccaagtgtggtgactcatgcctggtgtttaggaggctgaggcaggaggatcacttgaagccaagggctcaagaccagtctggagaacacagcaagaccctgtctctacaaaaaaaatttaaaaattagccaggcatgttggcttgcacctgtagtcctagctgctcaggaggctgaggcaggaggatccttttagcccaggagtttgaggctacagtgaaccatgatcacaccactgcactccagcctgggaggcagagtgagaccttagctcttgagagagagagagagagagagagagagagagagagagagagagagacagacagacagaaggaaaatgaagaaaggaaggaaaaggaagagagagagaaaagaaagaaagaaaaacacctgcctacctgcctttcaacctgctggatcaccttcacttgtatcttctcaacagtttaggacatcaacaaaacagtaacaatgtggcattttaaaaattctttgaacaaaattttctaaggatatcgtgaggttgtgtgtatctagtgctaaaatatatagttaatttagtggaggtaaacctgcagaaacatttaattgtttggcattgagtaactggatttgtattattgttcaattagatattgtggcaattgtagaaacttaaccatctctaatataattgactttcattattgatgcatgaagatgtttttattctaattagattggcctcttaagtgattaggtagtgaagcttgtctcatatttaagtgaagagtaaattatttgtatgaagtgtctagaggatgcctaaaattgattattttgtattctaggtaagctaaattttattgttttgaatgaaggcactctgcaagtcttatctaataaatgacacaaaacaaatctgttatcaactgaattgttagtgtttgtttcctgtctgcttggggaagcttatgatttagtggttttttagaaatccagaaagtaggaataataattattcccaacccttttccttctcactttacaaaaagtttgtgaagaattgagaaataaatgctacgaataatcttaagctcttaggtagaagtacttgatcaaaactaaccaggtcatttttctacaattagtgcagaaagctagtttttactaattgttcccacagctactccaggcccatttcatgcctaagaaaactaggtcccagtgagagtcatgtgagtgttgtaggcttcattggttgaataacgtccttacctgtaagtgtatattcagatttagtgaatgtacttcatgtgttcatataataaatttcctagaatagctatggagtaggtcatgcyggtaaaaactgttagttttgtgacttttttttttttttttttttgagactgagtctcactgttgcccaggctgaagtgcagtgacatgatctctgctcactgcaacctccgcctcccagattcaagtgattctcgtgcctcagcctcccaggtagctaggattacaggcacatgccaccatgcccaactaattcttgtatttttaatagagacagggttttaccatgttggcgagtctggtctcaaactcctgacctcaagtgatccacccgcctcagcctcccaaagtgctgggattacaggcatgagccactgtgcccggccatgactttttataatagatctgtaaaccagcttaagtcatttgaaaatcagagcatactgaaaatgtaataaaacataaatattattgaagatttttcagagtcatcattttgaaaggagttcttgtagttctttagataatagaaaataatgaaaactgagtttatgacgcatcttttgcatatatgatattcttatatacttatctgtactgataagtataaaaaggtagaaaataattctactttgtatttcaggaaattgagcttcatatgaaaactaaggataaagtatctcaatgatgtgtgtgtgtgtatatatatatatatatctccagaaaaaatcattataaagctgcatttatgtagaattttcagcaatttagataaataagtcatgatttttttttttttttcctccgagagggagtctcactctgtcgcccaggctggagtgtagtggtgcgatcttggctcgctgcaacctccacttcctgggtttaagcaattctcctgcctcagcctccagagtagctgggatttcaggcatgtgccaccatgcctgacaaatttttttttgtatttttagtggagccgggattttaccatgttgcccaggctggctgaactcctgacctcgtgatctgcccacctccacctcccaaagtgctaggattacagatgtgagccaccatgcctgaccagaagtcatgattcttaagaataaaattcaaaataatctcttccgttgtcgattaggttctgttcataaataaatatttatgcagtcaaaaatgaataattgttttcaaacgaggagctcaaggaattctatgtaattttggtttacttactatttatatataattattttccaatctgtaagtctagtgattaattcttatattacctaaaatgttttatagacatgttagattattacataatgtaaatgtattgtaaatagtaatggtttcattaacttgagctcattttacttatttagtacctgtttggttttagtttatagttgttatttccctgtatagtgtagcttgtacttggaagtagtaaaaccagatttctttataagtatttatggtacagaccttttcctaaatcagactgcagacctttcctgagtatttctaataaagtctgcttacattttttttttggcctgcatagtagtttgtgctatatatactctctagaaaatgtaattctggatatttgtgccataactttcaattaatcaaaatcttgtcaactgccatataggccctcatgttacaaaatgtggaaagttcagttacttaaagagtttggctgggcattgtggctcacacctaatcccagcactttgggaggctgaggcagtcagatcacttgaggtcaggagttcaagaygagcctggccaacatggcaaaacctatctctactaaaaatacaaaaattagctgggcgtgatggcacatgactgtaatcccagctacttgggaggctgaggcaggagaattacttgaaccaggaggcggaggttgcagtgagctgagatcacgccactgcactccagcctgggcaatagaatgagactccgtctcaaagaaaaaaagtttaagccagatgcagtggctcatgcctgtaatcctagcactttgggagaccaaggcaggaggattgctcgagcacaggagtttgaaaccagcttgggcaacaaagtgagaccctgtctctacccacccgccccccaaaaaaaagcmaaaaattgaccagctgtggtgctgcgtgtctgtggtcccaactacacaggaggcmgagagaatcccttgagcccaggaggtcaaggttggagtgtgttatgattatacaactgcactccagcctggatgacagagcaagacctaaaaaaaaaaaaaagattttaaaaaagattgactaagtgaatgagtcctcttcttgaatatcagtcattccaggagagtattttcattaacatatttatgtctcttgttgaaagtatccattaagagcaggtagcaaaagctagacagaatatgcttttgaagattctctatgctctttattaatacctttcttaagtttctcaagatctccttttgcctccctcttgatcttaaacgagactgaagtttaagagtctttagccactctgtccccatagggatgcaaatttatgatttcagaagttccagcccccaataagaagcactgtccaatcgtttgcagatgtatcttgtaagccagatttcatgacagataagtccattccactgtcatgtgccatgtttaaagtactaaattaggttactctgtagtcaaaacaagtaagccctggtccagactactctagggcaaaatcccgttgcactgtcccttttgttctgcccatgcattcagttgtagctttcccttttgccagttgacagatagtgacttctttgcaaaacataaccagattaggttatttttagtaaaccaactaaaataaaaaattcttgacattgggaagaagtattttaacagaataatagtaatgtttttattgtgccattgtgattttctataaagaaacacccaatattcattatttatatttttttaaatttacaactctttaactgtatccaacatttcactgccaggaatatagtcaggctcgaagctttwttagaaacccatgatccaatccataccaacacttcctttagtttatggcttctgttcatttgcactgtccagaaaggtactgctaccatttgtagtcactccaaaaaaaagtgtgaactacctaggtataactctcataagacgtatacagcagcatctgtatgctgaaagttaccaaaaaagtattacttgcagatgattttgcaccttagttcccaagtgcccctgtacagaatatggagcttatgtcctgtctctctttgaatgatgagtgatgaaggagcttcagaygttactgggtgagcttgtattgagtgttacaaagagaagtcattctgcctttctttggctctaattgcagaaagtgaagtcactgcttttgctgtcttggatcaagaccagaaagaaattattgataccaatggagctggagatgcatttgttggaggtacagactaatttatttcattcttacttacaagtaaaacattttaacccttgtttctaccatataaccaagatttattcatttagtaacttctaatttcttcttttaaataattaacttctgaagttctttccatatacttctatcattgtcagtattagagggttttaccagaggaaaaatatgtgtttggaaaagataatttgctactatgctgtaccccagtcattttcacaagattaattgtatctgtcagaaaattgcataaacaaactgcatcaagtacagtatatagtatattcatagcccttcaggcttaaatgttaacacatttttgttctttaaaacaagttgtgatgaatattaaacagtatgctaataactaaggatgatgtcttttgatgataatcctttggttaaaacatctgtttcaaacacaatagtggttgtttgttatactaaaaagggttaaatttttgcctatttttggctcaataagaactggcaaattttatrtgaactaatgattttggtaatgaatactcaaaaataaaatcaaaacaatagaagacttggcttgatgacttagattgatctaaaatctgattcaaaaattcttttgataagtctaaattccttctagttaagtgtagttaattaagctagtttatagtctctagaaagctttcgcttcctcacagataccccaaaggggtctttcctggtctctgtttctttctcttaacatcaagccagaccaggttaatttaaaaaaaaaaaaaaaaaagcaagcaagtggagctgatgattgtccctttttctctggaggataatttgaatcatgggaaacttatttaagtttgtgtgatggttttaacttaatattttattttaatagtcttttgccaacataaatttttatttttctttctctaaaactattcatgcccagtcttttttttttttctcccaggctggtgtgcagtggtgcaatctcagctcactgcaacctccacctcccgggttcaaatgattctcctgcctcagcctcccaagcagctgggaccacaggtgcatgcctccacacctggctgatttttgtacttttagtggcgacggggtttcgccatgttgggcaggctggtcatgcccagtcttaaatgaactattaaccattaggatgccccatgcccttgttctttggaaagagtctgtaccacagacaacattctacttcactgttatgattgtgttttttatttccttgctcggaaagtcttcattattgataatattagagtacttagcagccaattttcctattttttactttttagagctatagatgtatgtaggctaaaatattttattctgaatttaaccatattctgtaatacattaagaaaaccctagtgatttcttggttagaaattggtcaaaccaggaatcttagtctagaaacttttaaacttatacactgtatgtacattacttaagtactttaaaatctttaaaacatgaagtattctatttctttgacattcagtgggacacataatgaggccatcatagatttgatggtgacctaaatagccactacctctggccttgggttacttggcttcctggcccggcaacaacagattctgttacagacacctaactatctgtaatgctaccgatactaggtgagaacatgtagactttttgagggagggagaggccattcttaggatactgaggtaggaacagctagctaccatttgtattgtggttacaacgataaataaactacttcatcaaagcaattgggatttttttgttagaggatttttcagcctctttttatcctacttcattatatttattgttggggtatagttaggtaagcaaaaaagaaaaagagtatagaacagggatccacagtcgtcttttttaaaggccaaatagtgactattttaggctttgcaagtcatatacaggctgtattgcatatcttcttgttttgtttgcttccttgtgttttgtttttttacagcacttttaatacgtaaaaacctttcctagctctccagctgtacaaaaacataccataggccagagttggcctacagactatagtttgccaaaccctctttaaatcatgggcagcttcctcactttattcatttctagcatttcaaagctccagacactggatttcactatacattgttgaaatcagaatagagaaagtagaaagcaggtagaaactaggcaggactttactggtaatacaattagatagccatttttctcactttgaacctactcagttcccagggtaatcagatcccaaaacactgggtcatgcaatgagatgaacatcctaatgtcagtttattaatagaatacttatgttgccatctttagcacattctgtcaaatgtgaatcaagctacaaagtaatagcaatagataacttttatacagtacctactaaccaaccaatatcttaaacactttatatatatattaactaatttagtgttcacaaaaacttcttggggtagattatttttacccctattttactgatgaaaaaaacagagacaaagaaaggtgagataatgtgcccatagtctcatggctagagagtagcagagccaggattcaaacccagaaagtctggctccaaagtcagtgcttttactcaccacactaatactgcttctctaaacatttatgtaaatctcaccattagaactgagaaccacagaccagccttcctgacaaaagctggttttgccagagaatcttcctgttatctgagtagatgacttactttattgaaaaggatctgttgtaatctgacagggttctggggactctaaggtaagattgttgaggaaaagaaagaaaaactgaaagggaagagaatccaagaactgtagtccctggtgagtttcaaccaagagctttttgctaagcagtagaatcgattgcactacagagatacagaaagccagatgataaacttgcttggttagcatgggctccaaataagagagttatatgaatcagctgtttaatagtgaagcaggatatttccctaagcccttctcaggcagaaattgcagtgtgtgggcgcaggaactagccagccactttggtgccagcaggagcgaacttcactcactcgcttctccactgctcacaggagggtgagcacacgtgagcaggtgcaggagctgggctgagcgcttttgggcactggtaagagcgaactccataccagaccagtggcagcatctaagggaagctgcccgtgacccctggatccccagaggaagcgttacagtgcccttttagctttgctgtctgtagacagcttaagcattaacagctcagttgagtgaccctccattgtcaccaatgtgacagccctttgcacccacactcatggcacccgagttcttgtccggcatccaggataaatgaggtcacacaaacgagttggagatggtaaatgcaggggattttattgccgatgaaagtggctctcaacaggaaggggagctgaaagggggatgaagcaggaagataatcccctggagtccggtcatccccagccagactcctctccaaagctatgccatcaagctgtccctctgaagtcaagccgcttctctccgatgtccaaccgtggtctacaacatccagctgcttctcctcttctttctctgttggctgagcctggggtttttatgggcacaggattgtgggtggggtgggccatgggtgattttggaaaaggcaacatttgagcaggaaaacaaggatgtaagttctcactttgggccatggtattaggctttttggctttaggatggggcgctcaccagagacctaccctcttctgcccagaaatttgcctgcctcctgtccctatcaatagcacccatctaacaactgatgcatctatcttacaacagaaatggtcttgttagttggaaatactaaaagatccattggttaaaaccccctgctccctctccacaccagcaggagcctttctactgggattggaaataacagctgttggcttgacacagtggctcacacctgaaatcctagcactttgagaggccaaggcaggcggatcacttgaggccaggaatttgagaccagcctgaccaacatggcgaaactctgtctctactaaaaatacagaaaattagctggtcatggtaacatgcacttgtagtcccagctactcaggaggctgaggccctgcccgtatggaaaaattaacaaaatggatcaaagacttaaatgtaagtactaaatcagccaggtgtggtggctcatgcctgtaatcccagcactttgggaggccgaagcatgtggatcacttgaggccaggagtttgagaccagcctggccaacatggtgaaaccccatctctactaaaaatagaaaaattagccgggcatggcgttgcatgcctgaagtcccagcaacttgggtggctgaggcaggagattcacttgaacccaggaggcagaggttgcagtgagtcaagatcttgctactgcactccagcctgggtgacagagtgagaccctgtctcaaaaaaattaattaattaattaattaataaaataattgtcgttgactccttccaccttgggaatgaatctcaggcagtggcaacttttacatttactatgtagtttatttttcttcgcttcattgcccaattaacatatcttctttctgattgacacattctatatttggatggttaatatattcatcctgtaactttcaagttttgctggcctaagagtatttctgtcttttgtgactttgcatatctatattttagtccactttgtggtaatttaactctctgaaggacaataattttctttgcataaatttcaagttttggataaagtatcactccagctaccatgtgctaattatctatatcagtaccagagtgccatgtgttcctttagccagctaaaaagatatatgactacatcatggattttcatgtataatttaaaaatgagtaacccaaatgtacataaattaaattaaattaaattcgtagttccatctcacgggtttagtgacagtaacaaatccctccagcctctacaagcatcgctccttgttctatttggaggtcttaagcactttgtgatatttgttctttatttgtcactgcccagccctgatagaactaatcttttcacattcttcctcaaaagcccaagtgctaggattgtactcttggaaatggatacaattctataatctctaagtatgatttcctaatttcctaggtcaggaaaaaatttcttcctgttgtcctgctgtgctttgtcacagcaggtctaccttttcatttggaaccctctttgtcactgccatagtaacaaatggaaacattgagaacattttgtgacaggcactgtcattgttcccagtgaaatctcttcccctgtgtcttcccagtaaatgaaactgagaagaaaaatcataacaaataacatgaaagaggacctaatcaatatgttcccactgggctgtcaataccagcctgtgttaatctaatatgatttagtcatatgttttatggcagctgtgggaatatggacaggacctacaaatcatctttagactgaaagtgagtacacctttgacagattatgtgtaggcacttatatacaactctcagataaaagactagagacttcacccaagaaccaacattcttagaaytaaaaaaaaaaaaaaacaccttcattaagtatggttaaaagccacgtatagattagaagattttactttgttggttttttttgttttgttttcgtttttgttttgagatggagtcttgctctgtcgcccaggctggagtgcagtgacagaatctcggctcactacaacctctgcctttcaggttcaagtgattctcctgcctcagcctcccaaatagctagaattacaggcatccgccatcacgcctggctaatttttgtatttttagtagagatggagttttgccatgttggccaggctggtctcgaactcctgacctcaggtgatccacctgcctcagcctcccaaagtgctggatttacaggtatgagccactgcacctggccagaatattttatttggaatgataataaagtaactgtgctgactcataatactttttttggagggggagatggggtctcactctgtcacctaggctggagtgcaacagcacaatcatagctcactgcagcctcaaactcctgggctcaagccatcctcccacctcagtctcccgagtagctgggactacagggtttttaaaaaatgtttttgtagagacagagtctcactctgttacccagtctggtcttaaactcttggcctcaagcagtcctcctgcctaggactcccaaagtgctggattacaattgattaaaatgacaattcatttgggattacagacatgagccaccacccccagccagaatactctttattttaaaaatcctcacaacagcttcagcagagaaaatgtattacccttaaaaatattacctataatatgcaaatgactctgaaaaccactcagcaatcacaatgcaaataattctcctatttcccatctaataaaaaggaacactaattacattctctaggctgggagcagtggctcacacctgtaatcccagcactttgggaggccaaggcaggtggacagcttgagctcggcagttcaagaccagcctggacaacgtggcaaaaccccatttctaccaaaaataaaaaaattagctgggcatggtggcataagcctgtggttccagctactccggaggctgaggtgggaggattgctggagcctgggaggtcgaagctgcagtgagctgtgattgcacccctgcactccaggctgggtgacagagcaagaccctgtctcaaaaacaaacaaaaaacaatttcattctctaattcatgtttagaaaagaacattggtttacaaaaaatttttaaagagttttttcagaacaaggatgccacttcctcttcaygtggcacctatctatacttctgagaaccatgaagactctctaattatcttcatattttmtatcctcaccttgtttctttggtcccaaacatttatagcttccttccccattcttcttaattgctgcttcattgtgctatgcatagaagtggtrcagaattcttgggatttgttttttctacactacccccttcctttgctctccatctcagaagactagaagacaacttggtaagtgttgaatatattgtttctcagacttcttcactcaaaaaccaaaaccttcatatgacccacatctgctgaggatttacttgatggtgaccaagatgacagctgcccactgctaaacaacccaatgtcaacaactctttttcttgtctttctgctctaatgggacatcttctctgttttatttcttgarcagaaatttttcttaaaaccatcaaatgaacagtgaaattggcttggtcattaggaatatgaaacagaccaggcatggtggctcacacctgtaatcccaacactttgggaggcagaggcaggaggatcacatgaggccgggatttcaagaccagcctgcacagcacagtgagaccccagtctctacaaaaaaaaaaaaaaaaaaaaaaaaaaatagccaggcagggtggcatgtgcctgtagtcccaactactcaagaagctgaggtgggaggatagcttgagcccaaaaggttgaggctgcagtgagctgaggtcacgccactgcactacagtctgggcaacagggggagaccctgtctctacaaaaaaaaaaaaaaaaaggatatgaaacattcaccacagatagtagttcaggttcatgcaacagaaagcaagagagagctatacccttgcacagtgataggatgctttattacatgccacactagtgttatacatccagagtcttagtcaagctgaagctagaccagcaccaaatttcataarcactgtctatgattatttgagccttcgttagttaaaaaaatgtaaagattatcctctccagccatgatttaaaaaaagagagagagaaatcactttgttcatgtgaaatacaggatgattttagagtgaagcctgtaatttctcatcaacrcaaatgttccctcaaagacctaatatcctgaatggccttcatctagaagcaattgtaaatagataatggaattgaaaggagtttatcttctgggaatgtggataagacacagacagtctgaaccatgtaggctatcagactccaaagctcagatgtgaaacttaggtttcttatatttgatgattattgagaaatatttattctaagaaaatgatgttgatatggaaatttttatttagttgcagaggtccacaggaaatgtagtaagtaaaatttctgaagttcattttcttaaacagaattgtgacataacaaaatatatgtgtgttagttccctgacctagaatattggtgagccaattggaagtaatttgaatcctaaaattctctcagctgctattaaatgaatctggtcaattttacctgtctgatacatccaacatgtatcagttagcttttactgcataactaaccactttcaaaacctagttacctaaaataacaactcatttatttagctccacaaatctgtgggttgacagctgggcctgtgcttacctggacagttcctctggccttagagtgttgagagattaagtaatttgcccaaggtcatattgaaagctaagattcaaactcaaaatttggcctcaaagttcttagccctagccattttgctatactcccttttattactacaacatcttagcttcctctctaaaggaggagaaatagccaaagtggttttataaacactggtctgtcgactggtaycagtctatgacataagagttttcatcagtcagtatcaaaatgtaaaaaggcaggggcaagaaagtaaatttccataaaactaaatgtattcagttttaaatcttgcccttcctactttgagggagttcagttttctttctttatgaataatgttggtaatagtggattttttaaaaatgttcttatctagcagaattaaagtttgccagctctgtgtttatccctaaaatcttttgggcaagtttcaatgttctgtgaaatcccaaagtctgggattcactgatcaaccatattttttcataaattctacaaaattatttggccttttttttttaatgccagtaaaaaattactgatgacgtgaatgccattcatgttgggcttttctaatatctggcccacttcttcatataaagaagatgagtataggccaggcgcaggggctcacacctgtaatcccagcactttgggaggctgagacaggtggatcacttgaggtcaggagttcgagaccagcctgaccaacatgatgaaaccctatctctactaaaatacaaaaattagcaaggtgtggtggtgggtgcctataatcccagctactcaggctgaggctggagaatcgcttgaacccaggaggcggaggttgcagtgagctgggatggcaccaccacactctagcctgggcgacacagcaagactccatcccaaaaaacaaaataaaaagtaaagaagacaagtatagaactgtaagttctatacttactgtaaacagatgagtacaggccgggcacggtggctcacgcctgtaatcccagcactttgggaggccaagacgggcagatcacgaggtcaggagatcgagaccatcctggctaacaaggtgaaaccccgtctctactaaaaatacaaaaaaattagctgagtgtggtggcagacgcctgtagtcccagctactcgggaggctgaggcaggagaatggcgtgaacctgggaggcagagcttgcagtgagccgagatcgcaccactgcactccagcctgggcgacagagcaagactccatctcaagaaaaaaaaaaaaaaaatgatgagtacagagcaataagtataatatgatgtgatttgtattttgttaaaaatggtcttatgtgtgtatgttgtaggtatacttataaaagcatataaaagttccaggaagaaacactccaaacagctaacagtggatgtactgggaggtggctgaatgaaataatcactttctactctgtatgtctgaatttttttttttttacaatgtgcccttattggctttgtaattagtgtaatctttaaataaataaaatcacatgtgtgtagcactgatgcagagcctagccaaccttagtacctagcagaaatcttcactgtggtaaataagtcatcagacacagcatttcaaactatacgataatttacataaaacataacctctgatgttttaaggctacttatcagcaaaggtctgaataaaacaaaattagcagcatgattgtcaaattaacagctactctctcttcagatatataagttctgaaaccaggggtataaacacaggcttttaatttatttttcatttaattatccaattaacgttgacattttatagaatttagatatatttctagcccacaaagtaaatggcaaattaaaaactgatttctgtcatcaaatgctcttaaaattttagaaccatcatgctatgagaaattttcagttgatcaaatgtaggtttttgaattgagttaaataataacaaaatgatccttcttatgaattagggcataagcacagcttcacataaacaatgttaccatcatcttatcccagcagctattactttgccccattgaatcttttgtttttaactatatcatttagagtgtttgtgctgaaaggaaaattttaaaaaatcatattttctggttttcagtttccagtagtgaaactcttttcaaatgagatcttatctgaatcagaatgaaatgaacccacaaaaattaaaaattaaaaatgtttttaagaaagaatgaaatgagattaaacaaactcccatttgtccctatccacattttatttggtggctcatgatgtcacgyaggaaaaccatgacctattcaaaagcccctatttgatgaatgaagaaagtaaggcccaaagaaaggtaagatgagttgtccaagggagttaattgcaaatacgagacaagaagccagattactgaattcatgaagcagcagttacttgtgttcataatccaaatgaaagttgtcagttaaggctgagcgcagcagctcatgcctgtaatctcagcactttaagaggccgaggtggacaaatcacttgaggtcaggagttcgagaccaccggccaacacaacatggtgaaaccccgcctctactaaaaacacaaaaaattagccaagcctgatggcgggcacctgtaatcccagctacttgagaggctgaggcaggacaattgcttgaacctgggaggcagaggttgcagtaacccaagatcacgccactgcactccagcctgggcgacagagtgagactccatctcaaaaaaaaaaaaaaaaaaaagttgtcagttaagctgtctgttatttagtcctcttggaaacatataggtcaagagtcaatatcccaaatgcacagaaggaggggttttttgttttgttttgtttttgtcttgatgtttgactttaacaataaacagaagcatacgctaaacttttattttgggaaccacatcaaaagatcacacattagctttaaaatcaaatactgactcagtgttgtacatctatgctccatgaagaagaatgacttttaaagcagtgttttgaaagggattagggtgaaagggcatcttatctatatgagtgcaaaatactgcttagcagtactcttcaagagctttcttccgaaattaagatcatttttaaattgatgggcttttggttttgtttttaattcaaatacaatgtcccataccatgttaacagaacttagtaagcttccatttttagccaccacaaagaaggaataagaagttattctcaaagctgtagctataggacaataaagttattctttcttatagctacagtactgaccacttgcctgtatattacacattgcttctcagttgctcactttatgtgggagggtgtgttgtgctgaactatcttaaagcaacctttgctctaaattgacttcctgtacatgtcaacaattaacaccatctgacaccaattaagctttagttttcttttcttttcttttctttttttttttttttgagacggagtctagctgtgtcgcccagaatggagtgcagtggtgtgatctcagctcactgcaacctctgcctcccaggtttgagtgattctccagcctcagcctcccaagtagctgggactacaggtgtgcaccaccactcctggccaacttttgtatttttagtagagacagggtttcatcatattggccagaatggtctctaactcctgacctcagatgatccacccgccttggcctcccaaagtgctgggattacaggcatgagccactgctcccagcctggttttcattatgcaaatacctgctaggtcagaccttaccctggcaggcacagtagctttttcagttatttcaaaatttaatatttattattttccctgaaaaatcagttttctaaaatttgggtcacaagttgttatttgagttcatgactaattggtagtcaatatgaagtcaaaacaaaattttactaactagactacatagaaaatacaaaaagtttacatctgagcacttttcagcagggggaaaccattactttgtcacatctggatattctaagctagccaaattgaagtgggaatttcctgccagatgttagttctttgagcaacctgtgaacatctaagtaagtgaggggttatgagtccttgtttggtagagctatacccactctggaggcttgctcctaacaggcagcagacattttatatgtactaccaccagtcaggaggttgtgcaacctrtttgaagtcaatatgatgtgctcttgttaaatgtcaaaacatccaaggcctcattttgaatgtacaacatcagtcttacagatattatatccagggtgaacattgcattgaaatgtcctcccaaatgtagatgacaaaaattttgtttcattaatagaaagaaggtaagactgaaacaccacaggtattccagataacttggatagggccattttgtaaagtcagtgtagaccaaaatatgtctctaaatatgagggaaataaagaatctgaaatgacatgaaaaataccaagtatttatatcaacctcctgttctagacgcacatgggaattaggaagtgaaaatttcattcagaagagctgtgcacaaaaagtggaaatgcattattcaattgaaacaagtaacatttttaagggggataaaatactttctacatgatctcactggttttgtcgtcctccgtaagggaaaatattgacatttaccagactgtttgctccagctttctgatctcctgcagtttatttttataacaaccttatcgatgggcctcttacccagctctctaggtttaactgagttgagtcgatttgttaccacagcttcaagtagctgttacagaacaagcaagacatcctaataaagctgtaaacgtgtttactcaaacagagtattgattttacttggaggggaagaagccggttcttagcacagtgtcagggtggatgaatttcactgcagtttttcattgtcatctgtcagggttgtgaaacactaagtaaagccatcagaggataattagaagtaccagaagtttagcccctaaaatcagttaaccacttgggagttttgtagcttaattagcttttattaaaactttccctagtattaatagccaagcacttttaatggtatttccaagtagatcaagatatcaagattgtgacttgttaaatatatgaatttaatggctaagggtttttcagacyttttctcactctaaattaggctaccactagaacataattagaaccaaaaccaatgtaaagatacagtgatctgtacttatactagcagaataaatgcatgatttttttttctgaaaaatcaacttaaaagaagtagtaaaacaattataaaataatttaagccaggcrcagtggctcatacctgtaatctcagcactttgggaggccaaggcaggaagattacttgagcctaggagttcaaaatgagcctgggcaacatagtgagactcccatgtctacaaaaaattaataaattagccgggcatggtggtgcacacctatagttccagctactcaggaggccaaagtgggaggatcgcttgagctcaggaggtcaaggctgcagtgagccgtgatcacaccactgcattccagtctgtgtgacaaaacaaagccctgtttcaaaaaacaaaaataaaacatgtctttgtagaaaaatccagtttgcgtctttattacacttaaatgtttttgtaacacaatgtgatctaaacacataaaactgtcaatgccacccttatttttaaataccttgattaaagcagattctaaaatattctagcttactttaagttagtcattgtcttaacaataaaagctgatgcacgttgtgcaaaaggtaagcatcagagtaaggagttgcttaccttctgtagaaactgcattagctactgagcttcatgaaaagcattcatgtgaacactacctgacctcttccaaatgtctagaaaaacaaatcacagttgaaaaaaatcacccacctagaaaatgaacaaaaaaactggaaatttattaaaaataagtttgaccttctctcatgatgctgcagtcaagcaaaaatgaaaaataagtttgaccattatatttaaagtacatcttcccatatctaaataattcatttagtgctttatggtaaactttttatgtcttcttgcactactgcctcggcctgtctaaatgactaataaaaattatgatatctctgggatgaccagttctaaagcctaagggtaacagactctgtcagaaagaacagcaaaagatgttgggttttctttgtctttgaaatgctttgtcacrtgtttatctgtgcatatagttctaagccaaattctaccctgaattgctttaagccacaaagtagcaggttgtaaaatattgttgcataagagggcacctctagagcttgctcttctaatttttctaaaggtagaagaaattgacttttcacaattgtatttagatcattcttccatattaaggtattcaaaaacagaaaacataaaggatatggatttatgattatatcatttttatgtgcatttcaaaaggcccacaatacagtaatttattttattctatgcaattttcttgagaatgacagcatgtgagagagctcgttggatggggaggggcagtatatagtagggtagccatatttgagcttcaaggcactgtttactctgactccttcagtcaaaaggagcataaacccatttcacctagttcaggttaaggaattttttttttgtaaggaagatattataacagtggttaagacactgggtcaaaatatgtggggttttttgtttgtttgttttggttttttttgaggtggtgtctcgctctgttgcttaggctggagtgcagtggcgcaatcccgactcgctgcaagctccgcctcccgggttcacgctattctccttcctcagcctcccgagtagctgggactrcaggtgcccaccaccacgcctggctaattttttgtattttttagtagagacgaggtttcaccatgttagccaggatggtctcaatctcctgcctcctgatctgcccgcctaggcctcccaaagtgctgggattacaggtgtgaaccactgcacctggccccaaaagatgtggttttaagtcctggtaccacattaactagttgtgggactgctgtggtttgaatgtgtcccctctaaaattctagcattgtcaatgtgatagtattaagaggtggggactttaagaggtgattaggccttgatggctcctctctcattaatgggattaaggcccttataaaagaggcttcatgcagcatttggctagcttgctcttccactctggcttacccttccaccctcacaagacaccaaatgccaacagcttgatcttgaacttcaaagckgccataattgtgagacaataaatttctgttctttatgtattacccagtctcaagtattctgttgtagcagcacagactatgagagagactatggaaaagttaattctcttttttgtttgtttgttttttgttttttgtgtttcttttttagatggagtcttgctctgtcaccaggctggagtgcagtggcatgatctcggctcactgcaacctctgcctctcgggttcaagcgattaccctgcctcagcctcccaagtagctggcgactacaggtgtgcgccaccacgcccggctaattttttgtattttagtagagacagggtttyaccatgttggccaggatggtctctatatcctcacctcgtgatccacccgcctcaacctcccaaagtgctgggattacaggagtcagccacagtgcctggccgttacttaacatctctaagcctccgtttcctcatttataaaaatgaagataatgagtacctatctcatttgggttattatgaaagttaaatgaagtaatgtttataaagcacaacacctgatacatagtaaggattcattaagtgttacatattataagaggggtctcaaagaagtctcagacaagagccagaatgacaagttttcactgaaagtatagccagatggtgattgtaggttcaagtcagttctggagacctcagcagcagatactggatcttcactccagttcttcactaattaatcctactcagctgcattacgtgtctgcgtcttactgtctcacagtcagcttcccagcctgtctttgttttccattctggctcctaaaagagaacactgggttattagctcaattcactttttatacaatgtcatcagtaggacactaggagaaccataagttgtttgcccttgaacgagatgcctaccctttgttccatttaatagtaaaggttgaatttacgtgcacaaaacattctgcagtgctggaagtgatttttcttaaaagggtaatacgtggatgggctctataaacattgtgtttgcatgccttgtccactaccttcttcccatatttatagttctgaaaatgttccctacaacgtgatccatctatcatacaatacatggaacatcaaacagcttgtatctcaagctagaaacctagacgcccttcctgagtccttccattccctctctccaaaccgtcagtgagttcttttgattccgctttaaggatgtatctcaaatttgtccacttctatttctctgtcatgactttagcttaggcctgttttccacttactgtagtagtttcctaactgatgtctatgccttcactctttctggaactttattccattttctgtataatagccaaaataatcactttaggaagaagttgaattatttcattcccctgcttacaacctttccgttgcttctcactgcacttagcctaaaaatccaagctcctgtggtgatttaaaaaaatctatatgatctgctatgtttgtatctttatttcattccattttcacctttgcctgcatgatgtagctatactgtcagtcttctttcaggccttagacactttgtacagtggagtttactttgcctagaatgttcctcccctactctttaaaagtcaactcttctgtaatcatcctatctaaaatgggtcccttgactaatattctctcctgttactcagttctttttcatagtagcacttaacactctggaattgtcttatttacttatttgtttacttgtttttgtctatttcccccattacaatgtaagtttcagaagaacaggaactgtaagtgtcttatttaccagcgtatccccgggacccagcacagtgcctagcatagaagactcagtaaatattagttaaataaatgaatatatcaatcatatgcacagctgcaaaccgatttgcccctaccatcaagtaaagaccatttagtcggtatttctaggaatttggttattgaggtatatcataagaaggggttagaataagtcaggaaacagagtaggccatactttaggatcaggtcaacttggtttaagagtaacccacgctaggccaggtgcagtggcttacgcgtgtaatcccagcactttaagaggctgaggtgagacaataaactgagcccaggagttcaagaccaaccagagcaatatcgtgagacccccattggtatcaaaaattaaaaaattagccagacctggtggcaaacacctgtagtcccagttactcaggatggtgagataggaggatctgttgagcccaggaggtcaaggaaacaatgagccataatcatgccactgcactccagcctgagtgtgtatgtgactaatccagaaacagagagactgatcatactacctttagtatcacttaaaataaaggatgctgggctggggggcatggtggctcacgcctgtaatcccagcactttgggaggccgagaccggatcatgaggtcaggagatcgagaccatcctggctaacatggtgaaaccccatctctactaaaaatacaaaaaattagctgggcgtggtggcgggcgcctgtagtcccagctactcgggaggctgaggcaggagaatggcatgaacctgggaggtggagcttgcagtgagccaagatcatgccactgcactccagcctgggtggcagagcaagactctatctcaaaataaataaataaataaataaataataaaataaataataaaggatgctatggagagaatacatgtgttaggaaagaaggtagtatttaataataattgtactaagtagttatagtacagatacaaaaaatttattctcaagatcataatcctgaacatcagttcctgctgtaataggcagtaacatacaggtcagagactccagtcaagatttcataaaatatattaaagttatccagtagatctccaagttgattcctgacatcactctcaagtcccctaatacacacatcacactctcaaacttacaaatttggtttgccaaaatgtccagtgggaagggtttaattcagcagataatagaaccttgccctgtcctacctaggatctttgctgccattccttcgtttataggtgtgagtggggtaaaaagtagctcatccataaaggaggcagtgaaaatctctagtgaagagcactgagcctgggacataacctgtttcattttccacagcttctttacctcaagccacagaattgttcttagctctttaacttttgtcagcacccacatcaaatcaacaaacttgtttatttttcttctttccttactatctatcacccagaatagtggttctcaaacttgagygtgcatcagaatcatctgaacacttgttaaaagatctgttgctggaccctctcccagggcttctgatttagtaggtccgtgatggggcttaagtgatactgaagcagctggttcagggaacacgctttgtgaaccatttctggaaagaattttacagtagattcccatttgatctctctgcaagcagtctctttcctagtaagttcatattccacacttctgccagagttagctgcccaaaagcaatgtaatatgcctcccctgtatcagagtttggttggctctctatttattatagtataaaatccaaatcaggctgggtgtggtggctcacacctgtaatcccagcaatttgggaagctgagatgggtggatcgcttgaactcaggagtttgttaccagcctgggaaacatggggaaaccccatctctaccaagaatacaaaaaattagtcaggcatggtggcacacacctgtggtccgagctactcaggaggctgaggtgggaggattgcttgagcctggaaggcagaggttgcagtgagctgagatcacaccactgttctccaacctgggtgatagaatgagaccccgtctcaaaaaaagtccatatcacatcatacaagatccttgacgatatgtccccattttgtctttcccgctgtgtccccaactcagctgacctttgactatattgcaaaataagctttgtcctgtcaacagcatggctttttttcctgcttataatgtctatctctgcaaaatgttattcattcaacacccagctcatgtcaccttctccaagatgcatttctaaatgtcccccaattgaggtgttatgttatttttaaagtgcatacgtggctttctctcctaaagctataaaaccctcaaggacaaacactgtgttttatccatctttgactcctttggtgcacccaaagcccagtacctagacattcaatagctgttggttgatggaatgaatccaggtacttctgacagattccagattttyactttcttttgtttcttataataaaaatgtagtatagaagcagtcatggcatgagtctagtaaactgaggattcagatcagtcaaagttataatttatcttattccctttcctaaagcagctagagataatgaaaataaaacctttaaaaagaatgtaacacctttaagttgactgcctcgtgtacactgtggcagcatatatctggtaatcaytggtataggaggtaagtttaacaggccagtttaagacagcatataaatcatcactaaaggacagatagctaagaaagatggaaaataaacaaataattgaaaaaccagattgacccagaaatgactaagaacaaagtttgtgcagggagacagggagaattgagtttagtactgttagttgctgtaaaatatatcaggtttgctttaattacatggtaatgcttctaagaacaaaggtaattacatgataacttatgttactactcccatattatctctaaataactatgtaattagcttgtcactactatacagtgtgaagtttgatattactcatggataaagaacattggtaacttaagtgagtgagcaagggtggggtgagggatggaggcagcagggaaatcatagaattattacaatcaggaatgcaaatggttaattagatcattgcacccagtccttaaggatctgagccagagccatggagaataccaaacgagtctgaggtaaattctccatggcttgtcacagtgtcttctgaagaccataaacatacaacaaagtaagttgacaaagcacgcaacagatcaatgagtttgggatataatgcatgtaattttaaacagttccttttatttggggaggtttttcttttaagtaaatactaagaattttttttaattgaaaaatatttcactcatctcattttccaacatcctgaggttatatgtgtggcctatggggtgaggatgtgtagcactgggaactctcatttattgctggtaaaaaatgcaaaatggtaaacaaccactttggaagacaatttggcaatctcttacaaaactaaacatacttttaccatatgatctagcgatcaggctccttcgttgcccaaatgatttaaaaacttacgtcttcacaaaaacctgcatgcatatgtttatagcagttttattcataattgacaaaacttggaagtagctacatatctttcactaggtgaatggataaacattatcgatacaataaaatatgattcagccaacaaaaagtaatgagctatcagctgggcatggtggctcacacccgtaatcccagcattttgagaggcaaaggcgggcagatcacttgaggccaggagttcaagaccagcctggccaacatggtgaaaccctgtctctactaaaaatacaaaaattagctgggcatggtggcaggcgcctataatcccagctacttgggagactgaggcaggagaattgcttaaacccaggaggcgaaggttgcagtgagctgagatcgtgccattgctctccagcctgggcaacaagagcaaaactcygtctcaaaaataaaaaaaagaaagaaggaaagaaatgagctattaagccaagaaaagacatgagggaaccttaaatgcatgttgctaaatgaaagaaggcagtcttaaaggctacatactgtgtgattctaactacagtcatgcaccacataacattttggtcattgacagaccacatatatggcagtggtctcataagattataaaaccttatttttactgtaccttttctatgtttagatatgtatrratacataggtacttaacattttgttacaattacctaaaattcaatagaataacaggctatacaggattgtagcctgggaacaataggctataccatctaggtttctgtaagtacactctgatgttttcacaatgacacaatcacctagtgatccatttctcagaatatatccccgttgttaagcaactcaagactgtatatcacattctagaaaaggcaaaactatggagactgtaaaaaagtcagtagctaccatgggctggagctgtggcgcaaggagagagggatgaataggtagagagcactgaggatttttagagcagcaaaactgttttgtgtgatactttaatggtgtatattattatatttgtcaaatcccacagaatatacaacacaaagtgtaagccctaatgtaaactatagatattatttaatgataatatgtcaataatggctcatcgattgtaacaaatacacccactaactaatgtaacaggttaatcataggtggaactggggagtaaggggatgagggaagatttgggaactctctgtattttctgcttcattgttttgtaaacctaaaactgcccaaaaatataaagtctaatttttttaaacccaagtgggaaaacctttcttcgatccatcttattctactgacatcttgggtgtgtatgatggtctgtgtttcccagtgtcatcaatttcactgccttaaggtgctatggcttagacttgtgtcctgtggccagtgacctcacagtttttaccaaaatacttgttttcattgctatcacgtgatagctactctaagtatgattatccttcttaattctgttaggaatccccccggcattccctgtgagggaagtatattagtccttgaatttccgtttcaaaagatgcgtactgatttacttggtatatagcttctgtaagaggaagtttcatttgggaaagaaaggttgtgctaaggttccctcagaaactttctaaattgccttctctaaaattgcctgtgtttccctaagcctaagagtaaaatacaggaaatagtgatgatttttatgtgcttgaggaatcttctaagaagagtgaccaattttattctacttatactgatacttgtactgatttaccttgtggaaaattcatccagtggctacaattactaactcactccaaaggcatgagtgggaaactattaaaataacacatcacttagctgaaactcttgaatggttgctcttaataaccatttttctgaataatttaaagttcccatgttttttaaaaaggtttattgacttagatctgatttgaaaagtgtaatgtagcttattatagaatatttaaaacataagaaaaacaaacaggaaaaaagtcatcccaactctagaaacttaacttttttcaaacacattttttttttttttttttttttttactattttgactaaacatgtttctaaatgtacttcttggatctgactaaagactaaaaatggaaggaaacacaagtagaaattataaagtcaggatcaggccagtgtggtagctcatgcctgtaatcygaaaaccttgggaggctgaggtgggaggatcacttgaggccagaagttggagaccagcctgggcaacctagtgaggccccatctctaccccmaaaaaaaaagaaaaagaaacttatttatttaatttcctctctttaaaggtatcatatgcaaaacagaaggtttgggggttttggggttttttgtttgtttgttttttgagacagggtctccctctgtagtccaggctagagtacagtggcacaatcatagctcactgcagcctcaaactcctgggctcaagcagtccccactaccttagcctcccgagtagctaggactaaaggtttacaccaccatgcccagctaatttttctattttttgtagatacagggtcttgctgtgttgccagggttggtctcaaactcctgggctcaagcaattctcctgcctcaacctcacaaagtgctgggattacaggcatgagctgctgtgcccagccagaagttttcattttagcacagtttaatctttcactttctggtttctgctttttgtgtgtcttatttaagaaatattttctacctctaggacataaagatattttttattttcttctaaaagtcttactatttttccatttacatttaactcattgatagacctggaattctttttttttttaatatagagtgaggtaatgttatttttccaaattgaaaactagttgcctaaacactacttttctaagaagccatcttttccccatgaatttgcaatggcaactctgttgtagctcaagtttccaccttttctctatttatttatagctatgccaacaaacactgcatttattattatagatttttagaagtatttaatctggtaagactagtctctcctatcatttttacttcagtaagtgtatatgcctgttcttgatcctttgctttttcatataaattttagaatcaacttatcaggttcccaaaaacattgttgagactgtgattgaatttgtattgaatgttatcttcttctccaataacccagcatatctctccatttaggtcctttgtaatatctttccataaagttctatagttttctttattagaggctggcataacttgcatcgcttttgtatttttaccaaattacatttttaaaactgttgctcttgtatatatatatgtgtgtgtgtgtgtgtgtgtgtatgtgtgtatgtgtgtatatatgtatatgtatatatgtatgtatattctatatacaaagctgctctcaatgaaaatattgacaaatttatttcttcttttacaattcctgtgtgtgtgggggtgtgtgtgtgtgtgtgtgtgtgtgtgtgtgtgtgtgtgaagatctcgcactgttgcccaggatagaatgagtacagtggcatgttcacagctcactacagcctcatccttctgggctcaagcaatcctcccacctcagcctcccaagtagctgggactacagtcatgtgccaccatgcccagataatttctgtattttttgtagagccgaggtttcaatttcttacccaggctggtcttgaactcttgggcttaagcgacctgcccaccttagcctcccaaagtgctggaattacaggcacaaactactgcacccagcctccctttacaattcttaaattttttttagtcttgttactcttgttagggcttccccactatgttaaatagtattgattttttattttattttattttttgatacagagtcttactctgttacccaggctggaatacagtggcacaatctcagctcaacacaacctccacctcccggattcaagcaattctcatcccttagccaaccgaatagctaggattgcaggcacacaccaccacacctggctaatttttgtatttttagtagagatggggtttcaccatgttggccaggctggtctcgaactcctgacctcaagtgatccaccagcctcggcctcccaaagtgctgggattacaggtgcaagccattacgcctggcctgattattattattttatttttattttttatttatttatttttgtttttgtttttgtttttttttgaaacgaactcgttctgtcacccaggctggagttcagtggcccgatctcggctcactgcaagctccacctcccgagttcatgccattctcctgcctcagcctcccgagtagctgggactacaggcacccgccaccacccccagctaatttttttttttgtatttttagtagagacaggttttcaccatgttagccaggatggtctcgatctcctgaccttgtgatctgcccgcctcggcctcccaaagcactgggattacaggcatgagtcaccatgcccagccctcattattatttttaatgggactgtgtatgttttctatttatttgtaattttactgtttccctttttccacattttctgcagttattgggtatgacttttataatcagaaaaacaatattttcacttgctttcttaaaaataaataatctcttagtgaaggcctgaggggtccttataggtgtaatatggatggccatggagctgctatggcttcaggctttatatatatgaggtattgctrtctattcacagtattctctgacctttaaatttatgtggcttaaaatctattttcaatgcataaacatttgtatatttttccaggtgaacaatgtactacctagatgtataataatttaaatttagtgtaaaatgagattttttasaacaaattatatatttccaaaaactttaaaatgtttaaactctacataggcatatggtggtctactatatataaaaggtttctgggaactatttaagaagataaaaatagagccactgacatgtatttgtactgtatctttgggaaaacaatttcagcgtaatatatacttgtaaaaagtgaattagtaaaactattctggccgggcacagtggctcacacctgtaatcccagcactttgggaggctgaagtagaaggattgcttgagcccaggggttcagaccagctgggccacatggtgagactccatttctacaaaaaatagaaaagttagtcaggcatagtggcacacacctgtagttctagctactcaggaggctgaagtgggaggattgcttgagcccaggagtacaaacaaaaacaaaaaaaactttattcctccaagtttaaaaagtgcagcttgcttacttgttgacaagctgctgaatatagaatgaacagtaatagagtctactgggttttaggttccagctaccatgaaaaactattaaggaactataaatagaaaagaaaaaatggactcataaagactttgttcatttccttctaaaatatccctagcttattaagtgtctccattaaggcttccgtacccactgacaatatttcttgattctctgtaaatgacactaagaaaattctagatgctatagctcttctatagtaactacatggaatagacagcttaagttaggaaattacattgccttttgagcacaccagcaatcctacctctgtgtgctttgaggaaactagtgtagcacctcctctttttgtacaactttaacatatgtttcaggtctcatgtcaaataccagatacaatttgtcaatttattgatcacattttgtaacatcagtaaaagtctaaataaaatcaaccagaagataataggctacaccaattgttaatgaacagaggtttatttggaaagattgttccaggattcagagccagctaacaatagctctaggaacccaatttattgtcgatgagagattctcaccttatgcctcgtcagctagaggacctaaagtctataacgtctcctaaagctgggaaaagcctgagaggcccaggttgatacgcctatgtgtaacaggatagagagaaggaaccaaagtaaaaaggcaacaacaactgcctcagcatatgagttcttgatttggaaaaacctgcactgatggttcttgttctctggtgtaatgcctcctatgcctgctctcttggctgtgttgaaaagcatacatacagagctgtgctcttcattttcaagatgatgtactgataaggaccacaagccagtggcactgggaaaaagggatcctaagagactttttcttattaaacatacattcaaagtcagttatttaatattttgctttttggactcttggtaagcccaaatcttgttctaaaaagagcagacttttttgttttgttttgttttgtttgagatagtgtctcactctctctcccattckggagtgcagtggagcgatatggctcactgcagccacaacctcccaggcttgggtgatcctcccacctcagcctcctgagtaagtagctgagactacatgtatgtaccaccacgcctggctaaatttttgaatttttttgtagggacggaattttgccatgttgcccaggctggtctcaaacttctgggctcaaatgatctgggtgcctcagcctccctaagtactgggattacaggcatgagccaccaggcctgacttgtttttgtttttttgttgttgttgttgcccaaactagagtacagtaggctcaatcacagctcactgcagcctcaacctcccacctcaagcagtccttccacctcagcctcccaagtagctgggattgcaggtgcatgccaccacgcccagctaattttttttttttttttatgtagagacgagtctccctgtgttgcccaggctggtttcctgggctcaaatgattctcccatctcagcctcccaaagtgctcagattagaggtgaggcatgagccacccaacctagccttttttttttttttttttttaatacctgcaagccacatttatctgctatagtgtttaccaaccacactctggggcctgaggctgtgtttcagtgaatgaaatattaaaaagtactttgtttacttgctgacacagtacagtatttgtatctattaatagcatattgttattgttggttttttttttcgaaaaacactttattggaataatatacttaaaatgcagggaacttttaaaaatagagtgaggccaggcatggtggctcacacctataatcccagcactttgggaggccgaggcaggcggatcacctgcagtcaggagttcaagaccagcctggccaacatggtgaaacccgtctctactgaaaatacaaaaactagctgggtatagtggtgcatacctgtaatctcagctactcaggaggctgaagcaggagaatcacttgaacgctggaggcggaggttgcagtgagccaagatcacaccagtactccagcctggatgacagaggagactctcaaaaacgataataataattataaaatagagggtgaaagaccaaacatcctatagaaaaataagcaaaagataaaaattaattcacagagagatttgttctttaaagatatataaaaagatgttcagcttcacttaataagagaaatccagattaaaattatactgaaatatttctaacccatcggactggcaaaaattcaaaagctggacagtgtactatattggtgaagttgtggggaaaygggcactcttacattactagtagaaatagaaaatccttaaacctctatgaaggagaatcactaataaaactatgtatgcatatagttactcattaacctagcagttctacttctagaatttatcctgaagatacgcccctaataacacaaaaatacatatgtaaaattttattcattgtagcattgtttatatttccaaaacattggaaactatgtaaatgcccacacataggagatagattaaactacagtgtatttatacatrgagatactatgtagctgtaaaaaagaatgaagaaaatctctaccaattgatgtataatgattaccaggagattttggtctctgactacaggagtctcgctctgtcacccaggytggagtgcagtggcgtgatctcggctcactgcaacctctgcctcctgggttcaagcgattcttctgcctcagcctcccaagtggctgggattacaggcacccgccaccacacccggctaatttttgtatttttagtagagacaggatttcaccacgttggccaggcaggtctcaaactcccgacctcaggtgatccacccgcctcagcctcccaaagtgctgggattacaggcgtgagccatggcacccagcctccaagagatacttttaagtggaaaaaaagcaaagtgtaagagagcatatatagtgtattacctccttttgtgttaaaacaaaaaaaaaaagaaaagaaaaagaaagaaaaggaagaaaatgtacatacatctgcttacctttactaaaagaatacaggaagataaaccagaaaacagtgaaagtggttgcttaaagggatggtgaggaggacatggtaaagagagtcactcttctttgagcatatcttttatagaatttttacttttagaaacatgttaatgttctacatattttttaaatattaaatcaataaggatagaatgtaagaaatgggactaaaactgaaagcaaactgaaaaacatgaacccaactatttccaatcttttcttaagtaaaatgagctccccaaagggggtaaaaaagagaaccaatctaagttacatgctgaacacagtatttgactacaccagagaacagaaaattaaccctaaactctttttagtagatttggatttttttcttttaaagttagggatgaagtgacttggaaactattttagatgtattacaaaagtgagtaaacaaataaatttgttgatatttttgggagctargttctcactataaaagaaggaacatacaaataatgggatgaggaaaggcaagaaagaaccctgtggagatggactagaattggaagtactggtgtcagctcaatttctaaaataggtctctgtacacatgtatacgtatacagttatggatgtaagtgtgtgtgtgtgcatgactatgtatacatgcatacttcccagctctgttcattaacatggtctagaagcaaagagcacagctgccacccagatcttggtctctaataccattctrtgctaaaaagaaccagttatcctcagataaatggctgattccagggcatagtagagcccagaacattatgccagaacataaagaagggatcaaaaataatgtgatggcatatccaatgacacgggagccaccagcctgaacggctcccactggcaaaaactggaatattttaaggaccaaattaattaagggctgtaagggattataaaccattgatttaaaaagaattgtgggccaagcatggtgtctcacacctgtaatcccagcactttgggaggctgaggtgggcggatcaccttaggttgggagtctgagaccagcccgtccaacatggtgaaaccctatctctactcaaaatacaaaaattagccaggcatggtggctcatgtagtcccagctgctacttgggagactgaggcaggagagtcacttgaactggggaggtggaggttgcagtgagctgagatcgtaccactgcactccagcctcggtgacagagcaagactccaccacacaaataaaataaaaataattgtgcattcttattgataataaatagattttaaaataataaatgggagaagaggtaggctcttgtttatggtagaatggtgagggctgactggtaaatgtgaaaatcatttcacagctgcagttggaaaatcatcacagtatgagttgcttcagttaaaaattatgagtggatactcaatctgggagggggttgggacttttgataaagaacagaatatttatgtgatttttttttttttttgagatggagtctctgtcgcctcggctggagtgcagtggcgtgatctcagctcactgcaacctctgcatcccggattcaagcgattctcctgcctcagtttcccaagtagctgggactacaggcacccgccaccatgcccagctaatttttgtatttttagtagagacagggtttcatcatattgaccaggctggtcttgaactcctgaccttgtgatccgcccccctcggcctcccaaagtgctgagattacaggcaggagccaccatggccagcctaatttgatttgaggatttgctcagtctgtcttccttccttctttccttccttccttccttccttccttccttccttccttccttccttcctctctctctctctggtctctttctttcttttttctttttttttgagatggagttttactcttgttgcccaggctggagtgcagtgacatgatctcggctcactgtgacctctgcctcctgagttcaagcagttctcctgcctcagcctcccaagtagctgggattacaagcaagtgccataacacctggcaaatttttgtatttttagtagagacgaggtttcaccatgttggccaggctggtctcaaactcctgacctcatgatctgcctgcctcggactcccaaagtgttgggattacacgtgtgagccaccgtgcctggcctatgtgatcttaaattgtctattcacaaactgcttgttagatgcaagggaaaaaataggtactatacaatggagaagtaggacaacaccttgatcaggtggtcagaattcctatcaccagtgcacagcagatggacatgatgtgcctctaaatgtgacactttgagaaggatccatcataatgtgtgtagtagtctgcctgggtgtgcatagtctgaacttaatcatgagaaaatattagacaaatccaaaattagaatcagtctattaaaaatgggaaaataaataagtaatgggataagcgcgtcagacacagtggctcacacctgtaatcccagcactttaggaggctgaggcgggtggattgcttgagtccaggagttcgagaccagcctgggcaacatgacaaaaccscatctactaaaagtacaaaaaaattagccaggcgttgtggtgtgcacctgtggtcccagctacccgggaggcagaggtaggagaatcacctgagcctagggagttgaggctgcagtgagccaaaaaaaattatgccactgcactccagcctgggcaatcagagtaagaccctgtctcaaataaataacaaataaattaaaaatgaggtgaggtaagttatgactatattcttcaaaaatgtccgtatctcaaaagtcaaaatctgaggaaatgttccagatttttaaaaactataaagataccacagttaaatcctgaactagactctgttccagaggagaaaatttccataaaggatattattgggtaattsactaaattgaaatatggacagtagattagataacagtgttactgaagttgatgttgatgtccacactgtagctatgtaagagaatatccttattctcagaaaagatacactgaagttttcagaagtaaaaagacatygtaaatgtaacttcctctcamatagttcagggaaataaaattgtatgcagagaaagagtacatgcaaatggtgcaaaatgttaacaatattgtgcacctgggtagatgatatgcagatgctttttgtactatttttattcctgcaacttttttctgaatttggaatccttttcaaataaaatacattttaagcaggctaataattaaaaatctaaactaagattatattgggaaacattatgctaagtgaaataagctagacacaaaaagacaaatattgtatgatctcacttatatgaggtacctagaataggcaaatttatagagacaaaagtagagtagcagttaccaggggctagaagtaaagaggagtggggagttattgtttaatgggtacagagtttcttttggggtgatgaaaaacttctaaaaatgcatagaggtagtagttgcacattgtgaatgtacttaatgtcactgaattgtgcatttaaaatttgttaaaatagtaaattttatgttacgtatatttttcaaaataaaaaagtatcttggggatgtttacttccattataaaaggattccctacaattatttaaatataagctccctttgtttatttaaacaattttatacagctttcaagattcacatcagatactttttgaagattccacttataactgattatgtagtatctgtatttcattttagttggtttttaaaaatagattattgaaaaactgacattcaccttgggcaaaggtcttagcttttttcagcatccaggttctccacttgtcaaagcaaaagattcttcagaatacttcattcatcatctagttctcttagaaaaaggatgctggtggttttgcttcacaaaaatatttcataaacatgagctttttctttttctcacaatgatcataccaggcggaatgaagaaaacagatgttgcttataaggcgtctaatagacatgtttgcattgtaagctgatctgactctgaatttggcatctgctccattcactgtgtggactgagcattttcgcctcacagtttggcagaaaagttaatattgacttttgactgttacctgaaaacttggtgataaaatactcttactaaacctcttgagagagtgattttacagtctcagcaaatgtctttaaaatacatcattctattaaccattttaattttattctttggttgggaatacttatttgtttcatctaatacagagcattccccaaatctgactgggaaaagtctgtgtggtcagaatggtagaagaaggaggacataaatcacttataatgttctctacaggtcattataccacagcttctcaattaaccttcatccccctcaggctgcccagggcctcagggaaggcccagaagcctagctgcagcacagtttctcattattatctgctcttctgagtatttgagtgttaactgcagcagctcaggtttcccctaaggggaaggtagcccagattcttctgctcttgacctgtcttatttgcaattatcctttttttcttttttcacagttttattgtggcataatagacatacaataaacggtatgaatctaaagtttacaattgtataactttggacataygtgtacacccatgaaaccatcactatggacatatccactgctcccatggccttttctaatcatgccttcctgctccttctcatccccttttggattgtttccagtttggggctattacaaataaagctgctgtgaacattcatttacaagtctttgtgtggatatgtgctttcacctaccttgggtaaatacctagaaatagaacggatcatatgatatgcacatgtttagctttttaagactgacagatggtttgggaaagtggtcttagcattttacattcccacaattagtgtgtgagagttccagttgatcacacccttgccaacacttgttatagtcagtcttttcagttttagccattctgcgagtgtgcagtggtatctaattgtgattttaatttgcatttctttaatgaataatgatattgaacattttttcatttgcttatttggcatctatcttctttgctaaaatgttaaatacttttgcctactttgtgttgagttgtttcttgttattgaggtaccaagtatttaattgtgacaaagttcagattattttttcttctataaaagttgyattcttagccaagtgtggtaacttatacatgtaatcccagtgctttgggaggccaaggcgggcagattacttgagcccaagagttcaagaccaacctgagcatctctacaaaaaaatgcaagaattagaggaaagctgaggtgggagaagagcttcagcccagaaggtcgaggctgcagtgagccatgagtgtgccactgcactccagcctgggtgatagtgagacactgtctcaaaaataaataaatttttaaaaaagaaaagttcatactttttacctcttactaagtgatctttagcaaacccaagatcactaagattttcttctatgttttctcctcaagagttttaggattttattccttacatttatgtctgtgattcatttcaagtgaatttttgtagatagtgtaaggtaaaggttgaaatgcttttttttcacacaatttgttaaagtgtcctttcttgatgggattgtttgggcacctgtgtcaaaaatcagttggctatacagaagtaggtttatttctggactctgttcagttccattgatctatttgtctatatgctaataccatagtgtcttggttattatcattctataataaattttgaaatcaggtagtataaatcctctggctttgttcttctttttcaaagttgagtttttgctaacctaggtcctttgaatttccatataaattttagaagcagcttgtcagtttctataagaaaaatctgctagaatttttattagtattccaatgaattaatagaaaaattcctgcagaactgataatattgaatcttctgacctttgaacactttatgtctatttatttaggcttcttttatatttctcagcattgttttgtcattttcaatgtgcaggccctacacaacttctgtcagatttattctaaggtacttcaaatatttgaagtatgtgaagtaccttagaataaatatggataaatattcttaactttttaatcaatttttgtttttgagacagggtcctactctgttacccaggttggggtgcagtgatatgatcatagctaaccacagccgcaaccttccaggcttaagcaatcctctcacctcagcctcctgagtagctaggtctacaggcatgcaccaacatgcatggctaatttttgtattttttgtagagacaggatttcgccatgttgctcatgctggtctcaaactcctgagctcaagcaattcacccatcttggcctctcagagtgctgggattataggcatgagccacgatgcctggcttattcttagtaacttctaattgttcattgctcgtatgtataattatatatacacattaccagtatagataatttacttttgtatttttagtagagacggtgtttcaccatgttgattttgagaccctatcaacatatgcttccctggctgggtgtggtggctcacgcctgtaatcccagcactttgggaggccaaggcaggcggatcacctgaggtcaggagtttgagaacagcctggccaacatggtgaaaccccatctctactaaaaatacaaaaattagctgggcgtgatggaaggcacctgtaatcccagctactcgggagcctgaggcagaagaatcgcttgaacctgggaggcagagattgcagtgggccaggatcatgccattgcactccagcctgggcaacaagagtggaactccacctcaaaaaaaaaaaaaaaaaggaagaccagattgacttgatggcaagttgttgtgtctcaacttgagctctttagaataaatattaggggaagctcatgatgtttgggaaaagatctcccgaccgggcacagtggctcaacacctgtaatcccaggccaaggcaggcagatcacgaggtcaggagtttaagaccagcctggccagcatggtgaaaccccatctctactgaaactacaagaattagctaggcatggtggtgcatgcctgtagtcccagctattcaggaggctgaggcaggagaattgcttgaacctgggaggcggaggttgcagtggccaagatgatgccactgtactccagcctgcgtgacagggcaagactccatctcggggaaaaaaaaaaaaaaaaaagacctccctaacggtaacgcacaagactttctcttactgtcaaggctgaagaatgagacaggtgcttagatcatatattggtctgacccaatatgacatttctgctgctgttatacaatactcwtgtgtttttttttgcctgtgttctaggttttctgtctcaactggtctctgacaagcctctgactgaatgtatccgtgctggccactatgcagcaagcatcataattagacggactggctgcacctttcctgagaagccagacttccactgatggaagagctgaaaacacaagcccaggagtgcagacactgccctaattgcttcctgasaattcccatattaataaagaagaaaattatctgccattttttcctactataataatgctgaatcttaatttagagggtacaagggtatggtaatgcttgtagaatctttattatctcaacaatctaaaaaatgatgtttatttccatagtttgatagtgccacttaaatgccaattaaacaagaatataacatttcaatagaaatttttatttcattttcaattactttgtaaattcgtgtgtatttagtacactgatttgtttttttacatttctgctttgaatgcagatgcaatttaatataatagattttttaatgaattaatcttaacatagtaatctttagctttttatacaaatatatttaatttaggagtatatgtgtgtctatacacacacatacataaatataccacatatacacctgatagtcaaataaggtacagaaattttatcttgtcaattatgccaaataatctctttaatgtgcactcaaacatgtaataaactttggataattaaataatgtgccaaatttaagttgtaccacaatattcaaatcatagtcttatggaactctgtaattggayacaaacaaaaacttgtcatataggaatttttttctgtcttttccctgtgtacagcaaactgaggaagaaagatcattatttaatactgggccctgaaatgacacccaatttgttaatggaattatgaagaacagcaatataatacactgaagaataacttagtatcagagaccaataaatcacttttttaaggatgacaaaatggtataattggacttctggagtcagactttatatgaccttaggtaaatcttcgaacctcagtttcctttttgtaaaatgagataataacccttacatagaaggtcattgagatgatttgagmgagattaccaagtataagatatttgttataatgccttgtaaatgctttataagtagctgctgttattatcattatgattattttctttttgaagaaaaaaagataatgtttgtaaaactgaattcaaatcataggaaaggatttggccaggcgctgcagctcatgcttgtaatcccaacactttgggaggccaaggtgggaggatcacttgagcccaggagttcaagaccagcctgggtaacaaagtgaggccccacctctacaaaaaaatttttaaattatccagccacaggctgggcacagtggcttacacctgtaattccaccactttgggatgaggcaggtatcactagaggtcaagagttcaagaccagcctggccgccatgttggtgaaactccatctctattaaaaatacaaaaattagccaggcatggtggtggatacctgtaattccagctacttgggaggctgacacaggagaattgcttgaacccaggaggcggaggttgcagtgaggcaagatcacaccactgcactccaccctgagcaatagagtgagactccatctcaaaaaaaaaaaaaaattacctgtggtggtttgcacttatagctactcgggaggctgagttgggaggatcacttgagcccaggagtctgaggctacagtgagccatgatcacacccatgtactccagcctgggcaacagagcaagaccttgtctcaaataaataaatatataaagtcaaaaacttgtatgttgaactatagaaagttgagtactatctgtagtgcaattaatttaaatataaagtaatttgatattttacagtggtgccaaagtgatccaatggggaaaggaaaatcttttcaacagatgatgctataaaaacttgatattcataaggaaaaaaatgaatctttgaccctgatctcataccatacaaaaaattagagataaaacatggtcacaacataacagctaaaactattagacttaaagaagaaaacaggggaatattttcacaagttggggtaagcaaaagtccttggaaagaaccatgagagcatgagagcactaaccatataacaaaaatattgataaattagatttcaaaaaattagaactttatgttcatcaaaagataccattaagataccccataggccaggatacaataatcacaacacatatatctgaacttatattcagaatgtatcttaatactcttacaactcaaaaatacagatactttacaaaagaagatatatgaatcactaagaagtacatgataaagtattcaacattgttatcatgggagaaatgaatgttaagacctcattgagaatactactacactagaatgactaaaattaaaatgacaacaccaaatgttggagaggacatggagcaacattgccgatggactgaacaaccactgaacattgctgatgtaaactgaacaaccactttgggaaaaggccctcaagtttttcataaaaaagtaaacatacacctattcgttcatccagttgtttcacttctgtgtatttacccaacggaagtgaaagtatatgtccgccaaaggacttgcagcagttttattcatcattgccaaaaactggaaagggatagttgtccatcaacaggagagcagataaactgatatattcaaacagtggaataatacttagcaaaagatgaccgagtgtgatggcccatgcctgtaatcccagcaatttgggagcctgatgtgggaggatcacttgagcccaggagttaagaccagcctggacaatatagtgaggaccccatctctacagagaaaaagcaaaattatctgggcatggtgatgcacacctgtattagctacccaggaggctgaggtaggagaattgcttgagcccagaaggtcaagactgcagtgagccatgactgggtcactgcactctaacctgggtgacagacggagaccctgtcccaaaaagaaaaaatagcaaaaggaagaaattaactgctgataaaacaacatgaatcagttcaacaataaaaaaaaccttactgagttaaaccagatacaaaagcatacaaactgcgagattctatgtatttgaaagtctagaacaagcaaaaccaacctatagtgaaaaagagcagtggttgcctttgtaggggaggaggaaagtggaaactgactagaaagggtcgtgaggggactttctgaactgatgatgatatgccgcatcgtaataggattacacagttacatgcatttgtcaatgctcaggaaatagcccacttaagttgtgatttcattatatttaggttttacgtcacacacacaaaaagaattataggctggccatggtggctcacacctgtaaccccagaactttgggaggccaaggtgggtggatcactttagcccaggagttcgagaccagctgggcaacatgatgaaacgccatctctacaaaaaaaaaaaaatacaaaaattagctgggcatggttgtgcatgcctgtgatcccagatactcaggaggctgagatgggaggatcacttgatccccggaggttgagggtgcagtgagccttgattgcacaattgtattccaacctgagggaaagcctgcctcaaaaaaaaaaaaaaaaagaattatacgcaaataatgaattctagttaaataaaatacatactgatagagataaagtgtactgaggttttcaacctatggtaaagtgcatcaagaaataaacacaaagagggagatgagtagatgaaagctaaggtaaatataacaaaattttttgagacagggacttaatctgttgcccaggctggagtgccgtggcaccgtctcggctcactacacaacctccgcctcctgggctcaagcaattctcatgcctcagccaccctagtagctggaattataggcatgtgtcaccacacctgtctaatttttgtatttttagtagagatggggttttgccatgctggccaggctggtctcactcctggcctcaagcgatcctcccacctcagcctcccaaagtgctgggattaaaggtgagagccactgcactcagccaatttcctattttttaaaaggctgaatagtattcaattgtgtatatagattacattctaaaaattaatttatccattgatgggcactttggttgtttccatgtcttggctattgtgaataatgctgctgggagcatgaaagaacagacatatctgtgacatactgattccagttcctttgggtatatgcccaagaagtgggatcgttggatcatgtggtaattatatttttagttttttaggaacctccatgctgttttccaaaatgactgtactaatttacaatatcaccaacagtatgcaagtcttcccttttctccacatcaccagcatttcttatcttttgtgtttttgataatagccagtctaacaggtgagaggtgatacctcattgtggttttaatttgcatttctctgatgactagagatcttgagcattttttcacgtatttgttggccattcatatgttttcttttgcaaaatgtctattcgtgtctttttcacattttaaatagggttatttgttttcttattactgagtagttttgagttccttatatattttgaatattagccccttacgtgatgtatcatttacaaatattttcttccaatccgaggggtgtattttcactttattaattctttactatgctgaagctttttagtttgatgtaatcctatttttctacttttgttttcattgcctgtgcttgtggagtcatattcagaaaactgctctccagatcaatgtcattaagtttttctcctcttttcttctagtagttttatagtttcagatgttacatttaactctttacactctgttgcccaggttgaagtgcaatagtgcaatcacggctcactgcagccccaacctcccaagctcaaacaatcctcccacctcagcctcccaagtagctgagaccacaagcatgcactgccacacccagctaatttacttttattttttgtatagatggggtctccctatgtttcccaggctggtcccaaactcctgggctcaagtgatcctcccacctcagctccccaaagtgctggcattacacagcacctggcaaagttgttcattgtatgaggtgagataaggagctattttcattcttccatttatggatatccacatatggaagaatggaagttttctcagcaccatttattgaaaagactgtcctttccccattgtgtgttcttggcaccttgtcataaatcaattgaccatagatgtatggatttatttctggaatctctgtcctattctgttggtcaatatgtctgtttttaatgctagtaccatacagtttggttactatagctttctaatagattttgaaatccagtagtgtgatgcctcctcctttgttctttttagtcaagattgctgtggttattcaggtcttaggtgcttctatataaattttaggattttttttcctctttctgtgaagaatagtattggaggccaggtgtagtgattcatgcctgtaatctcagcactttgggaagctggggcaggcagattgcttgagctcaggagtttgagaccagcctgggcaacaaagtaagaccccatgtctacaaaacatacaaaaattagccagatgtagtggcatgcacctatagtcccagctactcaggaggcagaggtgggaggatggcttgagcttgggaggcagaagttgcagtgagcactcctgcctgggcaatagagcaacaccctgtctcaaaaaaaaaaaaaataaataaaataaaaagaatgacactggaattttgatagggattgcatcactttgggtagtatggacattttttaaatattaattattccgatgcatgaacaaaggatatctttccacttatttatgtctttagtttctcttttaacatatttaatgtttccaactgattcttaaatttctttcatcaatgtttatagtttttagtatatagatctttcacttccttggttaaatttactccaaagtaatttattcttttgttgctattgtaaatgggattgttttcttattttttttcagatagatcattgttagtatatgaaagtgctactcttttgtatgttgattttgtatcctgcaactttacttcattcatttatcagttctaatattttttgggtggaatcttttggatttggtatatataaaattctatcatctacacagacaatttcactttttcctttcctatttggatgccttttcttttcttttcttttcttttcttgcctaattactctggctagcacttgtagtaccattttgagccaaagtggtgggaatgggcatctttgtcttgttcctgatcttagaggaaaatccttcaactttttatcactgagtataatattagctgtggcccggtcatatatggccttaactgtattgaggaacattctttctatacctaacttgctgagagtttttatcataaatagatcttgaattttgtcaaatgttttttctgcatctattgagatgatcacatggtttttgtctttcattctgttaatatgatgaatcacatttattgatttgaatatgtttaatcagccttacatcccagggataaatcccatttgatcatggtaaatgatccttgaatatactattgaatatgctttgctagtattttgttgaggattttttacatttatgttcatcattgatattggctggtagttttatttacttgtagtgtctttgtctggcattggtattaggttaatgatgaacttgtttagaagtattccctcctcttcaatttggtggaaaaatttgagaaggattggtattagttcttctgtaaatggtaaaattcagccatgaagtcatctgatcctgggctttttttttttttttttttttatgggagacttaattacagactgaatctacttactcattattggtctgttcagacttccaatttcttcatgattcagtcttggtaggttatatgtttccaggaatgtaccatttcttccagattgttcaatttttttggtgttcatagtacttttttatgatcttttgtatttctgtgtgtgttatcaattgtaatgtctcctcttccacttttattttcttttttgtcacccaggctggagtggagtgatgtgacacaacgcactgtaacctcagactcctaggctcaagtgatcctctgcctgcattagcctcccagttggctaggactacaggtgctcactaccacacccagctcacttttttattttttgtagagacagggtcctgctatgttttccaggctgggctcaaactcatcttcccaccttgacctcccaaactgctgtaataacaggtatgagccaccgtgcctggccccattttgtttatttgagtcttctctc

SEQ ID NO: 94706 - DNA, 43614 bp, Homo sapiens
  misc_feature (1)...(43614): n = A,T,C or G
cccggccaccaccccatctgggaaatggggagcgcctctgcccggccgcccatcgtctggaatgtgaggagcacctctgcctggcctccctgtctgggaagtgaggagtgcctctgcctggcggccgccccgtctgggaggtgaggagcatctctgcccggctgccccgtctgggaagtggggagcgtctctgcccggctgccctgtctgggatgtgaggagtgcctctgcccggccgccaccccatctgggaaatggggaacgcctctgcccggccgccccaatctgtgatgtgaagagcgcctctgcccggccgccccatctgggaggtgaggagcacctctgcctggccgccccgtctgagaagtgaggcgcgcctctgcccagcagccaccccgtctgggaagtggggagcgcctctgcccggccgccccgtctgagaagtgaggagcgcctctgcccggcagctgccccgtctgggaagtggggagtgcctctgcccggccgccccgtctgggaagtgaggagtgcctctgcccggccgcccatcatctgggatgtgaggagcgcctctgcccagccgccaccccatctgggaaatggggagcgcctctgcccggccaccccgtctgggaggtgaggagcgcctctgattggccgccccatctgagaagtgaggagtgtctctgcccagctgccccatctgggaagtggggagcgtctctgcccggctgccccgtctgggatgtgaggagcgcctctgcccagctgccaccccatctgggaaatggggagtgcctctgcccggctgccccatctgggaggtgaggggcgcctctgcctggccgccccgtctgggaactgaggagcgcctctgcccggctgcccatcgtctggaatgtgaggagcacctctgcctggccgccctgtctgggaagtgaggagtgtctctgcccggcagccgccccatctgggaagtgaggagtgtctctgcccggccgccccgtctgggaagtggggagcgtctctgcccggccgccccgtctgggatgtgaggagtgcctctgcccggccgccaccccatctgggaaatggggaacgcctctgcccggccgccccgtctgggaggtgaggagcgcctctgcccggccgcccttcatctgggaggtgaggagcgcctctgcccggctgccccgtctgggaggtgaggagcacctctgcccggccgccccgtctgggaggtgaggagcgcctctgcatggccgctgtgcaatcttccaagtgtgaagtgacagcctttctgcaggtgtacccaacagctccgaagagacagcgaccatcgagaacaggccatgatgatgatggcggttttgtcgaaaagcaaagggggaaatgtggggaaaagaaagagagatcagattgttactgtgtctgtgtagaaagaagtagacataggagactccattttgttctgtactaagaaaaattcttctgccttgggatgctgttaatctataaccttacccccaaccctgtgctctctgaaacgtgtgctgtgtcaactcagggttaaatggattaagggtggtgctagatgtgctttgttaaacagatacttgaaggcagcatgctcgttaagagtcatcaccactccctaatctcaagtacccagggacacaaacactgcggaaggccgcagggacctctgcctaggaaaactagagacctttgttcatgtgtttatcggctgtccttctctccactattatcctatgaccctgccacatccccctctctgagaaacacccaagaatgatcaataaatactaaaacaaacaaacaaaaaaaacttcatttcatgaagatgaaggaagggctggctgccctgaggcaaaggtgtgcgcaggagagtggcttctttttattttatttaatttattttttgagacagaggttttgctcttgttgctcaggctgaagtgcaatggcgtgatcttggctcactgcaacctctgcctcctgggtttaagcgattctcctgtctcaccctcctgagtagctgggattacagacacgtgccaacacgcccagctgatttttgtatttttagtagagacggggtttcaccatgttggccaggttagtcttgaactcctgacctcaggtgatccgtcctcctcagcctcctaaagtgctgggattacaggcatgaaccaccacatccagtctcttgaacaaaatcaggattctgttagaaaagagaaggtaatatggccattgggcagggagctaggagtgtttggtattaataccctccatctcacccactctctctcagtaaatgacataccattcaactcaaccagttcttgtagccagaaacctgggactcatcctcagatctccacctctctcctcttccacactattcaatcaataattccattgattctaccttgaacacagctctgtaatcagccttctcttttgccgcccaagttcaggaaaccaccatcacctttcatctggggccctgcagtggactgcattggtctccctgcctctagtcttactaaacctcaatccaagttctaagctgctgatagtaccttttcttaatgcaattctgatcatgttattttcccattaaaaacccttcttaagtttcccattgctcttaggagaaagttcaatcctcatatcgtgccttccaaggctttctagcttttggccctgactatttctctagtctcaccgctttctttttttttttttttttttgagacggagtcttgctttgttgccaggctggagtgcagtggtgtgatctcagctcactgcaacctctgccttctgggttcaagagattctcctgcctcagcctcctgagtagctgggattacaggtgcgtgccaccacatccagcttatttttgtatatttttaaatagagacgggtttcaccatgttggtcaggctggtctcgaactcctgagctcgtgatccgccggccttggcctcccaaagtgttgggattacaggcatgagccaccgcgcccggcctagtctcacctaaccgttttctggcttttgccttgtcccctttgccttattaattccatgtcatcattcagattgcaggttacaggtcacttccttgaagaggttttctgctcccataatgtaatgccctgtacttcctatatcattctactcacccaaatttattataattatttgttgaagtctgtctttcttctagactataagttctgactataaggcctagtagggctacatccctacccacctatcacagagcatgaccacagtaagtgttaaataagagttagttatagatttgaaagttttcatgttataggacctctaggtggtagctgacgccagagatatacatgagataatctagacaaagagtattgctctagagagagagagagaacatgagaaataagaaagacaatgatgattaagatgatgaaatgaaggctgagaaggagaatgagaaatgagtagcaaagaagtaggaatgggccgggcgtggtggctcatgcctgtaatcccagcactttgggaggccgaggcaggcagatcacgaggtcagggcttcgagaccagtttggccaacatggtgaaacccggtctctactaaaggtacaaaaaattagctgggcgtggtggcaggcgcctgtaatcccagctactctggaggctgaggcgggagaattgcttgaacccgagaggcggaggttgcagtgagccgagatcgcaccaccgcactccagcctgggcgacagagcgagaccccatctcaaaaaaaaaaaaaaaagaagtaggaagaacacgagaagagaatgtagtcgtggcctggcaccgtgtctcacgcctgtaatcccaacactctgggaggctgaggtgggcagatcatttgaggccaggagttcgaggctagcctggccaacatgatgaaaacacatctctactaaaaatactaaaattagccaggcatggtggtgcatgcctgtgatcccagctactcaggaggctgaggtacaagaatcacttgaacctgggaggtggaggttgcagtgagccgaaatcacaccactgtactccagcctgggtgacagagtgagactctgtctcaaaaaagaaaaaaaaaaaaaagaagagaatgtagtcgcaagccaaagaaggaaattagagacacccaacagggtcacccacagcaaaggggacaggatatggactgaaaagtgccactagatttggtcactgagtgagaaagataatatttgagaagagatggactccttctttgtcaaactaatgtacttaagaaggtattttccacctttacattaattcctctacctatccgtccagcaaagattcactaaacatctactctaggctgtgtactgtgctaggccctagggagacatagtagaccaaggtccttttgggcctatgggctcactacacttgcctgcaaaggaaagttacaattcaccagggctgggtgttttaccagacctgataatgactggctctctgaatacattcgatgaaacaagagccagtgtgcaagtctggaggtcagtgagactttattatcttgctctgagctggcaggaggcaaagggaaagtgtatgtagaacattattattgcatcactgctgtcttcttaagtcagtcacagatgagagtctgggtttttccaagaaaattggttccatctgctcaaaggcagaaaagtgatagagcagttcaatcaaaagagcatccccttaaaatattctttgaacttgatcctacttttttttctgaaacagagtctcgctctgtcacccaggctggaatgcactggcgtgatctcaactcaccgcaacctccgcctctcgggatcaagtgttctcctgcctcagtctcccgagtagctgggattacaggcgcgtgcaaccacgcccagctaatttttgtatttttactagggacagggtttcactgtgttggccaggctggtttccaactcctgacgtcgggtaatccgcccacctcggcctcccaaagtgctgggattgaaggcgtaagtcaccgcgcctggccttgaccctaattattgactaaactattgcttcgctaattttttttcctgcccttctgttttaacagcagtaaaacagtgtggtgaaatgttcaaaaaatcagtgaatcacagccttctgaaaattaatgggtgtcagtgaggtttgggagttggatggagacaaagggagggacaccataactaactggagatcttactaggttttcatttaatattcattttttacaatagacattgtttggaaaaaagggtttaattcaaaatgtcattaaggcacattatctttaatgttctagaaaaagttatttaaagaaatcctggccatgaaattaaaataaataaataaataaaaccaggcattctttgaaatgtgaataataatttgctaatttatatttaggattgtggatatactttttttcttttacatgtattcctggggaggtaagtgatgcaaatattttcccactgcctcaatcagactttagtttttggggtctggcctgatatgatggaatataaacaggaaatcaagatcagaagagcctgtccctgagaacactccttcacgggactctagctcacgcctggaccttcccagtgcttccatctgaagcccctggagacccaggtgggttaagtagggtggcaggggggatggagggggcggggggcgcgggggcgtaaatcctcccccactggggagggtgacagtaacaacttccagattgtttacaaagatacaggctctgcttcaggcatttgacgtgtattaactcgggtaatcatcccagtaactcatgaaatagttatattattatcttcacttcccagataagcaacggagtgagagagattatagaaagtggagaagcgagtaccttactagtagccactaggggtgtcagtaatatggctcaactttgttacgacggatcagaaaaatgctcacctttaagaccgcaagcagagcctgtctggggaagcaggtgacttatcaacgccttttgagataaggaataggactgcggggaggagtgtgtgagaatcaaaggtgagttccctgtgtgcgtggtcggcggtcaactcctagctagtccaagcttagagcctgcgcatttgccctcccgggtcagagcccaaagccgaaggaacagaaccagcgccggcggcagccacgtggcccagcctctgagccctagctgccatcgcggaggctgggcccgaggggcggggctggggagtgcggacacccgggcctggcggagtgcgcctgcgcacggggttggcccggcgggggtgggaacactagcagagccgcgttaaaggcgctccccgccccgcccgccggtccagtgctcgcagtgcgcaggcgtggggctctctccttgtcagtcggcgccgcgtgcgggctggtggctctgtggcagcggcggcggcaggcctccggcactatgagcggcttcagcaccgaggagcgcgccgcgcccttctccctggagtaccgagtcttcctcagtgagtgtctgcggcccgtggcccctccgcgcccgtccgcccattcattcccgggccttgcctccccgggagggtgcggcccgcgctcggccccaggtctccgacgcgggcccgtctcctcgggcgcgttgtggggcctggccggcctcacattgcatacttgccgccgccggtcggggcggcgagggtcgcctccggccatccctccccgctgaacggagatggtccctttgtcacgcctcggggtacccgaacctgggcccagctagttttgcaggtgtctggctctgacagggtctgttgggaaaaggaaatcaccgacccaccctagaaaggtgcttggaagtaacataattcccgtaagaggattgctcagtttggagaaaaggcgactccgggcgggggggggcagtgacttcctaaagaccttaattccgccgccgtagctcagattatcggcgctgagcggagccaagtccaccccctcgttttacagacggggaaactgaggcccggatcgggagccgtctgtgaaggcgctggaccggtcctccgcggcccggtcgtgctcctgcctctgcgccgcctgttttccctcagcgccgatgctgggaatgctccttatgaaacagaaagctgtttccctcaaatcaaacagatgacgtcagtctggaaacatgactgagaaagtgccaagtttttacctttgcaggattcggcgtctagggggtacctaccccgggtcctgcacctagggctgcacggggaaaccgggaggctgcatgctggcgccctccacgctccttagggcaccacgtttttttggccttgtaggtggaggaaagctacttggggtttttctttatcctcttactccccccacccccagctactaggagtagattatgggcgataacggaggcgttcgtaaatgtgtcaccacaggcgcttctattgtaacctctttacagttttatttggaaggaaatgggcaggtgcctcgaactctgagttggtgtatgaaggaaggggaagcggggagtagaggagacgaatgaataggcattgaaggaacaaaaagtagcctggtgcgggaggaaaaggaaagcgaactgtaaagcttacacatctagccaaaggttaactatcaggtaaaatccaggaagggtgagaactaccccccactctccattttatttaattttgcaattaagcagcaaggacagtccagtaacttttgactaataattcatgggactgtttttctggaaatagtgttggctccagaatttctctgtaggaaaggcttacagaggtgactgtctggtttgaaggtgaggggtggatcttcaagctatatatgcagaacaaacacactgcttttacttaggttatttatttgcaattaatatttggtggccgttatgggagaccaaagctactcctagaatttggcactagctgaagtaactgtttttatcaagtggaactctctggaacttaagaaatactaataattagaacccactacatagttatccaattttaagtgctttatccttccttaatagaaataaacttttttaagctttataatattacatttgtcaatttctttaaaactgataaagggctggacagactgcaaagtcacaattggccctaaagggacttttatgttttattgtttgttttttgaaacaaagtctcgctctgttgcccaggctggagtgcagtggcatgatcttggctcattgcaacttcagcctcccgggttcaagtgattctcctgcctcagcctcccaagtagctgggattacaggcacttgccaccatgcctgactaatttttgtatttttagtagagacggggtttcaccatgttggccaggctggtcttgaactccttacctccagtgatccacctgctttggccttccaaagtgctgggattacaggcgtgagccaccgtgcctggcctccactttgatttttaaacttgaagggatgcgatgtggacagtaggtttcctaaagaatactgaagaagttttaaaattactttttggctatagttaggcctctagaatatattagtaatatatatctagaatataatagaaattatttgtgaagatgtttgttgcaacttgattatccttaaagaaagtcataatctaagatggctggctgtctctgggaacaccacttttagcaacattgtttagtaaagtggtcccctcccttcctcccaagtacttcataatggttctgtaaacttaactgatgtaagatcagtccaaaacaatttaatcgccttttgtgtcctcagtagtctctgctctcactatagagattagtacttattagatgcctacagagtgcataggatgtaaacccagcctagcctgggagtacagtcaggagaagtgaagtatacaaacagtttttctagtgtaagaataatatcttggtttaaaaatgtgtactggtcgggtgcagggtgcggtggctcacccctgtaattccagccctttgggaggctgaggtgggcagactgctttgagctcaggagttggagaccagcctggggaacatggcaacaccacctccctacaaaagacacaaaaattagccaggcgtagtggctcatgcctgtagttccagcggctcaggaggctgaggctggaggatcacttgagccttcaagagggaaacagaagtggcagtgagccaagatcacaccattgcacaccatcctgggtgacagagtaagggaccttatctcagaaaaaaaaaatgtgtactgtgggcatttagcaatayaattaattatagtaataactttttctaatttattttgcagaaaatgagaaaggacaatatatatctccatttcatgatattccaatttatgcagataaggtaaggcatccttgtttttggacacagtctctttactcagatcagctagttctacatatgaattttcttatatgtctctcaacaagtgcttaaaatgcctyrttgtgctgtgagctaaaggtctgttgattaggctgggcgtggtggctcacgcctgtaatcccagcactttgggaggctgaggcgggtggagggcttgagtccagaagttcaagaacagcctgggcaacatggtgaaaccctgtctctacaaaaaatacaaaaattagccgggcatggtggcatgtgtctgtagtctcagctacttggaaggctgaggtgagaggatcgcttgtgcctgggaggcagaggttgcagtgagccgrgatggcactactgtactccagctgggtgacagagtgagaccctgtctcaaaaaaaaaggtccattgactaaataagaagttagtcttaaaactagattatttagttaaaggagcaaatataatttggggaaggagaggaggagtaaaagcaaaagtatttaatctgtcttggaaaaaaaaaagaaaaaattacattggtcctttttgtatgtgtatttggaactaaagtcgtaatacttcattactggttctaaaataaaccaggtagccagcacagaattttggctgtgggatctttatgaaacagtaaaagtaaactagattattcaatgagtataggaaaatttagtaacgggctagtaccgttaagatttgcacagttaagatagagttaatacaggtaggcacacagacttctaaaaggacatagctgttcctgtatacaccagtgagaagaaacctaactttaatacagattggtaggcttaccacaaattgtaaaagtctttacttttctaggggaaaaagaagtctacaactgtatacaccagaatagctgagtgtggggcaattgtaatcccacttgggaggctgtgctgggaggatcacttgagtccaggagtttgagaccagactgggcaacatagcaagaacctgtcttaggaaaataaataacaataaaatatatatcaaaatagttatgattcgtgggactgccagtgactcttggttttattttcatttttgtctttttatattgtctaatctttttacaaagaacatgtgttataagaacaactttaaacagtcattttaaaaaacacatcttttcttactctcctttccaatggaagcagtttgtactgtatttagcaacttaacacaaggacaaatatcttattctttttctacctttcagtttttttccttcagtaaggaagtttgattcacattgagtacaaaggtttttgagttgtaagagttacataggttattgactttctttagctagatgtcaatatacaacacgaacatcactttgcagtgcacgtctagaataatagtaattttgttcttgtgtgtgctgtcttactgtttttctgggcctgactattagatagaaatagacacattcattgcacttctaccaggaagtttgctgcagttctgtactgcctgaaattccaatttttacattgcttcccaggagccttcctgggtaagactccaattagaggcaatggagcaaacagccctaggccaattatgtgccacaaatacaggagggacttctaattggcatgtgtttttcctgtgggagtgtcagagtggtatttattcagaaactcgaatttgttacatctgatttcctgggagttgatataaactgcagaatccttccctcttcaattggccccattgggttggcttgaattatctgcttgttgtataatagcatgtatatcatactgtagcatctcagaccattttgagcaatgaagaggtataaaatgatgaccctaagtttattgataataccctggcatacaggtatgctacaggtaggaaaacattttcttgacatagagctattttcccagtgttctaagtgactgtattcctaccaaggaccagaatgatcatagatgttttggtacctactcttattgctgcttcaggttactccaaaataggaaacaggctacattttggtgtcctgttaagtgtgttcacttagattactctcagacactgaagccttataagggactggttgtgtctataaagtggattactcaaaggaagactctgcccttggcacgccctgtcccagctcaaaagcacaagttcttatgactctggattttaccagtagtctagacctcagtggaccttgggcagaagccttcctgcctgagaggctggaaggaattcttttgttttgttttaaaggaagttacttgtttaaaacacaaataaaggtgtggtagacatcattttggattatagcctttaaaaaaaaatctgattaacttgattcattagagtgtgattttctttcttttgtataaaaaatctattgtgattaagtttacatgaatacattctcacgggcttggccttggactttattcctaatatggtcagtcatccgagggattataatgagggaatgtcatgatctagtgagcatgtacctttaacacagctcagtcagctccactaaggaaaaatgtccaagggctcatattgatatcagactaaggaaaaatgcccaagggctcatatccatatcagactttttttttttttttttttttttgagatagggtttcactttgtcactcaggctggtgtgcagtggcatgatcttggcttactgcagcttcaacctctcaggcacaagtgatcctcctgctccagcctcctgaatagctggaaccacaggcatacaccaccacgcccagctaatttttctatttttttgtagagacagggtttccctatgttgcccaggctggtctcgaactcctggtttcaagcgatctgcccacctcagcctccagaagtgctggggttgcaggcgtgagccactgtgtccaacccatatcaggaccttttaatgtggatattcagtttggcatatgccattaggtaatcagtccagccagttctggaaaatcttgtgactcgcgtaccctgctttgattatttccgaatccagtgggtagagaaggtaaaggcaagggctcactggatatttttaaattgtagggatgtcctttgctctgggtcaattttaggatcaaatataaaagcacctatagctcagagtatcttctaacataaaacttctgagataccagaaattttccaaaacatggtataaacagtatgaaacactgggtagataaaagctttctctaaatcttaaagtgctcaaatatcatgacctgattttttagttttagaaatcagatatttttctattccatatcttaaactttcatgttaaattctagttctgacaatgtagggttctatttttttcaggtgattgttgggagcgtatagaagcatatataaatatggaatatgtgtttcttttttccccttctgaaagaaagtcaagcctctaatcaaatagattgatgcttcagaaacttaacagaatattatctgcaatttggcataaatgcatttttcttggggaagtttccatggtcaaaattattagtcattgcaaaacagaaaagtttgacaactggaaatgcagacccttttgcttgattttgtaaagacaggaaaataaacagattatgcttagaatatctgttttcaaaatttagtcatcataaagcttatctgaaaagaaaaaatagcaaaaatagcagctttttctttctttttctttttttttttaagacagggtctcactctgtcacccatgcagtgctgtgatcttggctcactgcaggctccatctcctgggctcgagcaatcctcccacctcagtctcctgagtagctgggactacaggcacacaccaccgtacctggctaatttttttgtattggtagagacaggctttcgctggtctcgaactcctgagctcaaacagtccacccacctcagctcccaaagtgctgggattacaggtgtgcgctcccacacccggccagcagcttattcttaattatgacatgacaaattaagttattgctctacacaggtacatatggtagtgtgtagtagcaaatacaggcatttgtttgagctgcaatgagtagaaaatctatgtaactggaaaacaaatgagtattactaaaagttttgtgtgtatgtgttttaatttctttactttaataagttaatgatctcccttggaatcttaacacaatttgttgaacaaatgttttttgggttggtgtaagtcatgtctttctttgctaagtcacaattctaagtgaataaggggcacaacagtgtgaactttggtcatcgtatttctttctgatagcttctcaaatagacttctgtcactttcgatgaaatacttcaggtatccatatacttttaacaacttagagtatatccttctagaatcatataaccaactttacagccaaaacttagaattaagagccattgtcatttggtgagcagtgaataagataaagtattcttggaaatggtgaaatctggtataccttttcgaaagcatctttatggggatggaacattttcttttaactacgtgagctcttctgatagggattttatactccaaaactagtctataagttccaaaaaaaaaaaaaaagttaaagcttggtttggattagtttcttgctttatgtttatgctctagataaatttagaagaaaattctctctacctctactgttttttctccaaattttattgcaaaacaataaagattaaaaaatggggggtgggctgggtgccgtggcttatgcccgtaattctagcactctgggcagcctaggtggacgaattgcttgagctcaggagttcatgaccagcctcagcaacatggtgaaacccggtctttaccaaaaatagaaaaaaaaaaattagctgggtgtggtggcaggtgcctgtggtccaggaggcagaggtaggaggatcacttgagcccsggagacggaggttgcagtgagctgagatcatgccactgcacttcagcctgggtgacaggtgagactctgtctctaaataaataaataaataaataagagtggtgggaccacagggtgatttttgtgtttctttctaagcctggtatttactagatttctgaagttatctagagaaacacacaatgagtcaacttgaaaatgctaatgtcagccacttggtataattctgtagtatagttcatcgaatttaccaaatccagggttagaaataaatctcaatgctgggcgcggtggctcatgcctgtaatcccaatactttggggggccaaggtgggcggatcacctgaggtcgggagctcgagaccagcctgaccaacatggagaaaccctgtctctactaaaaatacaaaaattagctgggcatggtggtgcatgcctgtaatcccagctactcgggaggctgaggcaggagaattgcttgaacccgggagacggaggttgcagtgagccgagattgcaccattgtgctccagcctgggtaacaagagcgaaactctgtctcaaaaaataaaataaaataaataaataagaaataagtctcaataaagacacattgaacttaactgctaggatttaaagacgtgctgtaattaaattaagagcatgttccctatatatgtacttaactgcattagtaataacagcctaccaaatggccgtagcctatttattagtaaacaacttgtcagactactgacttggtccataagaccctaaccagtttggagatgagacggggcctcaccatactactgtgattaatattcctgtttaattagtgaagttacacacctaaccaagatataggagatatttcttctattcctgaaacatttttattttaaatatttttgattaatggagtgacataatgtagagttgttgagtttccagtttccttagaatctggacatctttaacgttttgttgtaacatcttgactacttgataaaatgattgtaaatctgggaagggaaatagacttttttttttttttttttttgtagagacagggtctgtctatgttgctcaggctggtcttgaactcctagtctaagcaatcctcttgcctcagcctcccaaagtgctaggtttacaggcacgagccaccatacctggcctgaaatagacagttatatttctgactttgggaacaagagctaaagttatagtttgccttttcccttatcccccactggtttatcagcaaggtaattattgagtttatcaaaatcatccctctagggagacttaacttccttcttttctgaaactgttaacagagagctgagagctctgatgccagagcaatgactgagactccaaagcatggtaggattggaggatggagttctgggaagtcctaacagtgggagtaacaagatagtaaatccaagatccagctaagtaaaagctgaaaccagttgggattaaagaagaaggaatgaatttgtaactgggtagtacgaaatttcttaaaatcagtattttttaagtgcgtgaatattggaatcattagaatgcataaaaacagtaatagtttttatagcaactctgttgctataaaattcattgaatttctcatatcagttgccctgaaaaatcctaaatatcactgttgttcacctagtagcaactctttgaattgtagccagatgtctagaagaaggttgttctttagtagtaattcctgctaaagtatgtggaacaccccctccttacaagtacagagctgggcaggatggcttgcacctgtagtcccagctactagggatgcataggcaggaggatcacttgaggctaggaattagagaccagcctgctcaacatagtgtgacttcatctccaaaaacataattaaaaaacaattagccaggtgtggtggtgcacacctgtaggcccagctacttaggaggctgaggcaggaggattgcttgagaccaggagttggaggctgcagtgagctatgattgcgtcactgtactccagtctggatgacagagtgagaccccgtctctctctctctctctctctctttaaaaaaatgttttttaagagacagggtcttgctatgttggtcaggttggtcttgaactcttggcctcaagcggtcctcctgcctctgcctcccaaagtgctaggattatagacgttagtcgccacgcctggctgagacaagtattactacagcatctacatgcatttgaaagtgtgctagtattccatgcataaaaaatgatgagttcatgtcctttgtagggacatggatgaagctggaaaccatcattctcagcaaactgttgcaaggacaaaaaaccaaacaccgcatttctcactcataggtgggaattgaacaatgagaacacgtggacacaggaaggggaacatcacacaccggggcctgttgtggggtggggggagggggaaaggatagtattaggagatatacctaatgctaaatgatgagttaatgggtgcagcacaccaacatgcaacatggcacatgtatacatatgtaacaaacctgcactttgtgcacatataccctaaaacttaaagtataataataaaaaaaaagtgtgctaaacattgattttacagatgagtcactcaccccaagctgtagcctgaggcctacaaactggaagtacctgatttagcaggcgagaattctacccctgaaccaccaatgctaccagcaggaagtacctgatttggaaatccaactctttgggagttaaaagaacttttattttgttcattgctagtcttcggagcctagaaaagtgcctggcacatcctggtggttcacaacaaatatttgttgaaaaaaatcaatgaattgactctggcttttgcaggtactccttgttgtttttcgcccagctaatttctttttctttttttttttttttttgagacggagtcttgctctgtggcccaggctggagtgcagtggtgtgatctcagttcactgcaacctccgcctcccaggttcacgccattctcctgcctcagcctcccgagtagctgggactacaggcacctgccaccacgcccagctaatttttttgtatttttagtagacacggtttttcactgtgttagccaggatggtctcgatctcctgacctcataatccgcccacctcggcctcccaaagtgctatgattacaggtgtgagccaccaccccccggcctcacccagctaatttctaaaaagcaccagaccttcaagcttttgttcgcagcagaattctcttaccattttctgaaggatgttttcttccttgttatttttttccttcccattaattatgtagatttatgttattaggtaatactgttttgaggatctatacatatttgtcatttactgctattaaagtgttcaatatagtttctaaactttgaattagttattttagctctatctgctatatctttcttgaagcaatgtattcatttggtggtgttttaacgaaattaacagctaatcttggcgagctcttcagttgatctttcatgtcgtaacagctccatcttgtgaatctttagggtactgctgctggaaaccgaaagccctgacttgttcttttcacagacctacagatctctcgtttttacacctgagaagtggacaaaatacttgaaaacctagtggacaaggtgaaatttagtcaaagattggttctgaggttttctacccaggattaataattagtgttacattttctaaaccatctggttattttagagggaaacagggatagagcagtttcttcagtcctagatttaagtaatatctccattcttttggtttttatgttgtattgggtaagtgaggtatcaggaggcttggagcagaaacctatggatgctttagtctcccatggtttcagcaggaacttaaaatgacagaagttctacacttttgaatcaaaatcagtgtagtttttctgcttggtagcagcaggtaattattgacttgaaacctttgacttattcccttgtggcttatcagttcccgttttttgatggaaagtagcaaagaagtaattctaaagagtggtgtaaccaagtgattttcattttaagttaagttcttaaaatgtactttaccagtctggggtaacatggcaaagctccatctctacaaaaaaaaaaaaaaaaaaatatatatatatatatataaattatatatatatataatttatatatatattatatatataaattatatatatgttatatatataaattatatatatagtatatatataaaaattatatatattatatataaattatatatatagtatatataaaaattatatatattatatataaattatatatatagtatatataaagtatatattatatatataagaattatatatataatatatataaaaattatatatataatatatataaaaattatatatattatatatatataaattatatatattatatatatataaattatatatattatatatatataaattatatatattatatatataaattatatatattatatatatataaattatatatattatatatatataaattatatataatatatatataaattatatatattatatatatataaattatatataatatatatataaattatatataatatataattatatatattatatatataattatatatatattatacataaaaattatatataatacatatataatttatatatataaaattatataatatatataaaaattatatatatatgcacatacacgcacacacacacacatatatacatatacacacacacacaattagctggatgtggtggcatgcatctgtagctccagctactcaggaggctgagatgggaagattgcttgagccagggtggttgaggcttcagtgagtcaagctcataccactgcactccagcctaggtggcagagtgagaccttgtctcaaaaaaaaaaaaaaaagtactttttataagcataattgcaggccaggtgcggtggcttacacctgtaatcccagcactttgggaggctgaggcgggtggatcacctgaggtcaggagtttgagaccagcctggccaacatggcgaaactccatctctactaaaaatacaaaaattagccaggtgtagtggcacgcccctgtgttatcccagctactcaggaggctgagacagtagaatcacttgaactcaggaggcagaggttgcagtgagccaagattgtgccactgcactccagcctgggtgacagaaaacagtaattgcagatttagcttcatctgtgccctttgtagaggctaaaaactgaaaaactgcagttaaagttctattccttgaaaaaaaatagtattctgaataattaaagctcaagtttaattaaataacctatggcatatttaactccagtgtgcaaaatgggttggcaaagtatggtttgttttttcattgtgtttttaaactgcacatctgggaatttactccctgaatatatcatctattttatagtagtcagtttaaggctataagccaattacagtagaactatcattgattaaaatatttttaaagcatattctcttatcttcaaggtcaaagtccttttcaggggggctttatttctaaaaacagccgaattgggagaataatgtggataatgaagctgatgagttttgtttgatgctaaaactaaagtatgaccaagtaattaggctgatgtggggttcgtcttataaactaaagtatgatcaagtaattagtctgacttggggtttgtcttataaactgtctctgaaatagaagctccaaaaacattttgagtaattgcagtgtctctgaaggaaataacactggcctttggagagtgttttgaagatggtcttcttcagagatacaggttctgttacgtttatttaagaactgtttccttcctaggaacattctttccactgtcagcttttattctgaaacacttaaagcatacagaaaagttaaaagatttatatagtaagttggctgggcaagatggctcacacctgtaatcctagcactttgggaggtggaggcaggaggatcacttgaggccaggagtttgagaccagcctgggcaacacagtaagaccttgcctctataaaaaatttagaagtaaataaaaattaagaagaactataccgtaagcaatcatatactgaccaccttgattctataatgaatattttcctataattgcattatttcttcatccatcattctctttttttgatgcattttgttgaaaatccaattgacttcaaagatctgatacaatgaacagtttgactttggaagaaatagtgcatgctccctcagagaacaaattggctcctgtgaccatctcactttctctttgttttttcaggatgtgtttcacatggtagttgaagtaccacgctggtctaatgcaaaaatggaggtaatatttcaccttacatttgagtcagacttaggatattggttttgatctagtcacactgacttgatcaaggatgaaccatctgaacgtcaaggtttttctctgtctggtcccagtctattttctagttgtatctcccattgcctactagtcttccctttgggctccagctaaactcaactgtttacaaatatgccccaaacttttcttcccaacatctttgcttccaatgttcccaaagcctagaattactttttctcctcttactctctgtaagcccttcactgacccctccttagtcaccccagccacagatactctcattggaatttcagttgcatggtgttagtttctttctgatgatacctaccatcattgcctttttgttatggatatttataacatattttatatcacaaactcttaacagtaatcactttttttgtgtaataaatacccaagtatttgaataattttaaattctgtgaaggaaaactaaaattggataatatttattttgcccttttaataaaaattgtggtatttttattactcaaacattagaatttattccagctaattttagtctttgctttctagaattagtaaatrttctttttcccttcttgatagttcctttatacctcacataacctttcacttaatggccgattatggaaacaccttagttcaattataaaagtgttagggataaaatatatcattaaagtggaattagggaacataggtaccataattcatttcctcagatccttatttgaatagtatttcacatccaaatatgcaaagatttgaaattttcttatttcagattgctacaaaggaccctttaaaccctattaaacaagatgtgaaaaaaggaaaacttcgctatgttgcgaatttgttcccgtataaaggatatatctggaactatggtgccatccctcaggtatgtcttcatgcaactgctgacaatgtactttttagcttactaaatattaatttactgctattagtaaaaaaggtttgaatacctgtggagagttttttctatggtagattttgaaaacataagaagggataattaactcagaatgcttccttaaataacttattttcaagataaactaaatatttacaatgtttaaattcagatttgaacgtttattctttcctgaaatatttcttcttttttggactggttataagctatataaattctctacagactgagttgcaagtctgttcagtcaagaaagagtgtatggtagtagtcaaaagcactgatttttggcaccagacagaccagagttcaaatcccaagatggccaattcctagcttacctaacttgcctccytttctttctccttgagacgtccatatcgcctccctgagctattcacagtatgtaggtggtatggttatttcaaaaaataaagcacttaatacctgcacacaacaagctgtcatagctgctgactttatgtttagagttttgattccctcttcttcaggtcaagctctttgtggtaaagtaatgagaggatcatgttttcttaagtagtcaaccttttttttttttaattaaaaaaatttttttttgagatggagtcttgctttgtcacccgggctggagtgcagtggcgtgatctcagctcactgcaaaagctccgtctcccaggttcacgccattctcctgcctcagcctcccaagtagctgggactacaggtgtccaccacctaattttttgcagtttagtggagacggggttcactgtgttagccagatggtctcgatctcctgacctgtgatccgcctgccttggcctcccaaagtgctgggattacaggtgtgagccaccrtgtctggcctaatagtcaaccttttgagaagggttgtttaccaatttattcccagcacaatgtcagtatgtagtaggttcttatttgatatttgaagaatcactaggatcttatctataatgagtaaatgacatctatttaattctattttggctaggccagtgctgtggcacttaaaatttaatgctgagacactaactaaatattcagtttaatttttttgctgttgataaatggtttgtttttattaacaatgaagtctgttaaatggaacgtactatgaaacaacccataagatagtagaacataggtctgacccatctagcttgttaggtaagcacaaagtcatttgtttgtcttaattacagtgtttcaccttatactttaattgaaatttttttttttttttgagacggagtcttgcactgtcgcccgggctggagtgcggtggcgcagtcttggctcactgcatcttctgcctctcaggttcgagtgattctcttgtctcagcctcttgtgtagctgggattacaggcgcctaccaccacgcccagctaattttttgtatttttattagagacagggtttcactgtattggccaggctggtctcaaactcctgaccttgtgatctgcctgccttggccttgcaaagtgctgggattacaggcatgagccaccacgcccggcctcaattgatttattaatagtatttagccttgatatatcatccttgtaggagaacattgctgaaatacttactcttctgtgggttggattttgctttcttaatgttggatttgttagatgtggtcttcctttatcccccttctcatttatctttttgcctttactccagctgagtagacaaacaaatctgagtaacgtgttctagttggaggaaaaaagaaccaatgcaacagctacattttaaacctaacatcctggctagcacaggctttcagttcttttgtgagatgttctgcaaggactctggcttacaatttaggaaggaaagaaaaccagtcatgtaaagctccagaaaattctgattaaacttttcagtccgggctcctggtcagtgatgatacttttaacatcagaacataaccttttggctgggtgtggtggctcatgcctgtaatcccagcactttgggagggcaaggtgggaggatcacctgaggtcaggagttcgagaccagtctggccaacatggtgaaaccccatctctactaaaaatacaaaaattagctaggcatggtggcatacacctgtaatcccagcaactcaggaggctgagacaggagaattgcttgaacatgggaggcagaggttgcagtgagccaagattgcgccactgcactccatccagtctgggcgacagagcaagactctgtcgcaaaaaaagaaaaaaagaaaaaaaaggaagaagaaaaacaacctttccattttactattattgcctatctacttctgttttgggaatttattataaagaaaatctaagaccaggtacagtggcttatgcttataatcccatactttgggaggccaaggtgggaggatcacttgagcccaggagtttgagaccagcctgggcaacatagtgagaccctgtctctacaaaaaagaaaaagaaaaaaaccacacatttttgtttgttttgttttctttttttgtttgttttgttttgtttttttgagattgagccttgctctgttgcccaggctggagtgcagtggcatgatctaggctcactgcaacctctgcttcctgggttcaagcgattctcctgcctcagcctcccaagtagctgggattacaggcatgcaccaccacgcctggctcatttttgtatttttagtagatacagtgtttcaccatgttggctaggctggtctcaaactcctgacctcaggtgatccactctcctcagcctcccaaagtgctgggattacaggcatgagccatcatacccagcctaaaaccacacatctttaaagtaaacgtttgggtctatatttgtgtttccctattgtctcagttattgagtagttggcttttgcttgttttaartaggatcattatctgttttaaagcttaaatttagtttagcattagatgtgtagtaggagctacagcatttaattgaaactcttgtgtgtagttaagattcttaaatrcgaataaagaactaaaacaatgagaaaaaagtagctgaagagtcataggatgttatctgttattctcaacatgatccattttgtcagtatgtataggaatgatatacactgtcttatatttttagacttgggaagacccagggcacaatgataaacatactggctgttgtggtgacaatgacccaattgatgtgtgtgaaattggaagcaaggtaatgaaatgtgacatttttttctttagtgttgagatattaatgaagtataccaaatttcatactttaaaaaatactgtgaataaaatgcatgaatattagtgaaataatgatgtctctttggtattaaaggcttcttgcattttaagcatttgtatattataatttttacatttaaatctagtctggaaaaaaatgtgtctatgtatgtatgattgaacatatatctagaagaactggacatgttctgcattgctttagaagatggataattagtcaataggtgaaaggtaccaggagggaaattccctctcaaaacatggcaaatcttgcctaacaatttagaatgatcagtaaattgacccgaaccaaataacctcatgagttggagatccatggtagtaactcctccatcaagtagggttgttctaagattctgattatagttatttctttatgtctctctcaggcgcagagaaatagtaaacaactaaaaacaaagttatcattttgttttttaagtcataaagtttttgagtcatcgtatgacttgcttaactcatgacttttataaaataaaaggtaaagcatattaagatacgtatttgagactatggaggacttattcttcagtataatcaatgacagtgcaaaaaacattgattaccctgagctatgtactggtttccctatgacctagaagaaaataggacctataagtcctgttttcaactttaataggactgatgaaacatttactcatttaggtttttaaaatttgcttaaaggaacaatcttcaggtaaattctcaagaacttggcctctttcttatttcctgttagccaagtaaaactgtcttctagagtgtggttctgtaatgttgtcctgactttggctattgactctcaggtatgtgcaagaggtgaaataattggcgtgaaagttctaggcatattggctatgattgacgaaggggaaaccgactggaargtcattgccattaatgtggatgatcctgatgcagccaattataatggtaagaaaatttgaaaagtctgaagtctttctaattaattcataagcaccaccatacttaacctataatgacagaattgtaagcccttaccttcaaactgttaaaggatggaggaacaaagcactggacaagcattatttctatgactgcacttgtaattaactaagtaaactttctccttcattccaggaaagaaaaaatctggtaggttcttactgtttttttggtcctttccttccccacataccagcactcagttggtatgtttatttattttaaaacatttaattgagatattcacatatcaaagagtcaccattgtaaaatgtacaattcagtggtttttagtatattcactaagttgtacaaccatcaccactctctaattgcrgaacatttcatcagcccagaggaaatcctgtatccatgrgcaatcactccctgtcccccttccctcagtccctgatgactgcagatctactttgtgcctatggatttgcctatgctgttatttcatgtaaatggcatcatataggtggcctctgtgtctggtttatttcacttagcgaagtaagtgtcttcaggattcatccgtattgtagtatgtatcagcacttcattccctttttttttttttttggtggtaaattttacgtaacataaaattcaccattttaattaaagtgtgaaattcagtggcatttcattcattcacaaggttgtgcagccatcaccactagttcaagtcattccctattccctcctcctctccaggccctggcaaccactaatctgctttttgtctttatagctttgcctattctacctattctaggtatctcatatacatggactggtacaatatatggatctttgttgttgctgtttctggtttctttcacttagtataatgttttctaggtttatccatattgcatattgtggcatctgtcagtactcctttttatggttgaatattattccattgtgtggatatactacattttgtttatccattcatcagttgatggacatttgggttgttttggctgtgtaatgctgccatgaacattcctgtacaagtttttgtgtggacttatgtttttattattgggtacatacataggagttgccaaagctagaacactttgagcaagaaaataaagtagtattgtaatataacctggaacataaaataaatctccatgagtctatactgacaaataaatgattgaataartagacaaatgaggaagaatagacaaatctcaaagcagaagaattccaaataatttatgcagatactccattctcaaggaggtccttaattgtgagttgtgcctggtgacttccttccaaagagtacagtgtgggtaagggagaggagaggatgactttagagcagagaaacttgacaaacactgcctcagccaggtgatggaggtcaatgtcagcagtgataagagtcaccttgagagcatgttccctcaaaatgatgtgatgtatatttgcatctgtgttaattcattgaagaaggactggaagaatgccaatcctttaatgtttcgtttcaattttgaaaggtgagagtgcattcacaccatctgttcactacttggtagtacggctctgttctgttggtccgtgtgtgcatttccaacgtgyttcttatgcaagagaacttggcatgctgtggccacaattagtgaagccaagcccatcactctgtcagcactcatttactaaggctttattttcctgcagttcaggttattagaaccctgaaaactttctcggggtggctggtcccatggcgcaagtagtatgcagctttccctaatgtcaacctaaggcagtgtctattgtccatcctatagcttgcccctgtgcatctcttccatttgctgtccctgagttgtatttatataacgaaatttaaacttcagtgttttcctgagttctgtgaaccattttagcaaattaggggacctggggagaggattgtagaaacccctaatttatagctgatagtcaaaagtacaggaggcatctgaagtggggcagtcttgtgagactgagcccctaacctttgagatctgatgctaactccaggtagatagtatcagaatcacagtgaattactgagcactcagttggtgtctgaataattggagaattagtttctggtattggaaaacatcaacatttgcatgttggatttctggatttccaaattatttctatatcaggtgacacatttcatgtaaattataagttctttgaaatttactagtgcttaaacatttcccagtgcattctgtaaagtttccatacttttagtgatattatgataatagaatgcatgctattctttatgcagattataaattggattgaagcggccgggcgcggtggctcacgcctgtaatcccagcactttgggaggccgaggcaggcgaatcatgaggtcaggagatcgagaccgtcctagctaacacgaaaccccatctctactaaaaatacaaaaaaattagccaggcatggtggtgggcacctgtagtcccagttactcaggaggctgaggcaggagaatggcgtgaacccgggaggcagagcttgcagtgagccgagattgcgccactgcactccagcctgggagacagagcgagactccttctcaaaaaaaaaaaaaataaattggagtgaagcaatgttatcttatacaaatataaataagcttttgttattgttgaatgtatttctcttcctcataatacttttcctaactgactttttaggatgtgtatctctgtttgcttgcattgagcaggagtttgttatttgaagtgcagtttgataacattgaggctagccattgttgatggctatacagaaacttaaaatttttaaagcagtgcacttttctgtcagccagaactaaagtattgttatgtacagtgcctgtactatccagcaaagtctagtcacatttaatacgtaacccatcaatggatatcaatctaatctatttttcttatcttttagtatgtaatagtgttgtgatcctctgacatagcctctgcctctggaccagggatagtacctcaagcctgtaatcccagtgctttgggaagccaaggcaggaggattgcttgagcccaggagtttgagaccagcctgggcaacatgacgagaccccatttctacaaaaaatttaaaaattagctgggcgtgtgcatgcttatagtcccagctactcaggaggctgaggtgagaggatcgctgaactgtggaggtcaaggctgcagtgagccttgttcgggccactgcattccagcgtgggtgacagagcgagaccttgtctctgaaaaaaaaaaaaagataacctctgtctttttcagtatcttgtacacttctcataggaattatctacatttgccaaactggttgtttcattatgtagccaccagctgtttgcccttacctaacagagattactattgtactgattgttctctgtacttagtgtcagagctattcagagatactagatgattttctttcaatgtatatgtgtatggcttctcttctcaacaaggggcttcgctccaatgttatcttgaacttccgtgataagtcattccacagctctttcaaaataagtacttggaatttttgttgagtgtataattatttgtgcatcttgaaatctgcttattstcttctttctttttaaaaaaatcattctcactgtcatcttatgcttcttctcttcttagatatcaatgatgtcaaacggctgaaacctggctacttagaagctactgtggactggtttagaaggtataaggttcctgatggaaaaccagaaaatgagtttgcgtttaatgcagaatttaaagataaggtaatatgtcattcagaactgtagctttaggctcatttgtattgagactcataatttaaccatattgttaccatctaaagattcacaaaacagaagtctggaaacataacacagtcttggtgtttatttattcactttaatattctcttccatttttagaataaggaaatgattcagaagrgacaaagtatcaggctttggggaaatgttgataataggaaaataatacctttttatcattgtaatgcaaayctcttcaaattataggactttgccattgatattattaaaagcacwcatgaccattggaaagcattagtgactaagaaaacgaatggaaaaggaatcagttggtaagtgtaaacactttgcatgtttaacacacaaagcagaccagcttgcagaaaaggttttaataatcataagacactgtactgttactttcacttagaaaagagatacaaggctgggtgcggtggctcacacctgtcattccagcactttgggaagccaaggtggatggattgcttgagcccaggagttgaagaccagcctggacaacatggaaaaaccctgtctctacaaaaagtacaaaaattagctgggcatggtggtacatacctgtagtcctagctacctgggaggctgagttgggaggatcacctgagcctggggaggttgaagctgcagtgagccgtgatcgtaccactgtactccagcctgggcgacagagcgagactcggtctcaaaaaaaaaaaaaaaagagtacgagaaacagccaatgtacaaaaataattctcccagaaatcttctattctgtgtcaggataatgtcctataaaatgaaaacattgtccttccaacaaacagaagaaaaatggagaagagttatatgtgtaaaaatgtacagtcctaagagttggcatttgtctgggtgctatatggctcattcctgtaattccagcactttaggaggctgaggcaggaggatcacttgaactcaggaattggagactggtgggggcaacatagtgagacctcatctctactaaaaattaaaaaaaaattagccaggcatggtggcgcttgcctgtagcaaggctgaggtgggaagatcacttgagccttggagatcaaggctgcagtgagctgtgattgccccactgcactccagctggggcacctgagcaagaccctgtctcaaaagaaaaaaaaaaggaaaaagatttggcttttaagttaacttctctattttttcgtatcttacgatttctatgaaaatggtcttaatgtatgttaaataacaggtcagcaaagatgattcatttttcattttgatggtgtatttctttgttgttgttgttttctgagacagagtcttgctcttgttgcccaggctggagtgcaatggcatgatctcggctcattgcaacctccgcttcccggattcaagagattctcctgcctcagcctcctgagtagctgggattacaggcgcatgccaccacgcccggctaatttttgtatttttagtagagacggggttttgccgtgttaaccaggctggtctcgaacctctgactcatgatctgcccgcctcggcctcccaaagtggtgggattaacaggcgtgagccaccacacccggccttgatggaatatttctaattgggcacatattatattagtactataatgactaatatataggaaaacttgaactacggataaacaaaaataaaatgtatttttaaaacatgatccatattttagactaaagtgggctaaaaaaacccaaaaaacatattaggattgtattatatacacgacttgtcttacgatttttaaaatttaacactatgtaataagcatttcctcatgtcataaaagatataattttttttttagagacagggtctctcgcccaggctgaagtgcagtgttactataatagctcactgtaacctcaaagaagtgatccttctgtctcagcctgccaagtagctgggtactacaggcacgcatcaccactcccagatgatttttaaatttgttgtagagacagtgtcttgctgtgttgtccaggctgatcttgaccccctggctttaagtgatcctctcacacctcagcctccaaaagtgcttagactacagatgcgagccaccatgcccagtctagaaatatcatattttaataatataatattccatctctgtataatatgttttatggataaacctttttatttttaaatccctgcaaagaaggataaactatttttaatcatttcttattattggacattttggttacttccaatttttcaccactattaatagtgaaatagtatatggtaaacacctttgtaaattaccgtttcagtattggattgggttcttagaggtggaatttctctatcaagacctatgagctttttaaaaggttttggatacattttacagaaatatttttcagaaagattgaaccaggactcctaccagaagtgtctgtttcagatgtctcaccaacactacaggaactgggtttttttttgtttcattattttttccaattaagaaagatatgtttctcaattcacatttcttagctatttcagtgagaattacaaagcattcaatctcagtttctttcgtcctctcctcccctcccctcccctcccttctcttgtgggggtggttgtcgtgggggtgcgggggtgttccctctcggcctctgtcggtctctgtgttctctggtgtcgtctctcgctcgcctcctgctcggtcctctctgtctctcttccctgccgggtctgggtcctgcggtctctgctgctcgtctctctctcttttctggtctctttctttgctgcttcctgcgttttgcgcctttagtcttctccttattcgtggctcgctctctcttgctctctctgccttcgtttgcttcttcggcgctctctgcttttgtgcggcttgttgtcgcttctctcgctctcttgctctttttcgtttctgtttagtgcgactgtgctctgttctcggttactttgtgtcggctgcgttcctggtctcgcccttctagctgcgtgtccttcggtcgtggctcttctgtgtttcatacgcgttctcgctttgggttggttggctgccttcgcgtctctgtcctgttgtctgtgtcttggtctgtttctttcttgtggtgctcttctttcttttgccttttgtcgtgctcctctccttttcttttgctgctttttcttgtggttcgtgccggtcgtgcgctccttgcgttggtgccctgctgctgggccggtccttgcgctctcgtggctgcgctgcgttcgtgtgttcgtttttgttcgtcctgttgtgtgttcgttttttctggtactgctttgtttcgattcgtcttgttcctctgcctctggttttctgttgttgnnnnnnnnnnnnnnnnnnnntgatccgcctgcctcagcctcccaaagtgctggaattacaggcatgagccaccacacctagcccaatctcagtttcttaaatccgaacttgttaagatatttgaataaaattgatcacaagaatagctatgccttgccaaaatacataattagaatgttaaatgtaggtgaaaaagctttcgactaaactaaacttgaatatcacctggtcaaccactttcaactcattttttaactcttaagagataatttttgttattttgtcttatgactacttttgttttatttaatagcatgaatacaactttgtctgagagccccttcaagtgtgatcctgatgctgccagagccattgtggatgctgtatgtaaaagtttccttaaaaaaaaaacaagcctggttgctaaaaactatgatgctaaatggggagaggaagtacttgtttcgacaaatacttgagtgccttttgtatgcatgttactgtgtggagtcttgaaattagaaaccatgaacacatgcaagtggccatttgactgagggagaagctgagggagtgattctaatcawtcataagttggacagatagcatggtagtaagatttgtaaaaatcagaatggttccagaatgtaccaagtaacctgtgtgcctatgacccatcataagccatttccgcaaaagaatcaatgggaatttacttgacttggttctagcaaggactgaggaaggtatcaagttttaggtaccattgcaggaatgattcataatctaagaaaggctttcatgtgaggtagtaaaagcacccgtcaaagcaataattttgtttttgtactatttttaattatttggtttggattaaccaaaaaattgaacgagatcatcttaaattattttcatttataatattaaataaggaaaacaaaagaaaatgaggtctgacttttttactgccttgtaaatggggtagaacaaggaaaaaaggacaatttaatgatgaaaccagtacatttagttttatctttatttatgtatgaatcccgacaaagttgagataaataagaaaaattataagggaaaagccagtggttaactattataatttttcagtgagaacactgcccatattttataaatatgtgtgtatatataaaattgttatatatgcataaatcagtttttattatttcaaaaaacattcttattattctgcatgtcataaaaagtcaagaggcttgaatttttttttttttttttgagacaagtctcgctctgttgcccagactggagtgcagtggcgcaatctcagcttactgcaacctccgcctcccaggttcaagcggttctctgcctcagcctcccgagcagctgggattacaggtgcccgccaccaygcccagcttttatttttagtagagacggggtttcaccatcttggccaggctggtcttgaactcctgaccttgtgatccacccacttcagcctcccgaagtgytgggattatgggcatgagccactgcactgtccaagaggcttgaatttgttagcatctcagcagtagagcaaaccttctattgttcctatatattataaattacgtttagatcctaaaatttgggatagtcttcagattctcttaaatttttgtcagtatacctttttagctttttaaaaaatgagattagactaatagattttaatattttatattttagttaccaccaccctgtgaatctgcctgcacagtaccaacagacggtaagatttctattccagtaaaatttcattaaacattacacagttatggaaaaattatgttacttttatttttagttgacaaatgataattawatatatttatgggtacagtgtgatgttttgatatatgtttacaatgtggaatgattaaaycyggctaattacgaaatcattacctcacatacttaatcattatttgttgtgtggtaaaaacatttgaaatctactcttagcaattttgaaatagatgttacagtcaccatcctgtgcaatagatcactaaagcttattccttttgtctaactaaaacttggtaccctttgaccatcgcctgccctttccccatccttcagctcctggcaaccaccattctactctctacctctatgaatttaccttttttatattgcacatataaatgagatcatgtggtatttgtctttctgtacctggcttgttttttgttttttgacacagagtcacccaggctgtcactctgtcacccaggctggagtgcaggggcacaatcacagctcattgtacccgtaacccccccaagttaaagtgattctcccatctcagcctcccaaatagctgggactgcagacatgtgccaccatacctgtctaatttttttataatttgtagagatagagtttcaccatgttgcccaagctggtctcaaaccaggtctcgaaccaggctggtcttgaacactaatcaggccgggtttcgccatgtcacccaggctggcgatccacctaccttgtcctcccaaagtgctaggattacaggcgtgagccactgcacgcagccacgtacatatttttaacatacacaggaagagagggaagaagggtgagaagagaagcatttttagaattctgtagtgtacgtgggaaggaagatgagctgctacataccacctttagtgccacactgtatcacagtggtttccaaaccatgacccattgtgcccctctgagttccatggaggtgcccgctggacactggaggggaccctgagtgggctgatctccacattcccacctggccacaggctgcttcacccagaaaacagttctctcctccttagatgtcagaattctctgtaagatttttctggtaagaaaatgattctgccacttaaaaaaacaagtttgaaggctgggtgtggtggctcacacctgtcatcccagcactttgggaggctgaggcgggcggatcacttgagcccaggagttcgagaccagcctggccaacatggagaaaccatgtctctacaaaaaaaaaatacaaaaatttgctagatgtggtggcacacgtctgtaataccagctgctggrgagactgaggcacgagaattgcttgaacctggaagatggaggttgcagtgagccatgattgctgccactgcactgcaatctgggcaagagagtgagaccctgtctcgaaattaaaaaaaaaagtttgaaaatcacactatgcaattagcatgaagtgtaaggaagcccaaaagaaaacacctgcatttgctgtagagaaattttgtatgtatgcctgttaattttcaggtaattcatagtaggattcattaaagcaagtatattagtctttgttatatgttaggtgtatttttgattctcaacaggaattctaatttgtttttcttttctctgaatacagtggataagtggttccatcaccagaaaaactaatgagatttctctggaatacaagctgatattgctacatcgtgttcatctggatgtattagaagtaaaagtagtagcttttcaragctttaaatttgtagaactcatctaactaaagtaaattctgctgtgactaatccaatatactcagaatgttayccatctaaagcatttttcatatctcaactaagataacttttagcacatgcttaaatatcaaagcagttgtcatttggaagtcacttgtgaatagatgtgcaaggggagcacatattggatgtatatgttaccatatgttaggaaataaaattattttgctgaaacttggcttaggatatttttattttaatctgaagccaacattaagtaggtatgggtattttttggtgtttgttttctgttgatagtcttataattcaaatttataattattagacgaagaaatcgcttatatttatagtactcttgatactatgctctagtacataagtcctagcataccattctaaagcaaaagtttttaaatttatatcatattagcagaaagcacaatgttgctcaccctttgaagttatatattaatagttatttttttacttcttcagtcaactaattggacgcttaagtcatttatattatattctaagttatcagctgaacaaaccagtttgaatgccagcccatcttcttactagctctgtaatcttaagtcagtttaccaaccactcaacttcagttccttcatctgtgaaacagacattattcatgtaatggcatgtagtatgcattcagattcttttttttttttttgaaacagggtctcactgtcgcccaggctggagtgcagtggtgtgatctcggcccacttcaacctctgcctcctgggttcaagtgattctcctgcctcagcctcccaagtagctgggagtacaggcatgcaccacaatgcctgactaattctggtatttttagtagagacggggttcaccacgttggccgggctgctctcgaactcctgtcctcaagtgatccacccacctcagcctcccaaagtgctgggattagaggtgtgagccactgtgcccagcccattcagatttttttaatgaaaattttattgagatgaatatagattcacatgtagttctaaaaaagtaattcagagataattcaaataattctgtataccttaccctgtttctcctaaaagtaagattttgtaaaactatagtataacaaccaggacattgactttgatataatccaccaatcatatacagactccaaatccaccaatcatattcagacttcctagtttcactgtattaatgaatatttgtatgatgtattctatataatttataattctatagtgtaatcacctaggtaagtttatgtatcctataagatattgaacagtttcaacaccacaagatctctcgtgttgcccttttataatcacacccacctcccccctgtcttctgcacaccaccatccgtaacccctggcaaccactaatctgtcctccatttttctatgattttgtcatttcaagaatattatataaatggaatcatacagtatgtaacctttcaggattggcttttcactcagtgtaattccccggtattccttcaagttgccacatatatcaatgtttcattctttttattcattcctttttattgctgagtactttccatgatatgttttgttttacctgttgaaggacatctgggctgatccagtgtttggctattacagatacagctgcaatgaacatatttgtacatgttttcacgtcaacataaaacattttcatttctctcagatctctagcagtgtaattgctgagtcacatgatagatgcatgttttattagaaggtaccaaattttctagagttatggtcacattttacattcccaacagcaatgttggagtgattcaatttttccacatccttgccagcatttggtttgcctttttttttttttttttgagacagggtctcactgtcacccaggctggaatgcagtggcacaatcttggcttactgcaacctccacctcccaggctcaagcaatcctcctgcctcagtttcccaagtagctgggaatacagttgtgtgccataatgcccagctaatttttgtagagatgaggtttcaccatgttgcccaggctggtctcgaactcctgggctcaagtgacccgcccgcctcggccttccaaagtgctgctggaattacaagtgtgagctgccctgcctggcctactatattttattttagccattctgttgggtgtgtagtagtatctcatggtagttttaatttgcatttctctaatagctaatgatgttaaacatcttttcatgtgcttgtttgccacctgtatatcctgtttggtgaaatgtctgttcatgtcatttactcattttaaaattgtttagtttcatttttaatgttaagttttggagtccttcagagttcagatatttggtttgcaaacatttttttcccagttggcaacttgttctttcatttttttcacatactctttcacagagcaaaatcttttaatttttaaaaagaccaacttaccacattttccttttatggtcattctttaggtatcaagttagaacttttcctagccctagatcacaatattttctcctgtgtttttctctaaaagttttatagcttacatttaagcctatgattcattttgtgtttatttttatataaggtttatggtttaggtatgggttcattttttcctatggatgtccggttgctccaacgccatttttttgaaagcttattcttccattgaattgttttgcacgcttgtcaaatatccattgagcatatctgtgtgggcctatttctgggtcctctgttacattccattgatctgtatgtctgaccgtctgccgataccacactctcttgatgactatagttacatggtaagccttaaaatcaaatagattcttcccactttattcttctttgtcaagattgtataactagggcctgtgcatcttcatatgtattttagaataagttttggctatgtctattgtctatgcctgtaaaaaatcgtactgggattttagtaggcattgcattaaatctatagatcaattctagtcatgtgtttagacatctcctaatgtgtttctgttactaatttctagtttggctccattgtggtcagagaacatgctgtcattttgattcttttattgaggttgtttgatggtctgtccagagtgtttcatgggtgcgtgtgttttgttattgttgggtggagtgttctgtttatgtcagtgagatcctgttggtttatgtattgttctgatcttctatacccttgctgattttctctctagtagttctatcaattactgaaatggaggttttgaattccctgattataaccatagaggcctttgaacttttagctctatcagtttttgtttaatgtattttgaggctctgttgtttggtgagtacattttaggatcctatatattctggtggattgaactttctgttattacatatgtccctgtttgtcactagtaattttctttgctctgaagtctactttatcagatattaatatagctactcctgcatttttaaaaaataactaatgtttgtatggtatattttgttctattcttttactttcaacctatttatgttgaatttgaagtgagtttcttataagcagcataaagatgtctttatttttatttttattttttaatccacactgcctcctttgccctagaagtactcacagcggcgggagacttctggccttttcctgagcagtgcttccttttagtccaacatctcagtaaagctgcagaggtcgccactgcactctgagctttgcaatgcctcccaaagaccacaagaagaagaaagatgccagaaagtcaaccaagaaaaagacccagtgaacagatctggggccaaggctgaaaagaagtagtccaaaggcaaagttcgggacaagctcaataacctagtcttgtttgacaaagctacctatgacaacctataaggaagatcccaactataagcttatgaccccagctgtgatctctgagaaactgaagatttgaggttccttggccagggcagcccttcaggggctttttaggtaattatggatgtgttagtactttatcctgtgagatttgctcatcatcttggatctgtaggtttgtatctttcaccaaatttgagggatttttagccacttcttcaaatactgttttttttttgttttgagacagagtctcactctgtcatccaggctggagtgcaatggcacaatctcggctcactgcagcctggtcctctgggttcaagtgatcctcccacctcagcctcctgagtagctgggattacagacatgtactaccacatctggctcatctttgtatttttagtagagatggggtttcgccatgttggccaggctggtcttgaactcctgacctcaggtgatcagcccgactaggcctcccaaagtgctgggattacagtcatgagccaccacacccggcttcaaatactctttctgtcctactttcttctctatttctgggactctgatatgaatgttagatcttttgttattgtcccttgggtcagaagcttctgttctttttctttttcacctggctgagttctgttatgtccttatgttcattgattctatcctctgtcacctaacttccattttgggggattttctatttatttatttagagacggagttttgctcttgttgcccaggctggagtgcagtggtgcgatatcagctcactgcaacttccacctccagtgttcaagtgattctcctgcctcagcctctcgagtagctgggattacaggcttgcgccaccatgcccagctaatgttgtatttttagtagagacggggtttctccacgttggttaggctggtctcgaactcccaacctcaagtgatctgcccgccttggcctcccaaaatgctgggattacaggtgtgagccaccatgcctggccggggattttctattttttaatttgtttctaccaaatttcgaattgacagtgcacttttaagacagttgctttaaaatccctatcaggattcacctcagtgctggcatctgttgattgccctttctcatatgaattgtgattttcttggctcttagtatgatgggtggtcgtcaataatattggagacattttgtctattaggttgggagactgtaggtcctatttaaatctttcattttagcaggcagcactctgtttagctttcgcacatgggtcttggtctacagttgtggtctgtggttccagtggcggtttaattttcagcagctttgcagggttatcttggtctgcatggtttatccagtgctactgggctcctgtttgttcctgctggtgctgcctgaaggggctcattgttgtctttcagtggtggaagggggcgtcccccaactggtcccccacccctgctgccctagtgtctgaattggggagagagtcttgggccacagaaattaagcttcctgaagctttaggccacttgctatagctcggtctttccttcagctcagcctgcccacctacctgcctctgtagctcttggtggaaaaggtgtctcagggcttgcagggaggagagtccctcccctggttgcctgattctggctgggctcccagttgatctcccttgccagtggtgtcagcctcaccagaacaaaccccgtttgatcaggggagaaatgagccttttgctaagtcaggaggctgggtgacaggatgcatgtgccttgctgtgtgctgcgcctctgatcctagggtcccaaaccagtttgccctcttaccacctttcagagttctttggtcgtctctcttaccattttcagggtttatagtgtgcttagcatggagaagcagggaaaaacagatctatgcatcttgtcaccaacattcaaattttttttttttttttgagactcactgtgttacctggcctggggtacagtggcatgactgcagctcactgcagcctcaacctcctcagctcaatcaattctcctgcttcagcctcctgaaaagctgggactacagacacgtgccaccacccccagctattttgcatagaagtggggtttcaccatgtggcccaggctggtcttgaactcctagccttaagccatctgcctgcctaagcctcccaaactgtgtgagccaccgcgcccacgccacatttggattttttttttttttt

SEQ ID NO: 94707 - DNA, 12860 bp, Homo sapiens
cactccagcaacactaggtatcatcatcatcatcatcatcatttctttgccaataggttagccaaaaaaaattgcatctctcattcagtctttaggccctttattttcagtagggatttagtgcttttattatttacaacagaagttgttaaaaaccaaaattataacaaattttaaaatcttacttggcttttatgtatgattcagtaattggacagccctcagaacccagaacaggttcaaagaacttcagggctgcagtgtactcagagagaatttagggacagaaaacagcaagtgggatatacagtttaactggattgccttatctgaatctattgaccacctacaattgactaaagctcagaggctgtaactgacacttagccacttgttatatgaatatactcctaactagtttcatttagcatgaatgactccatattggtttggtctgttggttacatcataggagcctaggccaaatcagtggcctcctacaaattttattgaatgggctttagtatcctttaatcctatttattttccttgctatttttgccttccaaaagaaatattttattacaaacattcgaaaacatatttaagtgaaagccaggactagggcgaggctactgagacactcactgtcaggggctctgcagttgtgggcccctgaggtcaggtgtctccttaacttttgcatcctggcacctcacttgccttgctctagtccgagccctgacttaagtccatcctaatgttgctttctaaatataactgctattcacagttcagtgtgtatttttctagactttttctagacaaacgttagcatatatataacaatagtaacttatgtttataaaaatgtgtccttcttgggacattttatcaggtcaataaatgcagacctagctcattcttaaaatggtgtgttgcagaagagtcacagccctttgtcatatttacagcatatatttccccagcttttaaatatgtagctttactttatttttttatttttatttttttatttttttgagacagagtctcgctctgtcccccaggctggagtgcaatggcgcgatctcagctcactgcaacctccacctcccaggttcaagtgattctcctgcctcagcctcctgagtagctgggattacagatgtgtgccacaatgcctgtgtaatattttagtagagatgggggtttcaccatgttggccaagctggtctcaaactcctgacctcgtgatccacccacctcggcctcccaaagtgctaggattacaagcgtgagccaccgtgcctggccttatttcttaaaagtgacgtcaagtagatggattactcacatcagttgcattttccattgttttcatgctttcaaaaacagtgaagtattcaattatatttcccctttttttttttttttttgcattagcttactaatctactgagatgtattttggtatatggtatgaaggtgagatcttacctgaattttcccccaaataatcactattctcaacatcatttgctaagcaattcctccctccccagggcagaactctgtaaccattggaacccgggatggttaagaacttgatggggacattgcagagcagattcaaactaggtaaaaattttagccccttccaaatgtgagctgctcttccgtggtgggcagaggttcgcaggtagacacaggtgaaaggcatcaaagcactgcagcaggggaggcaggaggtttaataggcagcacctgaagcccactttcctatggaagaacatgcagccccaggaaaagagcttttgctctctcagtatagagacgaccaagtcttgccaaagcagcagctggagctaccagcactatcaggaggatctcaccctagccctagagtctgtagatgttccctgagtcctcctcacctaagtaaggtcaatgcccccatggactgccccttaactttgttctctcacattggcaaaggtctcctcctctgccttgtgatttccagactctcttccactgtgacccaggcctggcacaaaccccctgggcagcagtgcaacctggagtgatggggccagtgagggtggccagagagactcagccggcagctatgcagtccaactgaccctcgccgaggccactggctcccacggccattggtgagtgagttacagggaattcttctgcagggcagaggccaaggctgcgagtggggcctcctctgcagcaaacagtgaactgtgtcaccgagaccccaggaactggggtcccatggcccagcccctctctatggagaagactgtgctgctggggccaggcagagggcagaggcccagggtgggagaggaagggatgagagggcagcttcttaccctcttgggtgtgaatgacccttgagggcagcagagaaagggaaagcaagggtcagagacaggccaggtgtgacatccaggagaagccagggctctgtcctgcacaacagcatgcctgaggagggacaaggagtcaggtatgaagattaaattgctcctcttgaagtttggtttagttcttaaagctaggggtgggaatcctatcgccctgcccaaggagcacctttcagaggtggtggagggaggggtgaaaggggtgttgaaggggaagaggagggatgctgtggaaggatactgggcccaccctggagcttccttggcacctgagggagaatgaggcagtgatggggctgcagaggcctatggggcgctctgccccaagactgtcaggctggtgtgagtgagctctcccctctcacacctggcccgggattctatcaggatattgatcttataggctgtgatttcctctggccaagaatcctttctctggaaggccctgcaggaaaaacctctcctctccactctacatgtagctggcaatacatggatgggaatcccaggaagagggagaggaatttagcagggacccgcaaactaagtctgcggccccaatttcacagacgagctgagccaaggtcacgcccaacgaacctggtttcttcccctccttcaaacgaggcctaaaaacaaggacccgagacagggcacttcagcctcgatgtagggaatggagcgagagctctagaaaaggcggattccttcagggtgtccccactccttgacaccaacacacaacagtggttactgccactgttggagggaagaagggctggcacccagcagcaccaccatataaagtctcaggaaagtgtgtaactctaccgatggaacaggacatgaaacagaatcacatgtgttagaaggggtagagactgcagctccagggttgagtgggtgggatctggggtcaagtcctggatctacctctcaccatttgggagaatagggcaaatgtatttattttggtgggagtaaaggggataggatgtttcttaatctctttaagcctcagcttcttcatcttgcgttgttggaggattaaatgagatttaaatgagtgcaaagttcaataaatcatacacatcaattctccaacagcatacacatttcaggcattttaggagccccatctcatgaaggaaatccatactactgtggcagatgggggtggggaggcactttccactcaacacctcagttcaactctggccagtggcacctgccggggtggcttggggcttgccacctggaggcccagctccagggacacccttcacagaatatcctgtgggaacggcacccccctccaagcacaacagggccccttgagttttcaggtatcaagacaggagacgacacgacatgagcagtgggctaccattattaagcacttagtgtttgcccagcatggtacaacaatctggtaggtgggtagtttatctccaatgacacatggggacaaggggataagttatcttgcccaaagtcacacagccagtgagtgttggaagctggattcaaacccagacgtcagattccagagtccattctcttcaaggctggacttgaccccaccctgacccagggcccagatttgagggctctctctgagcccacctgactttcctccagggtcaaggctggctgggtcccctggagccctctcctccacccccacacccagaggacaggctgcatcaggggtcttcccacccccaccccataccaaggctgctggagaggagcctggcccaaggtggcgctgcccctcttggacctccaagaatgccgcatggagcagcccctcagggctgtagtccctctacacctacattgggcccctccagcctggacccccacccctcccacttcctggcttcccatccttcaggtctcgcagaagcctcctcaacaccctccctgcttggtctctatccttcagaaccctcatcacaacctgtccttgcctctagaacggaagccccatagcagcagggaccacgtatctgttttagcttcagtttctagcccagtgcagcattgtgaaaatccttagtaatatttttaaaaagttttcgaattctacttttctttgctgacttggcatgtgctttctcctctgcccgtaacccccgttcctccttatttccttgctaacacctactcgtctttcaaagctccatgccactgtctccttgaggaaattgttcctgtgcccccagtaggtaacacaccagacagaggcgagattctctatcccgccccagacaaggagcctttgctttgcagggctccccttgggaccctctcttgccaggagagcctctagagaagccatctagaagggcattcaagactcagcaagctccagctcccagcctggcagactgggtgggggagggcccagctggtgggcgaggctggtttatcgatgttgccgagagccctggggaaatcaaggtgaaaggcagccacgctgctgaggaggcccacccgtttatcaaccagaggggctggggccgggcgaaaagaggcttggctgccagaggcagctgtgaggtgggaggtccacaccactccgtggacctggaggctgggctacacactgtgcagcccgggctgctgcgacagtgtttccaacatggcgctaattctaggtaactaagtttggctttagaaataccgtcactggagccacagggcttgctgacagaaatccccagcacttggcattgggcaaggagcccttagggggtgaagggcaggcttattcagcggccttggtgcagtgggcacacagggcaccggccctgggagcctctgtcttcctcttgcaggccagggttgcctcctgattgtgggttcctgtctgtctctcaggcccccagccagggccagcccaagggagcagggggtgcagagcacaaccaggaggatggagccaatgggtgcctggagcaggggcacagagagggagtccaacccaggagcccagcaaggcgctgcagctaaagaggtcgagggaaacatgcagggagactgccatccctccccagccccagctgccccatagcaggagtggccttggcatcccacctgctccacatagcacccaggccatctgagcagagtgaagatgtcaaagagaaaaccaaatcggattgaggctcctgctcccccttaatgaggttcattatcagcagctctgatccttgtaaaacccagcaggccggattaggggcaggctctctaatcctggctgactcctccccaccgagtggccaaccctgcagctctgacaaacaagcccttgcttcctggaggagctggaattaggcaggtgcagacaggcttctccctcaccagcccagggcactgaggcaggagctctcagggaggattggggcagggggtggcaaggctgcacatccagaggcctgtctccgtgcatgaaaaggccatggggtttgggtgcagacagttctatgggcagtctgtggccaggagctgtgtgtgctgagggacatcgagtctggctgcattccaggtgaggctggtctctgtgcattctgtccagactggacactaggtctccaagtagcaagttaaagaacacaccaatgcttgccttaacaaaaataatttattccacacacctcccaaggcagggggtagcgkgggaatcaagcatgtgtaaggcactrcccccgccagacccttytaacttytgcacactggaaggkraaacctggagagagaagacactcccctccctagcttytacctggcaccctccaaagatgagcattcatcttggagaccaaaataaaaaaggacaaaagaccaggctcaragggagcagagctcaatggggggaagtgraagcagccatcttctcctgcagctaagccagggcaaggcactagagacccacatccttcccatgccaccaactcgtcaggtcccaccaagcaagccactcaccctacagcccagcaaccatggcttgcctcacctgggagaccagcacgacttccagaagcttccaaaccccaccctgaagccaaaccccacccaggaggtctgaggagctggaggctggccaggcatagagggcccggggtggtccttcctcccagggtgcaaaggcttcttcattgtcyggaagggagcagggtgggcggagccccagcagctagtgaggagttccattccagcccacccagctgggggaccctcctctggcttcacttgccccagttgagggccaagaccaagcaggagagactgaggctccagtgagaatgaggcaggacttcaaataagctgaaaaacaggaatgtggtgctaagaggccagggactgagctgccctatgcccactgcccggggctgccctccctgcacagcaggggaacctggaccctgctcctgtcttttgtgtcaaaggagctctctgtcctagcaaccccaagaagcttcactggagcaactcgttttcctgaatttcccacacttctaggccagacaaggagcaaggggtgggaggggagggaatggggtcagggggcttgaggtgcctagagatggcagctccctctcccgcctcctccccaggtggttcaggctgcagggtggccagcatggcccttcagggcccttatcttggcctggaagtaggtgtacatggccagcaggcccatgaaggacagggaatagagccccacacagaggctgatgtccaggtaagagaagccccctcccagcacctgcagccactggcctcggccccgtccagctcgggcctccagctggccctcagggatgtcgaccagctgcttggagctgcggcccacgcgcctgacctccaaagggccccagaggcggttcttctcagccctggactcagccagcaatgcagcccctgtgtctcgcttgctcaagtgccactgcccaagcggctgctcctgctcattcctctgaagctctgccatgtgctcaggaggctcctggcctggtgcagctctgaggccagggtgcagcttcgggggtcgacttgcctcaggtccctcagccggcacatgtggggtggtgtttgtgggggacttcatcatctcaggcttcccagggtccagagttgaattccggctttccagctccagggctcccatcgccagctctggggcggctgccacattctgcacatccctccgggcagctgacccagctgcagggaagtccaggatgatgttgcttggggagaagtgggccttgaggaagttgagggtggcttccacgtcccacacgggcacatccaggcgttcattgtggcaggcagaacaaagttcacggggtggccactgcaccttggggaactgggggtcctcgctgggggcacctacagagggaagcatacacaggctggtggtgacatcagtcccacccaaaaacccagaccacactcctccactcagaacgccagcttccttgtctgcagaaagggctcgccactgcccttccagaggatgggtaattagaaaatacagattacaaacactagcccacagtgggagctcaacagatggcagcatggaggaggaggcagatccacctacccctcagccccggccctccgtggttttccagggaagcgtgaagagcgccatctcagtcatttcccggtgttggccagacccactgtcctgctatgtggactttacaaccagcctttaccccagtaccagacatgggaaagggcaagaatactcattttgatctgttttgcagtctttggtcggtctgctcgtgtttgtctttttttgcatttttctgacattttccaaattatacaaactgcacaaataggttactttgtcaattcaagggaaaatgcgttttcaagcaagaggcagctgctcatggcaatccttgcttttacccagcagcagccctctggggtaggggtgggctccaagggatagttggggggagacctgaggggtacttggaagagtcaggatgctgctggggctgcaggctgttggtaccccaggtgggcccagccctctaggcagcctctggatgagtcccagagggtgagccacggccaccagcccctcacgcagtgttgcccagggaatgcatcagcccatcccttctgtagaagcacttctcctaaaggttttaatagggggacaagttgttgactacaaggaagcaggagcagcaacagcaagtggcatgcaagtcagaatggttattttggggaggggacaacaagcagagtcaagggtccagtcatgagtcatagtgatcaggccttgtggagggggctctcagcttgtgcctggtaattttgagtttcttctgaaaggaccccaccagagaggggagggaaccaccctgcttctggcctctcagggacaggcccaggctcctggccctccagcagcagctgggagcctgccgaggtcaaggggctgaagggtcaaatggagcatttggtggcaggggcggggtgggggaaggagaagacaggcacatgtcttcctttcaaagttcgataggaggccccaggagaccacgaccaagtgcaggcgcctgcaccaccacctgctccattcagctcctttaacctcggctccgccctggtctcccccccccgggaggctgtcacagccacgtgcaccgctccctcccgacacacaaaccgcctcctgtccacagatggctccctcccgacccagctccctggagtttaatgtgtttgcctgttagagccatcagactcctgatgaggaaaaggaagcaccataatgagggaacgcagagggcaaggctccctcctgggagccggtgcctggtatttccaggaacgacctggtctcctccagccccttctctcatcagacccttcccagggagagagaaccccagctccctctgccctagcagtttgagtaaggggccaacagccagaagacggagcaggggaggcgggagagggaccccagtaggctagagaggggccctagagcagggaaaaagtgagcaacggcatgggaagaccagggtcttacagtgtcaaagccttggcttcctcatgtcaaaaatggggctgatgatactggcattggttaacaggcctgggctgtgactgaggggacaatgagtgtcccttccccaaattttggcctaagactcccaagtatcctcaccccctcgtcccccacaagtgactccagccttggggatggtccttccttacctgcaaggcgagcattgaccctgttgtggctagaccagagccagaggacagcggcgttgggactccccacccggtgcatggaggcagcagccatctgctcgaagtggctagcgcagtctcggcagccgaagaagtagtgcacgtagcctcggatggctgggaggacctccttggccttggctacagggcagaggagatgccacgcaccagcccttcaggctgccagccccacagccgttgcctccccaggccaccctgccgccccccatcctgccgtggccacccctgcacaggtgccacacaccccagcctatgccagcagaggcccagtgtccccttgtctacttctctacctgccatggtcactttacaggagaccccatccccccaaaactcctaaacctggatccccttccctgccactaacctgggtgcctgtcactcacacccaggacaaagtccacactccttggcaggaaactcaggctctttgtgacatggtgagagaggtcagcaggggccagagggccaccgccctagcccctggcccttcctcccctgcccactcatgctgcctgtccgacttgcttccaccatgcgtcacctccctcgggcctggacctggcctgcacatgcccttcctaatctgtctccatctctcctcgctctccccttccattccccccaccccctcccacccactggaccctctggactggcatcagcaaagacctgttaaccagccccactttcttgctctaactgaaaccaggctccccgctgaggacaccactcctaatccaacacgcccctcctaagcccttcaccctcaggctccagggctgctggtgcttgcctccaagctcgctccttcctaccgcaaacctcccaggcctttagaagccaatctcctgcttttacccctccacgcagcaggacgttggcaccctactctcctcactcctggcaaggtgagacccgcagcagcccacacctgcctctctctctctcctctgccttctcagcttgttcttctgcacccagcacaggtgcccacctccccaccacaaggcctcaccacacggccctggcgttgctcagcctctgtctccgctgctgctcgggttaccccactcctcacctccaggatttcactcccgttagtgttttttctttactgcgtcatccatttatcccctgataagggatcattccaactggggaaaaggatgatcataaagaagttccctctaacccagtcatgccccagttcctgctcattatctccagaatcttgcctcctggtctctcttcagccgaatccaacaaggccattacctccactactccaccgacacagcccttgctagagatgtcctcatcttgcgccacctccagctgcactggccccagtgactacacctctatcttgaaacactggactctggggcccccttgaaatcaccatggcctcccccgttcagcctcctttgctggtggtttgatgctcaggattcagtcctcagcactcttctctacctccctgccagggagctcatccagtcccacagcttgagctctgatgctactaatgactataaagctaatctctctattccccacctctccctggaactccagactcaactgtgcacacctccattgggaggtctattgacacaaagcgggccattgattccaccatcccaacccgagcccctgactcctcagcttatgggaccatcatccaccagaggctcaggccccacaaccctggagtccacccgagtcctgcttcccacatacccttcctccaatctatcagtaagtccctcagctctgcctttaacatatccccaaatctgaccacttcctccaggggcacactgacaaccctagtccaggcccgaccaccactgctgggcgagcatgcagcttgctcctcagctgccctgcctccccctgcctgcagtagcccatcctccacctttctaaagtgttaaccaactgtcacttccgttagcctctccagtggcttctcaaaatgccaacaccaacctccaaaccctgccctcgccaaggcctctgagcccacgagcgctcacctccgcccccggcctgtctctgcagcctcacctccctccctccggccacagcagccttctttcagtgctgcccacacaccaggcttgtcctttgcacctgctggtctccagcctgtgctatgggctgaattatgtccccccaaattcctatgttgaagccctaatccccagcctctcagaatgtggccgtatttggagacagggtctttaaagaggtaatgaaggtaaaataaggtcattagggtgggccctaatccaataggactggtgtccttgcaggaagaggaaatttggacatggattgggagagggacaactgcacggagacacaaggagaagacgaccaccgcccagccaaggagaggctcgaagaaaccagcacagacacctccaccttgcacttcagcctccagaactcagacaacagacgtctactggctgagccccagcctgacatttgtgagtgcagcccaaggacaccaacacagcctgggagactctcttcccagacgtcccacactgccttctcctctccacatgggtcccagcaccgggccctccacagggaagcctttcccagacccctctccagacagcacccgctccggcactgctttgctttgtcttcctcagcattcgtcatcatggctgaagccatccctctgtgtctgtctcctgccactcagatactggccctgtgggggcagggacctgtctcatatgctgctgtgtccccggcacctgcagcgccacatggcatggtggagatgctccatacacactggcttcccacaccactgcctggcagttcctctgattcacggggctccacacaggctgctccctctgctgggatgctcctctcctggcggaatccctactcacccatcacccctcaactcaccccgtaaggcctcgggccccttcccaatggcgtcgagcctgccctctcttcaccccacatctttctctccaccacggccctagccctgatgcactgcaggcctctctgtccccctgcctcacactagag

SEQ ID NO: 94708 - DNA, 26063 bp, Homo sapiens
tctgttttcatgtttttcagaatttccttgccagttactttcacctggagttcacctgttccccaccccaactcctcagggtccatggttccctcatttcaaggctcattcaaatgcttcctctgtcaggcaagcttttctgtctgtcctccctctcccttccccatctttgaacatcttagcactttgatgactggggcctcaaatgatccagctctgtggtcccacagcacatagctggtgcccagcaaatgcctgctgaaaaagtttattcatcaattcaacagagatttactgagagatttgttgttgttgttgttgtttgtttgtttgttttaatggagtctcactctgtcaaccaggcttgagtggaatggcacaatctcggctcactgcaacctccacctcccaggttcaagcaattctcctgtctcagccccttgagtagctgagattacaggcacctgccaccatgcccggctaatttttgtatttttagtagagatagtgtttcaccatgttggccaggctggtcttgaactcctgacctcaagtgatccacccacccagcctcctacagagctgggattacagacgtgagccactgcgcccagcagagagctgtttcaagggtcctgaaatctgacatggtatgccaacatggaaatctttgttctagaaacaagaggcagggtgcgccatgcagagccgcacaggaaagcaccgggttggtcaggaggcagagggaaggaggggtaaacatgagcaagagcctttattgtggtttccatgggaaggaatgggtgaggcaaggtaagcagccttaggattggttggtttgaataactgcagtaggtgctggggtttatataagggctttccctagctgtctggtgtctggccttgggatgatcagggcagttggatactggccctgagtaagagagcctaataaaggaggtgtttgtgggtgtgggctctggattgggtggcatgcatttgcaagggacctcctgggtgagttcttcactatctccaggaaccagttaaccctggttggggcagtccctctgggaagagcaagtccccaagatctcaaagcatctgagtacagaaaagcaaaggctctgggcacagtggctcatacctgtaatcccagcactttgggaggccgaggcgggtggatcaccaggttaggagttcgagaacagcctggccaacatggtgaaaccccgtctctactaaaaatacagaaattagccaggcgtggtggcaggtgcctaaaatcccagctactcaggaggctgcagtaggttcaagaggagaatcgcttgagcccaggaggcagaggttgcagtgagcagagaccacactattgcactctagcctgggcgacagagcaggattccgtctcaaaaaaaaaaaaaaaaaaaaaaaaaagagcaaatgcatgcttaatacaagggcctactatatatcaagcatatatacgaaatgggcagtgaaccaaatggacagtctgggtattggtggggctcatatcctgtgggaagacaggcgatgagcagacaagcaaatctgtattttgtaaatatattgtatttttttcaacaaatattttatggctgccctgtgtgccaggcctggatctaagcattgatatatgatgaacagaatagataaagtccctgttttcagcaatgcatgttctagtggggggagactgcaatcaatgaacaaaaaaaaaaaaaaaaagaaagaaaattgaagcccaggcatggtggctcacacctgtaatcccagcactgtgggaggccaaggtgggcagatcacttcaggtcaggagattgaaacaagcctggccaacatggtgaaaccccgtatttcctaaaaatacaaaaattagctgggcgtggtgatgggttcctgtaatcccagctactccggaggctgaggcaggagaatctctttaacccaggaggcagaggttgcagtgagctgagatcgcgccattgcactccagcctgggtgacaagaccaagtctctctctcaaaaaagaaagaaaagaaaagaaaaagaaaaatcagtgacaagaagtaaaacaggatcaagggattaaaaaaaaggactggaaagttattccagataaggtgatcagggaagtcttctctgaggaggtgatgtttgagcaagccatgagtgaggagaaggagccagccacacaaaagcctgggagaagagaattcatgcagaaagagaccagagtgaagggccctggagtgatgagaagcttggtgctgtggaaccgaggggaagccagctagtcttgaggcaggagaatagggtctggaggcagggaacataaggctgattcacactgactttctagaactaaatcaaaaggaaaaccccaactttccacgtccaagtaaccaaaggaccagaggctactccctttgcaatcccagcttttctgtgtgcagatgaaaaactgaaagtacctctgattgctcccttcccactaccagtcaggctggtaggtggccaagtcttcatttgcatgggagtataactttgtaacttcacttcagcctctgattgataactttccacagccaatcagacattggcgtagggtgtaacttttaacttcagcctctgattggccactttccacaaccaatcagactgatcacgggccactccttcatttacacagggcgtacaccaaataaccaatgggaaacctttagagggtatttaaaccccagaaacttctgtaaggagcctgttgagtttctttgcttgagctgttcttgccctgtagagtgtactttcgttttcaataaatctctgcttttgttgctttattctttccttgttttgtctgtatgttttgtccaagacgccgagaagctgggcaccctccaccgttaacagtccggctgcagcatagtgagtaacgcagtgggttaggacgagcgtgaggtcagagacaggcaggagtcaagaagtgctggaagcagagaagtgatttaatctgtttttaaagctctctctggctgctgtgcggagattggatgataggaaggacaaaagtagaattaggaagacaagctaggaggttatctccctggtaagagatgccgttgatcagcctggggcagtggctgcggagatgcacagatgtgtggcatcagtgaatcttagaccttttccgccattgaaattacatagggagttaaaacacgcacagacttctggaccttacctttgcagagccttgtgaaaggcaaataaatcttggggccccaaaatcactaagctaaagggaaaagtaagtcaagctgggaactgcttagggcaaacctgcctcccgttctattcaaagtcacccctctgctcactgagataaatgcatacctgattgcctcctttggagacgctaatcagaaactaaaaatacaaaaaatgcaaccatttgtttcttttttctttctttttttttttttttttttttgagacggagtctcactctgtcgcccaggctggagtacagcggtgcgatctcggctcactgcaaactccgcgtcccgggttgaagccattctcctgcctcagcctcccgagtaactgggactacaggcaccagccaccatacccggctaatttttttttttttttttttttgtatttttagtagagacggggtttcaccgtgttagccagggtagtctcgatctcctgacctcgtgatccgcccacctcggcctcccaaagtgctgggattacaggcgtgagccaccgcgcctggcctcaaccatttgtttcttatctacctatcaccaggaagccccttcccagcttcgagttgtccagcctttccagaccgaaccaatattcatctcacatatgttgattgatgcctcatgtctccccaaaatgtataaaaccaaactgcgctccgaccaccttgggcacaggttgtcaggacctcctgagcttgtgccacaggcacatcctcaatcttggtgaaataaactttctaaattaactgagacctgtctcagatattcggggtttacagcctcaatgcctaaggaatctatactttttacaagccccctgggatgtgctgcttcgtctccgggtacccacttgtctactggtcgtaaaggggtaagtgtggccgggcttggtggctcatgcctgtaatcccagcactttgggaggccaaggtgggcggatcacttgagtttaggagttcgagatcaggttgggcaacacggtgaaaccctgtcttcacaagacaaatacaaaaaattagccgagcctggtggcatgtgcctgtagtccaagctattcaagaggctgaggtggtaggattacctgagcccaggaggacgaggctgcagtaagccataatcgtgtcattgtactccagcctgggtgacaaagactctgtctcgaaaaaaataaaaataaaaaaaggtgcgtgtgatgatgcagaaagaggagcactggggatgggagagggggagtccctgtcgttttggattctagtcccagttacgggtctgtttggggggctcggtggccccaagtgatcatcagggatagcaatgcctatctcgaagatgggctgaaagtgaggaatacataacatagtatttgtaaagcactcagcaaaggaccagccgaagcactcgggctatttctggtaaagggtgcaggctctggggtaaatcgcgtgcagttggaacacacatcggctttgcagccatctgctaatgtgaattccattccttttggggcctcgatttcctcctccataaactggtatccacaatgccaaccttgtgaacgctgtgagaatgcgcggggtaaaggcgacgtctctccctcccgggaagaacttggatggtgtcaggcctacactctcgctccgcctagggccgctcgctgggcctggctccccggctgccgggctacgcgagctcagaggacaccatcgccctcttatggccgcggcaggactggaccgaggggctgggctctagtgccttcctccaggcacggcagagggcgagggtctggcagcccgcttacccagggcctcggggcactagcattcatgtcatcgactgcctggcagggctggctttcttaagtgtggtcgtgagacttgcttaagtggaagaaatgctgtcgctttggagatttataaaacaattggctcgatggatctttcttcaggaggcggacttggtttaccggctttactgaccacagctgatgccaatgatttcatttaatcgtctttagagtccctgtgcatggggagttaccatccccaattagtttcttgtgaatgcagggcaaggagagggagagggtagtgggggacggggagaaggggcgaggggtaccctcctattaaaacggagccgcagaaaaacccacagagacatccgtctgttccccgctgagtccttagaacagcgcctggcacacagagagcgctcaactcgctgtgtaactaaatgcaagccaagatcttcgcattgtgtgtgctcttcccttccctaccaaatatacctggcttgcaaggtttgacctgttttcttagacgatttttaacttgtttccaaaagaaatattggagtaaattagcttgttcaaaggagtccttatgaaaggacagaaccaagtgagaagtatctggagcccggtttggggttatagatgatgatgttgagccagcacccacggggcggccgcaatgtagaatcctggcgctactgggaaccgtgtggaaaggggctcttctttctgttcaaatagtgttttctgtagatcccatctctccatcctcctgagctctctcttacaaaatatcggatttcagcagcttagaattggacagaaactcagaggtccgtttctcaattatctctaaccctggtaaacaataaatgggatgatgagtacaagacagttttggtaaaaagtcacacgccacacaacgtgagattttattattccacgggtgcttccttgccaatagtagacatggcagctcggctcccttcccttcgggttcgccttattgttgccaattgtaaacatggcctctaggccgtgagttctcattggcagctgctctgagtccccgcccttccccgcccctccgaacgcggcctggagttgtggagtcggatatcgcagctcccgactgagctgcgcctgcgcaactcattggcgccaagatggcgatggagatgaggcttccagtggctcgcaagcctcttagcgagagactgggccgcgacactaagaaacatctagtggtgccgggggatacaatcactacggacacaggattcatgcggtacgtggggacttgggggagtcgaggcttcagagagcggcttcagggctctctgcacgtggtccaggcctcgtatccctgtgtgtgtaactccccgcgggacccagggcacttcgtctgagcatcctacacacctcgcttccgagcctcgtgcttcttgctccctgcatcttgtgtgtccccgtctgcatttgtctcagctccctgaaaccctccactcctgacctccggtggctgtgacttttgggtcttctgcctgaagtccaaatctttgatccttccttgtgggagacctggaaagctggggagggttaggtgcaggctcttttccagttttcagctctctgaggggacggtgggcgttcttggctgcctcctcttcagtttagaatccgtaattgttcgatcttagggcaaacagttacattgtgctgcatgcacccatttatacacattttgaatctaaggggtgtagtgcagtgtattgtggttaagagggaaggctcttgagtcagacagttggggttccggtcctgctaccatcacatcttattagcggcattgcctctccacggtcagtttcctcatctgtaagatagtgataataacagtatgatacggtaatgaggattaaatgagacaattatgtaagaaaagaagtaaaaccagccattatatcatcatagataacactagtgtttcaacctttattattattatttttttacttgtatatgtacaaggggcacagcattcatagcattgccctttaacctgttagtttaaggttagtggataccaggaaatttttttttcttttttgagacggagtctgtcttagatcagtcgtgcgatctcggctcactgcaacctctgcctcctgggttcaagtgattctcctgcctcagcctcctgagtagctgggattacaggtgcacgccaccatgccyagctaatttttgkttttttttttttttagtagagacagggtttcactgtgttggccaggctggtctcgatcccctgacctcaagtgtgatctgcccgcctcggcctcccaaagtgctgggattacaggcatgagccaccatgcctggcccctaggaaatcttaagattcattctttcattaatgctttcaacatatattttgtgcagttgggttattatggcagagtgaaaaatctctgtcctggtggagttctaacagggagagatagataataagcgcaatgaataagttattcagaatgttaggcaataatgcaatagggaaaaaagtggagcagggtcaatggtatgtggggggaatggtggcaacagggtgggctgtgttttcaatggcacagtcaaggtaggcctgctgcagaaagtgacacctgagcagacctgagtgagaggagtgatgtccaagtagctgtctggagaaggagcactgaaggcagagggagcagccagcacagaagccacgctttgcagggggagcctgttagctttgaggaacacgttgttcttgaagggagagaagtcatttcgagttaccctcgtatcctttctttgtatcttcgccttgcatcaggggccatggaacgtatatgggagaagagaagctcattgcatctgttgctggctctgtggagagagtaaacaagttgatctgtgtgaaagctttgaaaaccaggtgagaacaaaaggtgtgtattccctttcttgcagcatcaggttgtacaaccaggcttttcctgccccctccttatcccccaccccacccctgcctgccctgtcatgctgtaagtctgaggttttgaccatgactgtaggtggggtggtgcagatcagtgcaggcttcagaggtttccccatgttatgtcaccactccaagccttggttacctcctctgcaaartgagtataatagcatggcctacttcataggattttctctttttttttttttttttttttccgagatggagtcttactctgttgccgaggctggagtgcagtggcgtgatctcggctcactacaaccttcgcctcccgggttcaaacaattctccttcttcagcctcccgagtagctgggattacaggcgccctccaccacgcctggctaatttttttcgatttttagtagagacagggtttcaccatgttggccaggctggtctcgaactgctgacctctgatgatttccccccacttggcctcccaaagtgctgggattacaggcgtgagccactgtgcctggcctaggattttctttagaattcagtgagatggtgcctgtaaagtatttagcacagagcctgatacctagaagcattcaatgaaggttagccccagaaagcaagccagtggggttggaacagagtgagtgagggggagagaaggggcagatgtaagcagagagctgaggtgggcgggcgtgggcctgccttgtagccagagtaagcattttggcttctactttgtgtaatctgggaagcactggaaggggtggagcagaggagggacttgatctggacttaagctcmctctggctgctgatgggagattgaagggggatagggcaagcttagggaggtggattagggaccatactcatgatctgaagtgatggtggcttcaactaaggtgggagcagtggaaggtggaggagtgattggaatctacacagattttattttccgagtgtttttttaaaatcatgaaaagctgttgggttttgtattctttgggctttactgtgcataggaccccgtcaactgtgaatagaaataagtttacttcttcctttccaatttggatgccttttatttcctgcatatgttttaagggtagagccaacaggttttgctactggacttgtcctggagcgtgagagagagagaggaatcaaggaactctccgaggtttttggcctgagcaactgaggggatggagtcaccgttgactgagatggggacaactcatcccctatctcggtttgctatggaggactggagggggctgcgggaaagcttagttttgtgcttgatacatttgaaaatgcctgttagtcatctagatggcagagttgggtagctagcagttgagtaggatttggaattcaggagagtggcacagtcacagcacagagtggtgttttaaaggtattagattgagtggccgaaaagtgaagaggtctaaggacttagcctcagcactgagtacgtctcattagaatcgcgggtaaggaactagcaaaggggcttgagaggagcaggcagtgagtaagtggaggagacgtgagcagacttgtgtggttggagtcctggctcagatttcctttctcttcctttggctggtgcagaactcatccatgtgccacaggaaaatagtccrtgtttttcattgtcgtgtaatcgaacaaaatagggtttttgggctaaatgaactacttggaatggtgatatgtctaaggatagttaatggagactttatacgtggaggaatgtttgaagttagcagtttctgaaagtaagtccagacaatatagttacatgaatttgctgaatgtggcgcctgttccaggctttcaccctgttgaaccgacatctcaaatggtgtgtggtcttgtcagaaagtctgctcacagatggatgaaccccttgtgttttgtctttcagatacattggtgaagtaggagacatcgtagtgggacgaatcacagaggtaacgtcgatatcagattggtgtttacaaagtcgaggcaggctggcgatttcattcatgggacagtcattccacttgtagttacatgaaaaaggcattcattgcatttggccgttgtgtggcttctgatgtaaatatgtggcttgttcgatttcagattactggttcatgtttttttttttttgagatggagtctcgctctgtcgcccaggctggagtgcagtggcatgatcttggctcactgcaacctccacctcccaggttcaagcgattctcctgcctcagcctcccaagtagctgggattacaggcacccgccaccacgcccagctaatttttgtatttttagtagagatggggtttcattatattggtcaggctggtctcaaactcctgacctcaagtgatccaccagcttcggcctcccaaagtgctgggattacaggcgtgagccaccacatctggccttactggttatttatgatatgacacatgaacatggagcatgtgtccaggtgtggaacttggcttataggttcaacagaagaggtggaaggtggagaccaactccaggctggattcggtcttgctgctctcgtccatgaaccttcctggaggagagctggtaagggctacagctggggccatggactagggcccagtgggctggggggagccgtgggaccctttgttccaccagaggactttgatttacactgaggttgcccctttgactcctgtttgtctgctgtgaagtttgctgcctagatgtgtatgtagacttttcaccctgtccaggtctcccgaaagagggagcagttggcatatggtaggatcagaaacatccatggggtgggatcccaacagagagttggggagagaagcccttagatgctggttgttaacagttttcctttttggatataacagccttgcatagtgaagatgttccttgaaaagttgtctttacattaggtttttgtgaattgaaaggcatttcattcaaccatgtgtggaatgtggttgctggcattccagacaaccacagtaactaagccacagccttttgtaaaatgccatggttcaccttgatcttcagtccagcgtgtatttacagagaggcttactgtgccaagctctgtgccgagtgccaagcacgattgagttccccagcaggggatataagataactgacctagtccctggcagtagaagaataaataagctgtggttatacaaaaggaaatttcagtgagagaagcttgtaggaaagacaggcattggagttgatcctggaaggatggagagactttgaatgactagttcagggaatctgagataaagggaaatgtatgagcagagatatatccaagcaggagttagtctggtcctgctggaccacagagggctgtcatggaagatgactatggaaatgttggctaggtgagattgggaggggtctgaatgttcctcagagaagggagggaaagaggaagaggagctgtggaaaagtcttttgagatggaaagtcgtgattatcactgattcccctcaagtggcttgggttacctactcttgctatagttctcagtgcttgaatattgtggttggcctcaaacatctcaaaaggaagtgaaagagaagtgatggagacctttctgaggatctggcttaagtaatgtcatttctttgtgtatttcagaggagaagatctgcagaagatgagcttgcaatgagaggtttcttacaggaaggggaccttatcagtgtatcctgcgctttgcactccagcctcttgatgcttttctgtgggactgggaaatgggccttccattgtatgtctctgacggaagaaccatgtcatccttgcagggatccgagtcttagaccaagtgtcgggctctgctgcatcctttctcagtctccttaattcaggctgactccccagctcttgttgggacctgctgctaagtcatttctttgggtcttgtaacttacggtggcctgtgctttagactaggcttttgttaatggtgttaacttttagcgcagggagtggagaaggtgttgttcacgtcaagatattaatgacaggccgagtgtggtgactcatgcctgtaatcccagcgctttggaaggccaaggagggaggactgcttgagcctaagagttcaagaccagcctgggcaacatagcaagacccccctctctacaaaaaaattaaaaaagaattagccgggcgtggtggcacatgcctgtagtcctagctactcaggaggctggggccagagggttgcttgagcccaggagctcaaggctacagtaagctatgatcacaccactgcattccagcttgggtgacagaacaagactctgtctctattttatgttattttttaaatttttctttttttttaatgacggagtcttgctctgttgcccagactggagtgcagtggcgcgatctcggctcactgcaacgtccgcctcttggattcaagcaattctgccttagcctcccaaatagctaggattaccggcgtgcgtcatgcctggctaatttttgtatttttagtagagacaggtttcaccatattggccaggctggtctcaaactcctgacctcaggtgatctgcccacctcggcctcccaaagtgctgggattacgggcatgagccaccatgcctggcctctgtctttattttatttatttatttatttatttatttatttatttatttatttttttgagacggagtttcactcttgttgcccaggctggagtgcaatggtgggatctcggctcactgcaacctctgcctcccgggttcaagcgattctcctgcctcagcctcctgagtagctgggattacaggcatgcgccactatgcccgactaattttgtacttttagtagagayggggtttctccatgttgktcaggctggtctagaactcctgacctcaggtgatcgacctgcctcagcctcccaaagtgctgggattacaggtgtgagccaccgcacctggccttctgtctgtatttttaaaaaaaagatattcatgacaaccaaggggagaggtaaggtcacagtgatgtgctctgggtcaaagattgttgagcctggaccattggagaggggaggaaaagatggaggtgtggggtcaaggggagaggctgcagaggacaggacagtgtgtggccaaggctgctgtttgttccttcatcaccctggccaggctgaggtccaggcagtgttctctgacggagctgtctctttgcacacgaggagcctgaaatatggaaaagtaagtcgggctcttgatgttcctgtttgctgactgagactacaaggctatttttgaatccccatagctctctggaattctggcctaaagaaccccagtagctaagcattaatagaggctggcatcccacaaactgatcgtgttccttaaacgtaacatcaggacggtcagggttcacagggtcatgggtcagtagccttgtaaagaacaagttttatcctttttctccaaggagactgactttcaccagragagcccctccaactgtgggctgggaggtgcagctgtctctcttcctccagggggcgctgcagctcagcactggggctgaggctgtcctgggaacaaaggcaggctgggtctggttaaacagcccttagacaaacgtccaatcagtccagtggatgttattgctggcaaagcttgctctgtcatctgagcctctaaatggaatttcactgcttttcttgtacgaggttgcattattgaagctatttactattttaaggagagcatacttcctaaaacaaattaggatttactagtctcttagctttatctgggtgaacgtttttattttctgagtggaacaaaaacctcttcccttaatggagtggctgcagacagccacgttgatgtacatggagtaggcagaggactgctgcagtatgctgactttcacaaccctgggtcctgcggactcttccttggcaggacgtggacttgagctgtcctgccaggaccagacatggatttgcacccagctccacccatctccttacctacccagaggcacacatctcacaggcaagatgagtgtttggggttcaggtatgagctagggtcatggaacaacgcagtgctcctgggccagcaggaggctccagctcacttcctcattggcttcagcttctctaatgtctggcacatgagttctggcttagagtgcaaggaagactgcaaagggaaatgacagagaagagtattgaaggtcaccttctgctgggatgtatgaatagcctctgagtcccaaagcgttctctgcaaaaatgtgtactatgtgtatgcatgtaggcgacagcaattataaacaggaaggacaccaatttgaatatacttaggatgtatattctgtagtctccttttcattcatcccgccaatcttgcagtgacctagcttcgtgatatatttctttagctaggtcagggggttttggtccaggtttccccctccctggtgaaacggcagaagacscactttcatgatttgccatgtggtgcctcagtgattctcggtaacaacggcttcatctggatttacccaacacctgagcacaaagaagaggaagcagggggcttcattgcaaacctggaggtgagcaaacactgtggccattttcagtgggatggagggggctcagtctttgctgtgtttttgtggccagtgaagttggttgtttttagctatgttactggtgtaggctgagtcactttgactttccatcacggtatgttcatgaagcccatattatcttytcttctaaggagatgaattcagtgaatggtttggtgtttgttggtggaggtggcaaagttgcagggtaatagccgaagagccagtgaagaagccattctttttctgtttttttktttgtttgttttgttttgttttgttttgagacggagtcttgctctgtcgcccaggctggagtgcagtggtgccatctcggctcactgcaagctccacctcctgggttcaagtgattctcctgcctcagcctcctgagtagctgggattacaggtgtgccccaccatgctctgctaatttatctatttttagtagagatggggtttcaccatgttggtcaggctggtcttgaattcctgaccttgtgatccacccrcctcggcctcccaaagtgctgggattayagacatgagacactgcaccctgccccattccttttaatctcccttggaattagctgtttggttgatttggagttccagggtgatactgtctgagtcataaatgatttatttgtgaatttctgtggctggtcacgtattttggtcctgtttgtatttcccttcccctctctgtgtctccttatagcctgtctctcttgctgatcgagaggtgatatcccggcttcggaactgcatcatctcgctggtaactcagaggatgatgctgtatgataccagcatcctgtactgctatgaagcatcccttccacatcaggtactctccccagggcctctcccttcttcactgatctgtgagctgctctgttgtttgttcagagacaatatgcacatctccccaatactttcccaacatccgtcagtatgaactggcctgaaacagccttaatgagtgtctggtagatctttccctaagaaacttgcaatattctcaatgcctagtgtcagtctaaggattttggggcaggaggtgtcaggtgggactagtttatgagagcaacctctggactacatcttacctctcccaaatttcagccagcttttggatgaatgtcagaataatatctttgttcttgtcgactatatcccagagcatcttgctgatttattaggctgcttctagcagatcatatcttgtaacgcttagtctctgagacatgaaaggaatacagaaagtttatgttaacggcttgatttatgtttggattggcttggtggtctgtttatggttggtttcttttctgaacaaatgccttttccctttttcagatcaaagacatcttaaagccagaaataatggaggagattgtgatggaaacacgccagaggcttttggaacargagggataaggaggtgctccagaagcacgggactgtggaccttgcaggagtgaagactgtgatgtgtggtccccatatgtggctcagcaaagactsgagagatcatccctttgtctgcattgacggccctgtgacggcctccagcccacaggcctgctttctcctgtcctaacaccaagcctgggtggcagatgaacagtgcttccttgggttgccagctgagtcccggtattagggaatagtttcagctctttcaaagtgcacagtgttacagtcgaatgggctcccatcctggaataatatggagaatcctttgtcttccactcactgtcattcacaaggcacagtgccccatgaaattgccccaatagaaaacatggcatccctgacctccaaatggtctgttttggcctccattcctatatcctttaaatgactgagaatgcagctggtaaagttggaagaataaagttaaccaagcaggccaggcacggtggctcacgcctataatcccagcacttrgggaggccaaggcgggcagatcacctgaggtcaatagttcgagaccagcctggccaacaaggtgaaaccccatctctaytaaaaatacaaaaaattagccaggtgtggtggtgtgcacctgtagtcccagctatttgggaggctgaggtgggagaatcrcttgaacctgggaggcggaggttgcagtgagctgaaatcgcgtaccacactccagcctgggtgacagagcgagactgtgtttcaaagaaaaaaaaaaacaagcagccttttgcttggttggaatmtgattttctgttgcgtgttccttgtagccatagatgtgattatgtccacaccgggctgccttaatctgtcctgcttggagagtgacttgtaagatgctgaattattcatgataatacagtgaatgttctgggtccatgtactcagataaacatgaagaaaataagcaaagaaaaatggagactgggaaagcaaagctgttttcatcctataattgaagtagtgtggagcattaacttgtggatgattcagagttaaaagataaaaagacgccagagttctcgctgaagaatgtgagaattcctgtgcattgttttttctgatgactatctaaaaatggtgccctgatgtaggtttgggggaacattcttaaaaacaagggtgctatgtgcctgtaatccagcactttgggaagctgagtgggcagatcacctgaggtcaggagttcaagaccagcccggccaatacagtgaaacctcgtctttaccaaaaatacaaaaattagccgggtgtggtggcacaagcctgtatgtagtcagctactcaggaggctgaggcatgagaatcgcttgaattcgggaggcggagttgcagtgagctgagatcgcaccattgcacttcagcctaggtgacacagtgagactgtctcgaaaraaaggaaaagaaaaggcggccggacgtggtggctcatgcctgtaatcccagcactttgggaggctgaggtgggtggatcacaaggtcagatcgagaccatcctggctaacatggtgaaaccccgtctccactaaaaatacagaaaaaacaaaccatagcctggcatggtggctggcacctgtagtctctactacttgggaggctgaggcaggaaaatgacgtgaacccgggaggtggagcttgcagtgagctgagatcgtgccactgcattccagcctgggtgacagagtgagactgtctcaaaaaaaaaaaaaaaagggacactatatgcaagcgctgtcttcacatatgtggcaaacttgtttgtttgtttttgagacagagtgtcgctgtgtcgctaggctggagtgcagtggctcgatctcggctcactgcaacctccacctcctgggttcaagcaattctgcctcagcctcccaagtagctgggactataggcatgcgccaacacgcccagctaatttttgtgtttttagtggagatcgtttcaccatgttgascaggctggtctcgatctcttgaccttgtgatccacccgcctcggcctcccaaagtgtttggattacaggtatgaaccactgcacccagccatattttttgatatttatagacgtcttttttttttttgtttttttgagacggagtcttgctctgtcaccaggttggagtgcagtggcgcgatctcggctcactgcaacctccgcctcctgggtttaagcgattctcctgcctaagcctcccgagtagctgggattacaggcacgtgccaccacgcccaactaatttttgtatttttagtagaggtggcattctaccatgttggccaggatggttttgatttcctgaccttgtgatccccccgcctcagcctgccaaagtgctgggattacaggcgtgagccactgagcccagctatagatgtcttaacatcattgttttctgttcttttgttccgggtaataataaggagctgaggacagctgaggaagggcttggctgacaaaatgccttccgacagagccctaactactccacgtaaacctaggacagtctcaatggtagtaactttgaacactgcatttgataactttcaaatacaacttggctctttttcattaaatggtatgcttctctataacaacacaataaacaacttcttacctcactttctttttttgagacagggtctcactctgtcacccaggctggagtggggtggcatggatcacagatcactggagcctctacctcccaggctcaagtgaacctatcttagcctcccgagtagctgggtccacaggcatgtgacgtaccaccatgcctggctttttttttttttttttttttttgagacagggtcttgctctgtcacctaggctggactgcagtggcacaatcacgtctcaacctcctggtctcaaccagtttccaacttcagccttctgagtagctgggactacaggtgctgagccaccacatccagctaattgtttttgttttttgtttttcggcagagatgaagtctcactatgttgcccaggctggtcttgaactcctgacctcaagcaaccctcctgctcaagccatcttcccaccttagcctcccagagtgttgagattacaggcatgagccaccacacgctgcctattttttttatttttacgaatttttttgttgttgcccaggctcaagcgatccacccacctttgcctcccaaagtgctgggattatgtgtgtgagccacagctcctggcctctttttttgtttttcctatcccaagttgtattactagttttggggagtttgcagacaattgaatattctataggctgtgttgcagctttagatggatcgacctgtcatgtttttgaggttatccaggctgtatatctctggagagaagggaatggcaaagagtgggagtctgagtcaagtttggttttktttttttaagagacaaggtctctgtaatccaggctgcagtacactggcatgaccatggctcactatagacttgggctcagccaatcttcctgcctcagcctcctgagtagctgggtttggttttccccagggccatatgtcagcttatttaccctcctcacttggtgtctcccagcctgccagcccatgctgttcatccagtatctgctgaatggtgattacctattaagtggaactaacacaaaaktgcttatctaaaagcaattattggtgattatttccttgcagtggcccactagagggcgccattgttaagtgtaattccagtaggtgttttgtgttttttttttttaatggaataaactgaaatctttacatggtactgaatccctttagcaacttggggggttgctttaactgaatcacttttaatgaagatatatgaacttgaagggatttattcaatatatgacaatattactcaatattacttttttttttttttttttttgagacaaagtctcgccctatcccccaggctggagtacagtgacgggatgtcagctcactgcaacctccgcctcccgggttcacgtgatactcttgcctcagcttcctgcatagctgggactacaggcacccaccaccacgcccagctaatttttttgtttgtttgtttgtttgttttcctgagacggagtctcactgtcacccaggctggagtgcagtggcgtaatcttggctcactgcaacctccacctcccgggttcaagcgattctcctgcctcagcctcttgagtagctggaactacaggcacgtgccaccatgcccagctaattttgtgtatgtttagtagagacgaggtttcactgtgttaaccaggatggtctctatcttctgacctcgtgatctgcccgcctcagcctcccaaagtgctgggattacaggaatgagccactgcgcccagctgaatttttatatttttagtagagatggggtttcgccatgttggtcagcctgctcttgaactcttgaactcaggtgatctgcctgccttggcctcctgaagtgttgggattacaggtgtgagccaccacacccagccaagcaatatttatttccgattgtcaggcatttgccaggctttggattctagtttttaagcccttaacagtatcattcagggcctatgttctcaggacctcttgagactgtgcctcggtttttaaaaaaagtatcattctacagtattatacaggcatttttaaagtacagtgcattggccgggtgcggtggctcacacctgtaatcccagcactgtgggaggctgaggcgggcggatcacctgaggtcgggagtttgagatcagcctggctaacatggggaaaccccatctctactaaagatacaaaatgagctgggcgtggtggtgggtgcctgtaatccctcaggaggctgaggcaggtgaatcgcttgaacccgggaggtggaggttgcaatgatccgggatcgtgccactgcactccagccggggtgacagagtgagactctgtctccaaaaaaaaaaaaaaaaaaaaaaatacagtgcatctctagaaaaaaatactagagtctgggcattgggcatggggctcacctaaaacaagaaaatggcaaagtggaaaactagggataaggctttagatcaggtgcagctgacctctgctgtgactcccaggaagcatagtcccaatctttgtggaaaaccaaatgagatctagtttgatcctcatgaaccctgtctctacaaaacaacaacaacaaaaaaacgtaggtgtggtggcatgtccctgtagtcccagctacttgggaggctgaggccagaggatcaccagaacccagaaagtcgaggctgcagtgagctgagattgtgccagtgcactccagcctggccaacagagtaaggccctgtcttcaaacaaacaaatcaaattaaacaaaaaacccaaaacccttgtaaagtaagctatgacctccatttacgggtgaagaaatgaactcagaattaaagggacttgatgaagcccctttgaattgtgaatcaatgtagatttaagctctagggaggtgtcataatgcagtcctttagaggatggactggactgactgaaagtttatggacccagaaatttaattccagcattgaggctgatcttttgtttggattgttattttgcttattgcccatccttccatgtaggttccatgaggacaagggtgggtttcttcccccaccactgtgtctcagcacctaaagcagtgcttcacatacagatgttcaataaatgcttcttaagtgaattgttatttattttttgagacatggtctctgtctcccagactggagggcagtggcgcaatctcagctcactgcatcctctgcctcccagactcaagcaattctcctgcctcagcctcccaagtagctgggattacaggcatatgccaccacgcccggctaatttctgtatttttagtagtgaggggtttcaccatgttggccaggctggtctcaaaactcgtgacctcaagtgatccacctgcctcggcctcccaaagtcctgggattacaagtgtgagccaccgcacccggccatgaattgttagtttaaaaaaatgtgtattaggggttctgatttgactgctcaattttaagctaaactagagaataaagcatgtgcgcggtggctcacacctgtaatgccagcactttgggaggctgaggtgggtggatcacgaagtcaggagatcgagaccatcctggctaacacggtgaaaccctgtctctactaaacatgcaaaaaaaattagccaggtatggtggcgggctcctgtagtcccagctactccagaggctgaggcaggagaatggcgtgaacccgggaggcggagcttgcagtgagctgagattgcaccactgcactccagcctgggcgactgagcgagactccgtctcaaaaaaaaaaaaaaagaatctggagaaaatgactaaagtatgaatgggaataaaaagaaagcacaatctccagaaggaataattaggatataatcaggataagataatgggtaaataggccaagtacaatggctcatgcctgtaataccaacactttgggaggccaagagggcggatcacctgaggtcgggagtttgagaccagcctggccaacatggtgaaaccccatctctacaaaaatacagaaattagccaggtgtgtggcatgtgcctgtaatcccagctacttgggaggcaggagaatcgcttcagcctgggtggtggaggttgcaatgagcagagatcgtgtcactgcactccagcctgggcaacagagcaagactgcctcaaaataaataagtaaataataaataatgggtaaataaagcagaacaagggcattcacagttgaagaatgacactacagatcagaactaagattgtcagccagataattttgtgagagaacaaagctaaaccaaatcacatctgaatttataaattccagttctaaatctacgcacaatttttcatgttttccattccgtaccttccaagtaactaattcctcttgaaaccagtatcaaaaataagtgtcatctttcaatgcgacagaaatatttctaaaatacttaatataatagctgaatgtacaacactcatcgtgcagctgttcctccgatatcagtagcaacttgtgaaaaatcagtggtctcagatcaacaggtttttgatactgaatggtacagtgggaaccatgggttttggagcaaggtcagtctgggatgaaattgtgactctgtcacacattggccaagtgaccttgggtaggtaagtcacatctctgtttccccatctgtattatggggaatagtattacatgcctcactgggctatagtgaggattacatgagataatgcagtttatggaaagtgtaaacagtgctcggtgtaaagtaggagctgtgataagtggatccctccttagaaatgggatctcgggccaggagcagtggctcacgcctgtaatcccaccactttgggaggccaaggtgggtggatcgcttgaggtcaggagttcgagaccagcctggccaacatggtgaaaccctgtctctactaaaaatacaaaaattaggcacgtgtgatggtgtatgcctgtaatcccagctactcgggaggctgaggcaggagaatcgcttgaatccgggaggtgaaggttgcagtgagctgaaatcctgttactgcatcgcagcctgggcgacaagagcaaaactccatctgaaaaaaaaaaaaaggaaagaaagaaggaaagagaaggaaagaaagaaggaaagagaaaggaaggaaagaaagaaagaggaaaaaaggaaaggaaaaggaaaaagaaaagaaagaaaaggaaggaaagggagaaatgggatgcctgtcaggtgcagcgctctggggaggcgtggagagcctataatagggaccaaggtgctttttagtcgcagaacatggattatttgttaggtgtggctttggcacatctaggtcattggttctgccgacttgctaaacccaaccatctgggcattttctcggctaatatagaggatgttttcatgtgaacacgtgtccacctgtgaaatgtttataatgttaaaggttcgttctggggcaaacatctgatagcgcctggcaaacccaacaaatgccttttctgtaatgagtaagcctcctaatgcccaaagaaacagttgaattcgttagcaacatgtcggatgttttccctatgtctgtatatttcttcgctagtttttttttttttttctttttgagacggagtttcgctcttgttgcccaggctagagtgcaatggtgccatctcgcctcaccgcaacctctacctcccgggttcaagcgagtctcctgcctcaacgtcctgagtagctgggattacaggcatgtgccaccacgcttggctaattttgtatttttagtagagacggggtttctccatgttggtcaggctggtctcgaactcccgacctcaggtgatccgcccgtctcggcctcccaaagtgctgggattaccggcgtgagccaccgcgcccggcccgctagttctaatatttatgctttttggagggtgaagggcttgaaaggcatcaaaaaccttggtttctaggagcgagccaaattttctcccttagagactgaaggaggttatccgactccgcttccaggaaaatccaatccgcaatttttccctcgctttggctcttccaggtctcactactcgcgccggggagacgcggtccggcctacgctaggccggcaagaatctaccaggtcccaggagggcggggccgagccccagaagtcggggcccgggccaggagtcttggtgcaggcggactcgggcgcgtgccatgggaccacaactcccggcacgcaccgcggactgcgccgaacacggttggctgggagatccaaccctactgctcccaccggccaatgggacggaggaaagaggcctgacccggattctcggaggccaatggcaatacagaggaggcgggtgcttccttaccactcaccttgcgctcagagaagccacatttaaaaggtcgtgccgggccgggctttcgcaggcagtgggaccagagccgggaggggcggcggtgtcccgggaaagcggctcttggggcatccgggtcccctcgaggcgggctccggacgtcgccgtgggcggggccgagggcggggcctggcctcgttgtggagcggctcgtaatccatcatggcggccgcggggtttggtgtctgtgcctgagcagcgctggagccggagccggttcccgggtcctgcggctgaggagcccctccgctgtccacggcccctaccggcggggggcggctgggtccctcggcggagctcgggagatgtgactgcctgagggcggtggtggtgtcagcgtccggggccgggggagggggtgtctcgggcagagacccccgggcttggggcagctgaggcggccgggcctcctctacacggggcccgccttccgctgtctgggccgcgagagtccttcgtcccttacagccccgccccggctttgggacactgcgggtggtctgtttcccccagcttgggacaccccgttttctgaggcgtggaagagcgtcgccccggagtaagctgcccgtgccgcgccccgacagcttccctcagccccaagccgccccttattccggatcccggccccaactttggccacggagcctcccattcaaatccctcccttgctgtcaaggggtctccccttcccc

SEQ ID NO: 94709 - DNA, 15735 bp, Homo sapiens
attagaggctcgcgggagccaccttgggggaaggggagaccccttgacagcaagggagggatttgaatgggaggctccgtggccaaagttggggccgggatccggaataaggggcggcttggggctgagggaagctgtcggggcgcggcacgggcagcttactccggggcgacgctcttccacgcctcagaaaacggggtgtcccaagctgggggaaacagaccacccgcagtgtcccaaagccggggcggggctgtaagggacgaaggactctcgcggcccagacagcggaaggcgggccccgtgtagaggaggcccggccgcctcagctgccccaagcccgggggtctctgcccgagacaccccctcccccggccccggacgctgacaccaccaccgccctcaggcagtcacatctcccgagctccgccgagggacccagccgccccccgccggtaggggccgtggacagcggaggggctcctcagccgcaggacccgggaaccggctccggctccagcgctgctcaggcacagacaccaaaccccgcggccgccatgatggattacgagccgctccacaacgaggccaggccccgccctcggccccgcccacggcgacgtccggagcccgcctcgaggggacccggatgccccaagagccgctttcccgggacaccgccgcccctcccggctctggtcccactgcctgcgaaagcccggcccggcacgaccttttaaatgtggcttctctgagcgcaaggtgagtggtaaggaagcacccgcctcctctgtattgccattggcctcygagaatccgggtcaggcctctttcctccgtcccattggccggtgggagcagtagggttggatctcccagccaaccgtgttcggcgcagtccgcggtgcgtgccgggagttgtggtcccatggcacgcgcccgagtccgcctgcaccaagactcctggcccgggccccgacttctggggctcggccccgccctcctgggacctggtagattcttgccggcctagcgtaggccggaccgcgtctccccggcgcgagtagtgagacctggaagagccaaagcgagggaaaaattgcggattggattttcctggaagcggagtcggataacctccttcagtctctaagggagaaaatttggctcgctcctagaaaccaaggtttttgatgcctttcaagcccttcaccctccaaaaagcataaatattagaactagcgggccgggcgcggtggctcacgccggtaatcccagcactttgggaggccgagacgggcggatcacctgaggtcgggagttcgagaccagcctgaccaacatggagaaaccccgtctctactaaaaatacaaaattagccaagcgtggtggcacatgcctgtaatcccagctactcaggacgttgaggcaggagactcgcttgaacccgggaggtagaggttgcggtgaggcgagatggcaccattgcactctagcctgggcaacaagagcgaaactccgtctcaaaaagaaaaaaaaaaaaaaactagcgaagaaatatacagacatagggaaaacatccgacatgttgctaacgaattcaactgtttctttgggcattaggaggcttactcattacagaaaaggcatttgttgggtttgccaggcgctatcagatgtttgccccagaacgaacctttaacattataaacatttcacaggtggacacgtgttcacatgaaaacatcctctatattagccgagaaaatgcccagatggttgggtttagcaagtcggcagaaccaatgacctagatgtgccaaagccacacctaacaaataatccatgttctgcgactaaaaagcaccttggtccctattataggctctccacgcctccccagagcgctgcacctgacaggcatcccatttctccctttccttccttttctttcttttctttttccttttcctttccttttttcctctttctttctttccttcctttctctttccttctttctttccttctctttccttctttctttcctttttttttttttcagatggagttttgctcttgtcgcccaggctgcgatgcagtaacaggatttcagctcactgcaaccttcacctcccggattcaagcgattctcctgcctcagcctcccgagtagctgggattacaggcatacaccatcacacgtgcctaatttttgtatttttagtagagacagggtttcaccatgttggccaggctggtctcgaactcctgacctcaagcgatccacccaccttggcctcccaaagtggtgggattacaggcgtgagccactgctcctggcccgagatcccatttctaaggagggatccacttatcacagctcctactttacaccgagcactgtttacactttccataaactgcattatctcatgtaatcctcactatagcccagtgaggcatgtaatactattccccataatacagatggggaaacagagatgtgacttacctacccaaggtcacttggccaatgtgtgacagagtcacaatttcatcccagactgaccttgctccaaaacccatggttcccactgtaccattcagtatcaaaaacctgttgatctgagaccactgatttttcacaagttgctactgatatcggaggaacagctgcacgatgagtgttgtacattcagctattatattaagtattttagaaatatttctgtcgcattgaaagatgacacttatttttgatactggtttcaagaggaattagttacttggaaggtacggaatggaaaacatgaaaaattgtgcgtagatttagaactggaatttataaattcagatgtgatttggtttagctttgttctctcacaaaattatctggctgacaatcttagttctgatctgtagtgtcattcttcaactgtgaatgcccttgttctgctttatttacccattatttattatttacttatttattttgaggcagtcttgctctgttgcccaggctggagtgcagtgacacgatctctgctcattgcaacctccaccacccaggctgaagcgattctcctgcctcccaagtagctgggattacaggcacatgccacacacctggctaatttctgtatttttgtagagatggggtttcaccatgttggccaggctggtctcaaactcccgacctcaggtgatccgccctcttggcctcccaaagtgttggtattacaggcatgagccattgtacttggcctatttacccattatcttatcctgattatatcctaattattccttctggagattgtgctttctttttattcccattcatactttagtcattttctccagattctttttttttttttttgagacggagtctcgctcagtcgcccaggctggagtgcagtggtgcaatctcagctcactgcaagctccgcctcccgggttcacgccattctcctgcctcagcctctggagtagctgggactacaggagcccgccaccatacctggctaattttttttgcatgtttagtagagacagggtttcaccgtgttagccaggatggtctcgatctcctgacttcgtgatccacccacctcagcctcccaaagtgctggcattacaggtgtgagccaccgcgcacatgctttattctctagtttagcttaaaattgagcagtcaaatcagaacccctaatacacatttttttaaactaacaattcatggccgggtgcggtggctcacacttgtaatcccaggactttgggaggccgaggcaggtggatcacttgaggtcacgagttttgagaccagcctggccaacatggtgaaacccctcactactaaaaatacagaaattagccgggcgtggtggcatatgcctgtaatcccagctacttgggaggctgaggcaggagaattgcttgagtctgggaggcagaggatgcagtgagctgagattgcgccactgccctccagtctgggagacagagaccatgtctcaaaaaataaataacaattcacttaagaagcatttattgaacatctgtatgtgaagcactgctttaggtgctgagacacagtggtgggggaagaaacccacccttgtcctcatggaacctacatggaaggatgggcaataagcaaaataacaatccaaacaaaagatcagcctcaatgctggaattaaatttctgggtccataaactttcagtcagtccagtccatcctctaaaggactgcattatgacacctccctagagcttaaatctacattgattcacaattcaaaggggcttcatcaagtccctttaattctgagttcatttcttcacccgtaaatggaggtcatagcttactttacaagggttttgggttttttgtttaatttgatttgtttgtttgaagacagggccttactctgttggccaggctggagtgcactggcacaatctcagctcactgcagcctcgactttctgggttctggtgatcctctggcctcagcctcccaagtagctgggactacagggacatgccaccacacctacgtttttttgttgttgttgttttgtagagacagggttcatgaggatcaaactagatctcatttggttttccacaaagattgggactatgcttcctgggagtcacagcagaggtcagctgcacctgatctaaagccttatccctagttttccactttgccattttcttgttttaggtgagccccatgcccaatgcccagactctagtatttttttctagagatgcactgtatttttttttttttttttttttttggagacagagtctcactctgtcaccccggctggagtgcagtggcacgatcccggatcattgcaacctccacctcccgggttcaagcgattcacctgcctcagcctcctgagggattacaggcacccaccaccacgcccagctcattttgtatctttagtagagatggggtttccccatgttagccaggctgatctcaaactcccgacctcaggtgatccgcccgcctcagcctcccacagtgctgggattacaggtgtgagccaccgcacccggccaatgcactgtactttaaaaatgcctgtataatactgtagaatgatactttttttaaaaaccgaggcacagtctcaagaggtcctgagaacataggccctgaatgatactgttaagggcttaaaaactagaatccaaagcctggcaaatgcctgacaatcggaaataaatattgcttggctgggtgtggtggctcacacctgtaatcccaacacttcaggaggccaaggcaggcagatcacctgagttcaagagttcaagagcaggctgaccaacatggcgaaaccccatctctactaaaaatataaaaattcagctgggcgcagtggctcattcctgtaatcccagcactttgggaggctgaggcgggcagatcacgaggtcagaagatagagaccatcctggttaacacagtgaaacctcgtctctactaaacatacacaaaattagctgggcatggtggcacgtgcctgtagttccagctactcaagaggctgaggcaggagaatcgcttgaacccgggaggtggaggttgcagtgagccaagattacgccactgcactccagcctgggtgacagtgagactccgtctcaggaaaacaaacaaacaaacaaacaaaaaaattagctgggcgtggtggtgggtgcctgtagtcccagctatgcaggaagctgaggcaagagtatcacgtgaacccgggaggcggaggttgcagtgagctgacatcccgtcactgtactccagcctgggggatagggcgagactttgtctcaaaaaaaaaaaaaaaaaaaagtaatattgagtaatattgtcatatattgaataaatcccttcaagttcatatatcttcattaaaagtgattcagttaaagcaaccccccaagttgctaaagggattcagtaccatgtaaagatttcagtttattccattaaaaaaaaaaaacacaaaacacctactggaattacacttaacaatggcgccctctagtgggccactgcaaggaaataatcaccaataattgcttttagataagcamttttgtgttagttccacttaataggtaatcaccattcagcagatactggatgaacagcatgggctggcaggctgggagacaccaagtgaggagggtaaataagctgacatatggccctggggaaaaccaaacccagctactcaggaggctgaggcaggaagattggctgagcccaagtctatagtgagccatggtcatgccagtgtactgcagcctggattacagagaccttgtctcttaaaaaaamaaaaccaaacttgactcagactcccactctttgccattcccttctctccagagatatacagcctggataacctcaaaaacatgacaggtcgatccatctaaagctgcaacacagcctatagaatattcaattgtctgcaaactccccaaaactagtaatacaacttgggataggaaaaacaaaaaaagaggccaggagctgtggctcacacacataatcccagcactttgggaggcaaaggtgggtggatcgcttgagcctgggcaacaacaaaaaaattcgtaaaaataaaaaaaataggcagcgtgtggtggctcatgcctgtaatctcaacactctgggaggctaaggtgggaagatggcttgagcaggagggttgcttgaggtcaggagttcaagaccagcctgggcaacatagtgagacttcatctctgccgaaaaacaaaaaacaaaaacaattagctggatgtggtggctcagcacctgtagtcccagctactcagaaggctgaagttggaaactggttgagaccaggaggttgagacgtgattgtgccactgcagtccagcctaggtgacagagcaagaccctgtctcaaaaaaaaaaaaaaaaaaaaaaagccaggcatggtggtacgtcacatgcctgtggacccagctactcgggaggctaagataggttcacttgagcctgggaggtagaggctccagtgatctgtgatccatgccaccccactccagcctgggtgacagagtgagaccctgtctcaaaaaaagaaagtgaggtaagaagttgtttattgtgttgttatagagaagcataccatttaatgaaaaagagccaagttgtatttgaaagttatcaaatgcagtgttcaaagttactaccattgagactgtcctaggtttacgtggagtagttagggctctgtcggaaggcattttgtcagccaagcccttcctcagctgtcctcagctccttattattacccggaacaaaagaacagaaaacaatgatgttaagacatctatagctgggctcagtggctcacgcctgtaatcccagcactttggcaggctgaggcggggggatcacaaggtcaggaaatcaaaaccatcctggccaacatggtagaatgccacctctactaaaaatacaaaaattagttgggcgtggtggcacgtgcctgtaatcccagctactcgggaggcttaggcaggagaatcgcttaaacccaggaggcggaggttgcagtgagccgagatcgcgccactgcactccaacctggtgacagagcaagactccgtctcaaaaaaacaaaaaaaaaaaagacgtctataaatatcaaaaaatatggctgggtgcagtggttcatacctgtaatccaaacactttgggaggccgaggcgggtggatcacaaggtcaagagatcgagaccagcctgstcaacatggtgaaacgatctccactaaaaacacaaaaattagctgggcgtgttggcgcatgcctatagtcccagctacttgggaggctgaggcagaattgcttgaacccaggaggtggaggttgcagtgagccgagatcgagccactgcactccagcctagcgacacagcgacactctgtctcaaaaacaaacaaacaagtttgccacatatgtgaagacagcgcttgcatatagtgtcccttttttttttttttttgagacagtctcactctgtcacccaggctggaatgcagtggcacgatctcagctcactgcaagctccacctcccgggttcacgtcattttcctgcctcagcctcccaagtagtagagactacaggtgccagccaccatgccaggctatggtttgttttttctgtatttttagtggagacggggtttcaccatgttagccaggatggtctcgatctgaccttgtgatccacccacctcagcctcccaaagtgctgggattacaggcatgagccaccacgtccggccgccttttcttttcctttytttcgagacagtctcactgtgtcacctaggctgaagtgcaatggtgcgatctcagctcactgcaactccgcctcccgaattcaagcgattctcatgcctcagcctcctgagtagctgactacatacaggcttgtgccaccacacccggctaatttttgtatttttggtaaagacgaggtttcactgtattggccgggctggtcttgaactcctgacctcaggtgatctgcccactcagcttcccaaagtgctggattacaggcacatagcacccttgtttttaagaatgttcccccaaacctacatcagggcaccatttttagatagtcatcagaaaaaacaatgcacaggaattctcacattcttcagcgagaactctggcgtctttttatcttttaactctgaatcatccacaagttaatgctccacactacttcaattataggatgaaaacagctttgctttcccagtctccatttttctttgcttattttcttcatgtttatctgagtacatggacccagaacattcactgtattatcatgaataattcagcatcttacaagtcactctccaagcaggacagattaaggcagcccggtgtggacataatcacatctatggctacaaggaacacgcaacagaaaatcakattccaaccaagcaaaaggctgcttgtttttttttttctttgaaacacagtctcgctctgtcacccaggctggagtgtggtacgcgatttcagctcactgcaacctccgcctcccaggttcaagygattctcccacctcagcctcccaaatagctgggactacaggtgcacaccaccacacctggctaattttttgtatttttartagagatggggtttcaccttgttggccaggctggtctcgaactattgacctcaggtgatctgcccgccttggcctcccyaagtgctgggattataggcgtgagccaccgtgcctggcctgcttggttaactttattcttccaactttaccagctgcattctcagtcatttaaaggatataggaatggaggccaaaacagaccatttggaggtcagggatgccatgttttctattggggcaatttcatggggcactgtgccttgtgaatgacagtgagtggaagacaaaggattctccatattattccaggatgggagcccattcgactgtaacactgtgcactttgaaagagctgaaactattccctaataccgggactcagctggcaacccaaggaagcactgttcatctgccacccaggcttggtgttaggacaggagaaagcaggcctgtgggctggaggccgtcacagggccgtcaatgcagacaaagggatgatctctcgagtctttgctgagccacatatggggaccacacatcacagtcttcactcctgcaaggtccacagtcccgtgcttctggagcacctccttatccctcytgttccaaaagcctctggcgtgtttccatcacaatctcctccattatttctggctttaagatgtctttgatctgaaaaagggaaaaggcatttgttcagaaaagaaaccaaccataaacagaccaccaagccaatccaaacataaatcaagccgttaacataaactttctgtattcctttcatgtctcagagactaagcgttacaagatatgatctgctagaagcagcctaataaatcagcaagatgctctgggatatagtcgacaagaacaaagatattattctgacattcatccaaaagctggctgaaatttgggagaggtaagatgtagtccagaggttgctctcataaactagtcccacctgacacctcctgccccaaaatccttagactgacactaggcattgagaatattgcaagtttcttagggaaagatctaccagacactcattaaggctgtttcaggccagttcatactgacggatgttgggaaagtattggggagatgtgcatattgtctctgaacaaacaacagagcagctcacagatcagtgaagaagggagaggccctggggagagtacctgatgtggaagggatgcttcatagcagtacaggatgctggtatcatacagcatcatcctctgagttaccagcgagatgatgcagttccgaagccgggatatcacctctcgatcagcaagagagacaggctataaggagacacagagaggggaagggaaatacaaacaggaccaaaatacgtgaccagccacagaaattcacaaataaatcatttatgactcagacagtatcaccctggaactccaaatcaaccaaacagctaattccaagggagattaaaaggaatggggcagggtgcagtgtctcatgtctgtaatcccagcactttgggaggccgaggcgggtggatcacaaggtcaggaattcaagaccagcctgaccaacatggtgaaaccccatctctactaaaaatagataaattagcagagcatggtggggcacacctgtaatcccagctactcaggaggctgaggcaggagaatcacttgaacccaggaggtggagcttgcagtgagccgagatggcaccactgcactccagcctgggcgacagagcaagactccgtctcaaaacaaaacaaaacaaaacaaacaaamaaaaaaacagaaaaagaatggcttcttcactggctcttcggctattaccctgcaactttgccacctccaccaacaaacaccaaaccattcactgaattcatctccttagaagaraagataatatgggcttcatgaacataccgtgatggaaagtcaaagtgactcagcctacaccagtaacatagctaaaaacaaccaacttcactggccacaaaaacacagcaaagactgagccccctccatcccactgaaaatggccacagtgtttgctcacctccaggtttgcaatgaagccccctgcttcctcttctttgtgctcaggtgttgggtaaatccagatgaagccgttgttaccgagaatcactgaggcaccacatggcaaatcatgaaagtgsgtcttctgccgtttcaccagggagggggaaacctggaccaaaaccccctgacctagctaaagaaatatatcacgaagctaggtcactgcaagattggcgggatgaatgaaaaggagactacagaatatacatcctaagtatattcaaattggtgtccttcctgtttataattgctgtcgcctacatgcatacacatagtacacatttttgcagagaacgctttgggactcagaggctattcatacatcccagcagaaggtgaccttcaatactcttctctgtcatttccctttgcagtcttccttgcactctaagccagaactcatgtgccagacattagagaagctgaagccaatgaggaagtgagctggagcctcctgctggcccaggagcactgcgttgttccatgaccctagctcatacctgaaccccaaacactcatcttgcctgtgagatgtgtgcctctgggtaggtaaggagatgggtggagctgggtgcaaatccatgtctggtcctggcaggacagctcaagtccacgtcctgccaaggaagagtccgcaggacccagggttgtgaaagtcagcatactgcagcagtcctctgcctactccatgtacatcaacgtggctgtctgcagccactccattaagggaagaggtttttgttccactcagaaaataaaaacgttcacccagataaagctaagagactagtaaatcctaatttgttttaggaagtatgctctccttaaaatagtaaatagcttcaataatgcaacctcgtacaagaaaagcagtgaaattccatttagaggctcagatgacagagcaagctttgccagcaataacatccactggactgattggacgtttgtctaagggctgtttaaccagacccagcctgcctttgttcccaggacagcctcagccccagtgctgagctgcagcgccccctggaggaagagagacagctgcacctcccagcccacagttggaggggctcttctggtgaaagtcagtctccttggagaaaaaggataaaacttgttctttacaaggctactgacccatgaccctgtgaaccctgaccgtcctgatgttacgtttaaggaacacgatcagtttgtgggatgccagcctctattaatgcttagctactggggttctttaggccagaattccagagagctatggggattcaaaaatagccttgtagtctcagtcagcaaacaggaacatcaagagcccgacttacttttccatatttcaggctcctcgtgtgcaaagagacagctccgtcagagaacactgcctggacctcagcctggccagggtgatgaaggaacaaacagcagccttggccacacactgtcctgtcctctgcagcctctccccttgaccccacacctccatcttttcctcccctctccaatggtccaggctcaacaatctttgacccagagcacatcactgtgaccttacctctccccttggttgtcatgaatatcttttttttaaaaatacagacagaaggccaggtgcggtggctcacacctgtaatcccagcactttgggaggctgaggcaggtcgatcacctgaggtcaggagttctagaccagcctgaccaacatggagaaaccccgtctctactaaaagtacaaaattagtcgggcatagtggcgcatgcctgtaatcccagctactcaggaggctgaggcaggagaatcgcttgaacccgggaggcagaggttgcagtgagccgagatcccaccattgcactccagcctgggcaacaagagtgaaactccgtctcaaaaaaataaataaataaataaataaataaataaataaataaataaaataaagacagaggccaggcatggtggctcatgcccgtaatcccagcactttgggaggccgaggtgggcagatcacctgaggtcaggagtttgagaccagcctggccaatatggtgaaacctgtctctactaaaaatacaaaaattagccaggcatgacgcacgccggtaatcctagctatttgggaggctaaggcagaattgcttgaatccaagaggcggacgttgcagtgagccgagatcgcgccactgcactccagtctgggcaacagagcaagactccgtcattaaaaaaaaagaaaaatttaaaaaataacataaaatagagacagagtcttgttctgtcacccaagctggaatgcagtggtgtgatcatagcttactgtagccttgagctcctgggctcaagcaaccctctggccccagcctcctgagtagctaggactacaggcatgtgccaccacgcccggctaattcttttttaatttttttgtagagaggggggtcttgctatgttgcccaggctggtcttgaactcttaggctcaagcagtcctccctccttggccttccaaagcgctgggattacaggcatgagtcaccacactcggcctgtcattaatatcttgacgtgaacaacaccttctccactccctgcgctaaaagttaacaccattaacaaaagcctagtctaaagcacaggccaccgtaagttacaagacccaaagaaatgacttagcagcaggtcccaacaagagctggggagtcagcctgaattaaggagactgagaaaggatgcagcagagcccgacacttggtctaagactcggatccctgcaaggatgacatggttcttccgtcagagacatacaatggaaggcccatttcccagtcccacagaaaagcatcaagaggctggagtgcaaagcgcaggatacactgataaggtccccttcctgtaagaaacctctcattgcaagctcatcttctgcagatcttctcctctgaaatacacaaagaaatgacattacttaagccagatcctcagaaaggtctccatcacttctctttcacttccttttgagatgtttgaggccaaccacaatattcaagcactgagaactatagcaagagtaggtaacccaagccacttgaggggaatcagtgataatcacgactttccatctcaaaagacttttccacagctcctcttcctctttccctcccttctctgaggaacattcagacccctcccaatctcacctagccaacatttccatagtcatcttccatgacagccctctgtggtccagcaggaccagactaactcctgcttggatatatctctgctcatacatttccctttatctcagattccctgaactagtcattcaaagtctctccatccttccaggatcaactccaatgcctgtctttcctacaagcttctctcactgaaatttccttttgtataaccacagcttatttattcttctactgccagggactaggtcagttatcttatatcccctgctggggaactcaatcgtgcttggcactcggcacagagcttggcacagtaagcctctctgtaaatacacgctggactgaagatcaaggtgaaccatggcattttacaaaaggctgtggcttagttactgtggttgtctggaatgccagcaaccacattccacacatggttgaatgaaatgcctttcaattcacaaaaacctaatgtaaagacaacttttcaaggaacatcttcactatgcaaggctgttatatccaaaaaggaaaactgttaacaaccagcatctaagggcttctctccccaactctctgttgggatcccaccccatggatgtttctgatcctaccatatgccaactgctccctctttcgggagacctggacagggtgaaaagtctacatacacatctaggcagcaaacttcacagcagacaaacaggagtcaaaggggcaacctcagtgtaaatcaaagtcctctggtggaacaaagggtcccacggctccccccagcccactgggccctagtccatggccccagctgtagcccttaccagctctcctccaggaaggttcatggacgagagcagcaagaccgaatccagcctggagttggtctccaccttccacctcttctgttgaacctataagccaagttccacacctggacacatgctccatgttcatgtgtcatatcataaataaccagtaaggccagatgtggtggctcacgcctgtaatcccagcactttgggaggccgaagctggtggatcacttgaggtcaggagtttgagaccagcctgaccaatataatgaaaccccatctctactaaaaatacaaaaattagctgggcgtggtggcgggtgcctgtaatcccagctacttgggaggctgaggcaggagaatcgcttgaacctgggaggtggag

SEQ ID NO: 94710 - DNA, 13489 bp, Homo sapiens
caacctgcaaattttcatagaaaccaacaaagctacacatccaatagacagtacaactctaatgcaggtactgttataactgaagtgttttacggttttttcttcctgcttaaagcacttggtacataagtatctctaactcgattccataataagacagagacgcttggtctcaaacatttttgtttgagtattacggtgaacattacgctacaacataaattttaaaagaaaaagtacaactgttaccaccaacagatggcgttagtgatcacttgtttagcatcaatctggacttgagacaaaatgagccgaggaacagctttttggacctaagctcatatatccataaatttttgcctcatgctaataatacagatgaatattatttaggagatggaagatattttagagatctcaacttagggtgcatttcaaacccccaggtcttctctaattttaatatttgactcgtctcagggcccatgtcccacccccaaataccatagagaatcatggctgtaggaattcattgtaaagtgatgagaaagtgttgtatctttcaaatgtgtaagaatgaaagaatacgaaggcaggaaaaaaaaggacaaatttgctaacccactgctttgttccaatcctgattttacataagacaacatcaatccaatgccaaggtcatgtgatcttgccaagtccacataaccagtatggcacattcagtgcctcgtattcagtggactaccagtagttcaagtacagtacagagggcaaatgtaaacagaggtgggaagcatcaggaactgagtctgaagaaataaagggcaatgtttgtcacaataacagaaaagcctggactgtacacaatgaaaaggcagagtccatattaatgaactattaaattgtatcttacaaattccattcaggatacatacataaacagaaaaagagagagagaaagaccatactgaattcagaagtctcaacaaatggatacctaagcaatgacttcccctacaacagacccttggtatcagtttattaagtattttttccaaggcaacttgaaagatttccaaattggagaatattactatggcatataaaacattaaagtataactattttttaactccttcagacctttaatgattctaagaagattgaaataatttatacttattcacattactatataaactgtaaagctgactcatatgcaccatgaatttaagccatcacgaaatgttacattttactctttaatttactctaaattcttccttctacagctattgctttttgcttctctttgatcaccagcagtaggagtagctgcaggaagatagtgctggcaacaaaagctactatggccaggcaacatggctcacacctgtatctcaccactttgggagagggaagtgagagggccacttgagcccaggagtttgagaccagcctaggcaacaaagtgagaccctcccccccgccaccaatctctacaaaaaaaaaaaaattaaaaattagctgggcatggtggttcatgcctatagtcccatagtcccagctacttgaaaggctggggtgagagaattgcttcagcttgggaggtcaaggctgcagtgggccaagactgtgccactgcacactagcctgggcaacagagtgacaccctgtctcagaaaaaaaaaaaaaaaaaattactacacaaatagtagagattagcaaatcaaactgagatttacctactaggtagcagactaggaccaatctgggctcagtaaattacaaattgtcatatgccatgcatcctccctgtcattcatgggatggaatagtgagaacccacaattataagtgttaatttgtgaaagccaggaatctattctatcagcaaccgactaggaaaaaaaacgttttttgctctaatagtaaagatccctctggtcttttaaaagtaacaacacctataacaacataaatatttgcatagcgacttgtagcttacccacatactttaatttcaccagaaggatttcaagaaatgttctagtaaatttatgacctagtttttcatcagaacatttttattaagaactgagagtactaggtctctgaagatacacttactccttcctgcataagttccggaggccacccaatgaccagaagaagggaatttcctgtataagtattgaggtgttacagagattgaaacactgttcttcatttattctaatactcctctaagataaatattattatttatcaataatgtaatcaatttaagaaattgataaccagtttagaaaaggaggcttaaagaggttcagaaggttatggaatagtgttctctctcaagaagagcaaataaagctttccaagaaaacttccttccatattcctccccactctgaaaaaaggtgtccctatttgtttcatttgctagaattccttcgtatttacttctgtctgccaaggaagagatgtcaggaatatcttcacagagaatctggtatctgagatgagtcttaacaagtagaaaatgggcatatggaagggaaatttatggtaagggcaatcctggcacgaggaaatgctatttgcaaagccacaagaacggaagaaattgccataacggaggaatgttggttctttgtagaaaaaagcataagggtttgggggggagggacatagggtgtgtgtgtctgtgtgtgtgaacatggaagataaattacaaagactctagccagctcaagaagcacttacaacagcatggaaataaatgtactttaatgtaaatcaagatttcctaactaagagacatgaataaaactttagggccatacattgtccaattccccccaaagtatgaatactgtgtacatgaacacacccaaaaataaactcattttcctggatccatagctattagtgattttcaaagggactcaggaataaaaagcagttaagaaccactgttctgggtgactgggagtccctgtataattatagacagagaaatgtaccacaatacttttattttagaaaggtagcttaggtaacatatgcggacatttgacgaatttgagaaccttaaatgcagaaggagcaataagaaggttattatcctactgcagccaagaaattataaatacgaacatcaaaaaacctaattccagagacttttcaaagtaaaagtgcctgaattcatcaaccagctacatgcagactgtgagagagaaaaaagctaaggttgccttattctacttcttaaagttcacgtcattcacttattacataccatcatcagtaaaagccattaaacacagcacagcagctgcaagtgatagggtgccactttgttttatttgcaatgagccaccactggaaaattaagcacaaaatatcaaatatcccaaagaggagacactggtggcctagagcaaggtttgccaaactggcccacaagctaaatccagccccatttttgtaaataaaattttaacagaacacagccactcatccatttatgtgttgtctatggctgctttcacactccaaaagcagaactgaatagctgcaacagagacttgcatggcctgcaaagtgtagattttaatttactttttgggcctttagagaaggtttgccaacctctcgcctagaacaaaaatggatagattctacttcagaaagtactgtttttttgtttgttttcttgagacagagtctcactctgtcaccaaggctggcgaacagtggcgtgatactggctcactgtaacctcaacctcccaggctccagagatcctcccacctcagccctccaagtagctgggacaacaggtgtgcgccaccatgcctggctaatttgtgtgtgtgtgtgttgttgttgtttttgtagagatggggttttgccacactgcccaggctggtcttgaactcctgagctcaggcaatctgcttgcctcagccttccaaagtgctggaattacaagcgtgagccaccacacccagccagaaagcactgctttagtgcaacagatgtgagtaatatgcaaagtaaggcactctctacctctgtgcatggatcaaatccagccatgtagccatcagccttctggagcagctgtagataactctgcaatagcagcaagctacttctaagatcctcatcaaattgaatttacaaaatcccaagtgttactccgtttagaaaaatactactcctcaaaagcaacatattaggggccaacgtttcaaaccaatccaaatcattgtccttcccctattcttccattcatatctaccttctctctcctcaaggttgtcttttaaaacgaaaaagaagaaaatgctaaagatccaagtgttattagtaaactgctgaaaaaccaggctcactgcaacctccgcctcctgggttcaagtgattctcctgcctcagcctcctgagtagctgggattataggcacccactaccacgccagctgatttttgtatttttagtaaagacaaggattcatcatgttagccaggctggtctcacactctggacctcaggtgattcatccaccttggcctcccaaagtgctaggattataggcgtgagccaccacacccagcctgcatgaattaaaaaaaaattttaaaaacagctttatttggtccaaaaacaaaagacaaattttggtctattaattacgtgacagactaaatgggttgttggtggtgtgtacctgtaagtgagaggacagcttgagcccaggagttcaagactagcctaggcaacacagcaagactccgtccacctcaatgtttaaaaaacaaaacaaacaaacaaaaaaacctttatatataggttacacacaataaattacacatgttcaaagtacatatatagtatacacctatgaaaaatcaagatagggaacatacttagtcacccccaaagtgcctgccttcttttttttttttttttgagacagagtctcactctgtcacccaggttggaatgcagtggcgcaatctcggctcactgcaacctccgcctcctgttcaagcgattctgctgcctcagcctcctgagtagctgggattacaggtgcccgccaccacagccagctaatttttatatttttagtagagatggggtttcactatgttggccaggctggtctcgaactcctgacctcaggtgatccacctgcctcagcctcccaaagtgctgggattacaggcgtgagccaccgtgcccagccagtgcctgccttcttttgctctgcataattattttgagacctcatccctgttgttgtgactatcaataaatagttcattcctttatattgctaaatagtatagtcacatcacaatttgtttatccattttttccagtttgtgactatcataaataaagctgctgtgaacattagtacacaagtcctttcagtagatacctaggagtggagctgctggtaggtgtacgttaacttcttttttttttttttttgagacggagtctcactctgttgcccaggctggagtgcagtggcacaatcttggctcaccacaacctccacctcccaggttcaagggatcatcttgcctcagcctcccgagtggctgggattacaggcatatgccatgatgcccagctaatttttgtatttttagcagagacagggtttcaccatgttggccaggctggtctcaaactcctgacctcaagtgatccacccgcctcggcctcccaaagtgctgggattacagaagtgagacgttgtgcccagactgtatgttagcattttaagaaacaaccaaactgtctcctaaagtagttgtactgttttacagtcctaaaagcaaagtatagagttctagtctttcacatctttgcgaacacttggtatggtcagtcttttagataggtagtgctagttcactgattttaattcccatttatttagtaactattaacattatgattaatgtaatataggctctctgcggatcgtgcagggcctgagcgtctccgctggcacaggctctgctcgcaccagctcgctcctgctgccatgcccaccaccatcaagtgggagttcaaggagttggatgctcagcatcgctggcagctgytgtacttgatgatcacagttgtgttaaactgcaaaatgctgagaatgattatattaatgccagcttagttgacatagaagaggacaaaggagttacatcttaacacagggtccacttcctaacacatgctgccatttctggcttatggtttggcagcagaagaccaaagcagttgtcatgctgaaccgcattatggagaaagaattggttaaatgtgcacagtactggccaacagatgaccaagagatgctgtttaaagaaacaggattcagtgtgaagctcttgtcagaagatgtgaagtcgtattatacagtacatctaccacaattagaaaatatcaatagtggtgaaaccagaacaatatctcactttcattatactacttggccagattttggagtccctcaatcaccagcttcatttctcaatttcttgtttaaagtgagagaatctggctccttgaaccctgaccatggacctgtggtgatccaccgtagtgcaggcactggacgctccagcaccttctctstggtasacacttgtcttgttttgatggaaaaaggagatgatattaacattaaacaagtgttactgaacataagaaaattccaaatgggtcttatctcagaccccagatcaactgagattctcatacatggctataayagaaggagcaaaatgtgtaaagggagattctagtatacagaaacgatggaaagaactttctaaggaagactacctcctgcttttgatcattcaccaaacaaaataatgactgaaaaatacaataggaacagaataggtctagaagaagaaaaactgacaggtgactgacgtacaggactttcctctaaaatgcaagatacaatggaggagaacaatgagagtgttctacggaaacgtatgtgagaggacagaaaggccaccacagctcagaaggtgcagcagatgaaatagaggctaaatgagaatgaacgaaaaagaaaaaggccaagattgacagatacctaatattcatgacttgagaatattctgcagctataaatttggaaccattgatgtgcaaatcaagacctgaagcccactctggaaacttaagtgaggctcgctaaccctctagattgcctcacagttgtttgtttacaaagtaaacttgacatccagggaatgaagagcatccaccagctaagaccttgcagaacctttaactggatgttaagtgtttataatgcatgtatgaaatgtagaaagatgtacaagaaataaattaggagagattactttgtattgtactgccattcctactgtatttttatactttttggcagcattaaatatttttgttaaataaaaaaatatatataaggactaaacatcttttcatatacttagcgtatcttctgtggtgaggtatctatcaaatattttgcagatttcaaaaagttggattgttggtgttgagagttcattagtatatattctatatacaagaccttaatcacatatttgatttgcaagtattttctgccatcctgcagccggtcttttcattctcttaagaattctctcttcggctgggtgtggtggctcacacctgtaataccagcactttgggagtctgaggtgggtggatcacctgaggtcaggaggtcgagaccagcctggccaacatagtgaaaccccatctctactaaaaatacaaaaattagccaggtatggtggcacatgcctgtagtcccagctacttgggaggctgaggcaggagaattgcttgaacctgggaggtgaaagttgcagtgaaccaagatcacaccactgcctccagcctgagcgacagaatgaatctcaaaaaaaaaaaaaaaaaaaaaaaagaagaattgaattctcttttgaatagcacattttcaatttgataaaaaatcattttatcaatgtgctattttaaggatcatgcttttggtgttgtaactaaaaataattttgcttgactcaagataaagattttgtcctaattttgccaaaagtttgtaatttaagtcttgaccatttaggtctttgattcattttgagctcattttcccatacagtgcaagatacagactgaagttcatttgtttgcatttggatatccattttgtgccagcattatttgttgaatagactatcctttctctgctgaactgcctttgcaccttgtcaaaattcagttgtccatttatgtactggcttacttctggactctgttctattccattgatctatttcatcatccttatacaaatacaacattgttttgactacttcagatttataataaattgtgatatcagatagcattagacctccaactttgttcttctttttacaaagctgttttggctattctacgtcctttacatttccacacgaattttagaatcagcttgccaatttctattcccccaccccaccgccaaaaaagaaagcctgctggcattttgactggaatcacattgatcaatttagggataattgtcttcttagcaacgagtcttctcacccataaacaaagagtatctatctccccacctatctaagtcttctttacttactttctatgatgctgtgtaattaacagtatttcatatctgatactattatcaatagtactggttttattacatttcaatttccaactgctcattgctaaataaatgcaattgatatttacagactgattctgtaatccacaactttactaaattcacttagtcccagaaattttgcaagttccatcagattttctacagacaatcatgtcaactacaaagaagatactttacttcctcctttccagtctggatgccttttcctttcttttttttttttttttttttgagatggagtctcgctctgtcgcccaggctggagtacagtggtgcgatctcggctcactgcaccctctgccctcccagtttcaagtgatcctcctgcctcagcctcctgagtagctggaattacaggcagctgccaccatgccgcgctaattttttttgtattattagtagagacggggtttcaccatgttggccaggctggtctcgagctcctgacctcaagtgatccacccctgctctccagcatccctaagtgctggcattacaggcatgagccaccaaacccagcttatttctttttcttgactgtattggctgcaatgaacctccagtacactgtgaaacagaagtggtgagagtagccatctttgttttgttgctggtcttagagaaaaagcattcagtctttcaccattaaatatgatactacctacagttttttcagagacatccttcactgggctgaagaatttcctttctaatcctagttttctcaaagtgactacccagaatgaaggttagatcatcaaatgcttgcctcccctgcccccaattttctgagatgatcatatagttttttttacttaatgtagtgaattacaacgattgctttttaaatgttaaaccaactttgcattcctgaaataaaccccagttaattatgatgtattttttaataaactgttacattcaatttactaaaatatggttagaacttttgtatgtatgctcatgtgagttatttctgtgtagtcttcttacctcacaacgtctgtctagtttgagtaagaaggtaatgctgagctcacaaaataagtgaggaagtacttcttcctctacaattttctggaagtgtttgtatagaactggtcttaattcttccttaaacgtttaacagaatttacttgtgaagtcatctgggtctgaagtttattttgggtttttttttggtgtggaaatattgtaatcacaaattcaatttctttaacagatacagggttatttcaggttgtatattcttcttgagtgaagtttggtagtatgtgtctgtcaaaaaattcgtccaattcatctctgttttaaaatgtataggcataaagttattcacagtattcctgttatccttttatatctgtaggctctgtaatgatgtcacttctgtctttcctgatctcaatcagcacagttagagctttatcaattttatcgatgttgccacagaactaatttttttaacttaaattagttccatggcaacatcaataaaatcaattttcattgatttttgtctaattagtagaaagtttaaaaacaatttccacactgatctttatcatttcctttactgtaattgctttcattttacatcaaaatcattttcattgattctaatgagtagaaagttaaaaataatatccacactgatctttagtataccctttcctgtaattactttaatctgctcttcctctaatgcctgaaggtagaaatggaagtgaatgatttgagatctttcttcttttcttatgtaggcattcagggctataaattctttctgagttctacttcaatagtatcccacaaattcttttttctttatttattctgttaagagacagggtctcactctgttgccccaagctacagtggcataatcatagctcactggcctcaaatttctgggctcaagtgattctcctttccagtagctaggactatagggatgtgtcaccatgtctggctaattttttttaaaaaaatgtttgtaaagacagggttttgctatgttgcccaagctggccttgaactcctggccataagtgatcctcccacttcagactcccaaagtgttgggattacaggcatgggccaccacaaccagccccacaaattctgatttgttgttttcattttgattcagttcaaaagactttataatttcccttttgatctcttccttgaaccataaattatttaaaattgtgttgtttagtttccaaagaccagattttcccccattttgttaatagtttcaaattgaattacactgtgatcagataacatattttgaaggatctcaacccttttaaattattgagacttttttgtggaccaaaacatagtccatcatgaaaaatgttctgtagacatttgagtaaactgagaataatatgttattgttgggtggagattctgtaaatgttaattaagtaaaattggttgacagtattgttcaagtctactatatatccctatgattttctgtctgcttgttctatcatttactgagagaagagtaagtatccaacacaaattgtggatatgacaatttctcccttgaatactatccgtttttgtttcaagtattttgaaattctgttattaggggcataaatgtttagaactattacatcctcttgattaactgccctctttatcattttgtaatgacatcctttatccctggaaatactctttgcttgggtcttgtccaatattaatatagccacataatgctcttttgactattgcgagcatggtgtatctttttccatcctttacttttagcctatttgtgtcttaatatttaaagtaggtttcttgcaggcaggagatggttaactcttgtttttttaatccaatctcaccatttctgcttcttcttctttttttttttttttttttgacggaatcttgctctgttgccaggctggagtgcagcggcacgatctcagctcactgccacctctgcctcccaggttcaagcaattctcctgcctcagcctcctgagtagctgggactacaggcgtgcgtcaccatgcccggctaatttttgtatttttggtagagacagggtctcaacatgttggccaggatggtctcgatctcctgacctcatgatcctcccgcctcggcctcccaaagtgctgggattacaggcgtgagccaccatgcccagcccatttctgcttcttaaatgtgtttaggtcttctagattttatgtgattattgatatggttaggtttaagtctattatattttgctatttgctttacatttgtcccttttttttctctttttatgctttcttctgaataagtaagtatagtttctaattccattttatctcctttgttggcttcttagctacaactcattgtttcacaggattgtgttaggatttatagtatttaactttaacttaccatggtcttccttcaggtgatataccacttcatgtacagtacaggaactttaccaagaatcacatcttgtttctagacctgaggtatactatgtctttgtcaaaatgggagagaagcaagtactagaaaaacataaaagaaacagtaacaacaaactgagacctcctccttagcttcatttaaaaagaaagaattgaaaaggaattagatatttaaaaattaaaactctgtaactggaccacctgggtttgaattctatttctgcccgttacatattgtataaccttgggcaagttggttagcctctctgtgcctcagtttctatatctttacaatgaaagtaacagaaacatccaatgagttaatacaggtaaaatgcttagaacaccaagcatctattaaatgctcagtgtattattattcacactgtataagacaatattttctaactccctataccttatcttgtttacacagctcccacacaaggttactctgctccaagtgaatcagtaaggagattaactatagttagactcttagttgcaaaaaaatcaaattacctcaaatatcattacatatatgatactatttattgaacatctgttatacgcttagcattgttctaagctttccatgtgtcattctcacttaatcctcacatcaacccagtgagaagtattgttatgatgctcattttacagatgagaaatgagacagagagtttaagcgatttgcccaaggttgcaggggctggtaaaaaagccagaattctaatgtcaaatgtctgacaccaaagcctacaatctttcctgggggtggggaggaatgaatgcagtctcaagaagggcaggagccacagaagtactaaaggaagaacagtatctacagtgccagaaactagaatcttcactctcatgttccatacctctctctcaaaccacatggtttctctcagaattttgcacttctctcagcacacatgccctactcttttatagttaccaaatggcttcctcatctcctttatcatttctgtaattcatagcttctgcttacatctactttccattcccttaaactttagttttacaggactctacaccaacacatctttgcagcttcagctcccatggttcaatggtaaattaactccatgttttctataactgactatataaattttcccaggtggttgatggattagcaacccttaggtcaaatgcccactgctggaccaatccactgcaatacagttttatatg
